United States Patent Application Publication US 2024/0301345 A1 - sequence listing, part 20

SEQ ID NO: 3451 - DNA, 7726 bp, Unknown
  R151_18m  MAG No. k141_59396
ggcctgtgggtctccgcccgcggcctcgatgagggagcgcaccacgccgttttcctgacgcagcaacgcatccatgacgtgcagggtctcgacctgcgcgtttcctgcggcggacgcactctgaatcgcgtcgccgacggcctcctgggccatggtggtgaacttctgttccatatcgtattcctccatgtcatgcgttccgcgcggagcggctcgcgggcttcgaaagccccgcaagcgccaccgcagaccgcaacttgtcgttgtctgatatggtcaaccgacctggaacccattctattcccaaaacttgagtgcaggtgactcaagttttggattttggtggggagggtgaacagtagccccctctgatgagggagctcacatctatttcaggaggccgacggcagcttcggcggcggataggatttcgccggagaggatggcgttggctacgccttcgatttgcggggtggtccaggtatcgcgtacgtcggggccgatttcgttggcgtactggcgcaccacgcggtatacggcggcgcccgccgcacccggacggtacggcttgcggaagtcgaaggagcggcaggagcacagcagttccacggccagcacgcgcgcaaaggccggaatcgaccggcgcagcttgcgggcggcggcccagcccatcgacacgtgatcttcctgcatggcggagctcggaatcgaatcgaccgaggcgggcacggcgttgcgcttcatttcggagacgatgccggcggcggtgtactgggcgatcatgaaaccggagtccacgcccgggtcaccagccaggaacgccggcaggccgcggttgcgcgccacgtcaaggaagcggtcggtacgacgctcggagatagaggctacgtcggcagtcggaatcgccaggaaatcgagcacataggccagcggcgcgccatggaagttgccgttggactccacacggccgtccagcgtgacgcacgggttgtcgatggcggaggcgagttccacgcccgccacggaggccgcgtattccacggtgtcgcgggcggcgccgtgcacctgcggggtgcagcgtagcgagtaggcgtcctgcacacgcacggtggagcccgggcggccggcctcgatcagaccggagcccttgagcatgcggacgatgttcgcggcggaatcgccttggccgcgatgcggacgcagcgcctgcaagtcggcggcgaacacgcggtcgttgccgagcatgccttccacgctcatcgcggcggcgatgtccgccgtcttgagtagcaggcgcagatcggtgatggccatacacaacatgccgagcatgccgtcggtgccgttgaccagcgccaagccttccttctctttcaaatcgacgggcgtgatgccggccgcacgcagcgcttcgccgccgccgatcttgcggccgtcagcgttgcgggcctcgccttcgcccatcgccaccaaagcgcaggcggcgagcggcgccaaatcaccggagcatccgagcgaaccgtattcgtagaccaccggggtgatgccggcgttcagcatatcggcgtagacctgcgcggtttccgggcgcacaccggtgcgtccggtgcacagggtgctcaggcgcagcaccagcaggccgcgcaccacctcacgctccacttccggtccggcaccggcggcatgcgagcggatcagacttttctgcagctgcgcgcgctgttccttggggatggaagtggaggcgagcgcgccgaatccggtggagataccgtaatgcggcacggtgtcgtcggccaaatgatcgataaccgcgcgacttagcgccatctcatgcttcgattcgtccgaaatcgccactttggcaccaccgcgcgctacggcgataacgtcctcgatgctcaatgccccaacgcctacggtgaccgtctgctctgccatgttttcctacctctctatcgtgccgagctccacttggtattggatatattcatctcgccagcatggcatatcaacgttacgggactgtccacaatatgcaccgccccgcgccagcgccgcgcgaacgctcctatactcacggctggtttgttatgcgcctgaccgccgccggtgctgcggcgggtgcttgtgggataagagaagaacatgatttttcaggccggttcgctgctgctcgttatcatcggtgtctacatactcaaacatgtccacattttcggcgagcgtgattacaaaatcgtgcagggtctggtattcaatctgacgcttccttgtgcgattatcctgtcgttcgccacgaacaagcacgacatgcgcatgctgtggatcgtgttgttcggcttcttcgcctgcgcgattccgctgttcatcgtgtatttcggttctcgcggcgacgagaagaactaccgcgccttccagatgctcaacgcctcgggcctgaacctgggcgcgttctgcctgcctgtggttcagacgttcatgggcccgtccgccggtctgccgatcatcatgctcgatatcggcaacgccaccgtggccacggccgggtcactgaccatcacacgcacgctgctgcatatggatgacaatttcaagtcgctaccgctcatcctgcgtctgcgcaatattgccagggacttcctaagctcgatttccttcgacatctacatgctgatgctggtgttcatgttcctgcacgtcacgatcccacagcccatcgttacgctcatcaccccgttcgccaatgcgaacgccttctgcgcgatggccatgatcggactgatgatggagattccgaacaatcgcaaggacaaggtggagttgggcaaggtgattgtctggcgcatggtattcggcgcgattatcgccgtggccgcctggttcctactgccattcgacatgaggattcgcgagatcatcgtgttgggctcgttcgcccctatcacgatcttctcaaccaagttcactgattcgctaaccggcaacgccaagctcgccggcttctcgctgacagtgacggccatcatcagcttggtggtgatgaccgccctgcacgcggtattgccgggagcgtaaggcgcgttcttggttcccctcagtcagcttctccgcctggacggctcccctcagagaggggatccagaacgagtcacgcccgaacgattacgttgcgcagatcgccgatgccctcgacgtgcacgatggtctcgtcgcctgggtcgaggtggccggaggcgttcggggtgccggtcatgatgacgtcaccaggcagcagcgtggagaacgacgaaatcgcggcaatctgctcggggatgccgtgaatcagattcgcggtggtgccagacgccatcggcacatcctcgccgttcagcgtgaaggaaatcttggcgtccttccagtcgaggtcgtcacgcatcacaatccacgggccaagcgggcaggaagtatcgaaacccttggcgcgcgtccacgtggggtcgatgccctgcaggtcgcgcaacgtcacgtcgttcacgcaggtgaagccgagcacgtaatccatcgcgttttcaacggacacgttcttggcgatacggcccatcaccacggccacttccggctcgaagttcatgtccttggagcaggccgggtacacgatcggatcgtcggggccgatcaccgaggtggacggcttggtgaagatcaccatgtcttccggcgcgtgggcgatttcggagtggccggcctcgtgcatgaactgggcgtgggcctcgtagttcttggccagaccgtaaaccttggaggggatgaccggggagagcaggcggatgccgtcgccgtcgaccgggtaccggttgccggtaggcttgacctggtcgccggccagcggatggccgtcaagttcgatgaggtagtccttgccgtccgtttcgtccttttgtacgaaggcgtagcgcggcgaatcattcaaagaaaaacgtgcgagtctcatgcctgtaagcctactccttggcggttccttccgcagaagcatccgtccaaggagcaagcataccggccttcaatcgaccaaaacgcacgttcgctgggattgctacttttcggtccaggttttgtcatacagcgactggccgccttgcgtgtgcatgatgacgcgcaatgatgccttgccgctggaggtcttgcacatcgagcccagcagattcgcggtggattgataggtgctgtccatagcatccagtgaggaagcgacggtatcgcctagcgaggcatagctgtcgtcgagcacgtactcgtacaccaaggtgtcaccgtcgacacggtagttgaaggtgatgccggtatctgcaaacgtatccgcttcggattcaatggagtccttgaattccgaatagtcgacgaaatcctgaatcgaatcgtacagcccataatcgccgtcggttagatcgtcatgggtttcgcccaacgtgtcgtccagcgcatcgtcaagattatcttgagctttgctcttatcgctgctatcaccgttgcccgaagaggactgactatagaaggaatcggttttcgcctcatctatagccttgctggtgtacgagacaccgccgacgatcagcgcgatgaccagtattacctgtatcaccatgcccgccgcactgatgatgatgccggcgatggccaagcccttgcccttgccgccctgtttcttaatctggttgaggcccacgatgctcaggatcagaccggggagtgagacaaggaacgagcagataaaaccggcaatagccaggccgttgtacttctggttcgcttcaggcggcacactgccgtaagaaccagaccatcccggctggccgttcggttggccgccttgcatatacgggttatagggcgtttgcggaggcacggccccgccgcccggataccgagcactgacgctgccgtagaccggaggaaccgatccgcctgccggagccgtccccggatagggcgaattgggtgctgctggtgcgggcgcaggcgcgggcgctgtcggtgcgggcgcgggcgcagcggcaggagtcactggtggcaaagcctgcgtaggcggtaccggctgattgaccggcgcaagaggctgggtggactgctcggcaggtgtaaacgcctgcgtaggctgctcaacaggagtgaacgcctgagtgggctgttcgcccgctgcgagtgcttgggttggagcattgttggcggcggttcctgcttcccccgtcatcgcatttaacggctcagtcggattggcgtcagctcgctgccccggcacctggccgttcggattggcattcggatcagtcatgacatgcactccttcaactgcatcgcaccccacttgcgagatacgcccctcgtcttacgcgccacattgtgcgttacagacaactgtactcctcgtggcgagccttaagtaccccaggaaatttggcttcccaaaaaacacagaagcctgaaaccggctattgcctcagcaatattcagtcggtttcaagctaaatcgttaatcctctggtgaaacgacggtctacttcttcagcagcggcgcgacctgttcctcgtaggcggtcagggcggtgtcgatcacctggtgcatgtcatagtacttgtaggtgcccaagcggccgccgaacacggtgtttggctcggccgcggccttggcctcgtaccgcgcgtacagggccttgtccgcgtccgtgttcaccgggtagtacggttcgtcgccgcgctcggcgaaacggctgtactcctcccacaccacggtcttgtccgggttctgggcatcgcggcgctccgggttgaagttcttgaactcgatcgcgcgcgtgtacggcacgtccgcgtccgagaagttcatcaccgggcaaccgaaatggtcgccctcatcgtaacggacctccttgaagtccaccgtgcgccacttcaggtcgccaagctcgtaaccgaagtaacggtcgaccggacccgtgtagaccaccggcacgcccgcggcccgcagggccttcttgttgtacggctgggattcgtcgaagaagtccacgcccagcgaaaccgtgatgcgcggatcgtcgatcatgcgttccatccacttggtgtagccgtccgcgggcagaccctcccacgtgtccttgaaatagcggttgtcgtagttgaagcgcaccggcagacgcttgacgatcgacgcgggcagctcggcaggatcggtctgccactgcttgcccgtgtagttcttgatgaacgcctcgtacaggggacggccgatgagctggatgcccttgtcgttgaggttctgcggatcggtgccggccagctcgcccgcctgctcggcgataagcttctgtgcctcggccggcgtgtaacgcgcgtggaagaactgattgatggtgcccaggttgatcggcagcggatagacctcgccgtcatgcgtggcatacacgcgatgcacgtagtcggtgaacgaggtgaaacgattcacgtaatcccacacccgcctgttggacgtgtggaacaggtgcgcgccatacttgtggatctccgcgccggtctcctcatccatatacgagtaggcgttgccgccgatgtggtcgcggatgtcgatgatgcgcacgcgcgcgccggtgtgctccaccgcctgctgcgccaccgtcagaccgaacaggcccgcgccgacaatgacgagatcggggtactgcgcgccctccgacgggccgtgctgcgtattctccgccgcatttgccatgactcaaaacctttcatgattccatgtgcaattccacacgcgtttcattgtccaccagtatagcgagaagcacctatgtacatatgcgattccgaattcagcggctcctataggcttccggcttgtgcaggctgggttttcggctttacttggtgcacgcgcgacgtgcgcctaccctgtggcatactgttcatgtccgcataaacagggcggcctgccggctacgaccgcagggcgcagacacgtgaagaaggattcgccatgacgcaggtttcgccgcttgtctcgatcgtcgtgccggtgtacaacgccgagaaatacctacgttactgcgtggactcgattcttcagcagtcgtatgagcatctggagatcatcctcgtggacgacggcgccaccgattccagcccgatgattctggacgaataccagcggcgagacaatcgcgtgcgcgtcatccaccagacgaacggcggcatcgcgaaggctcagaacgccggattggatgcggcgcatggcgagtacatcgcattcgccgacaacgacgatatcctcgaccgtcgcaacatcgagttgctgctgcacgcgctgatttctaccggcgcggatatgagcaaggcccgctggaggcagttcggcgtctcccagatcgaggaagtcgcgatggaagccagtgaaggcgccgccgaacccgaacatgtgagcgtgtccacgaatccgctgcgtgcctaccagaccgtgttctgcaagagcctgcgcctgatcggagacaagctcgggcgcaacacggaggcccgctatttcaacgaggcgaactggtgccgcctgtacaagcgcgaactgtgggacggcgtgcgattcccggagggcatgtacgcgcaggacgtgatggtcgccggcgaactgtacgcccgcatgaacaaagtcgccgacctcaacgtgaacctgtacaactggctgcagtccgccggatcagtcaca

SEQ ID NO: 3452 - DNA, 3613 bp, Unknown
  R151_18m  MAG No. k141_60376
cagagcctggaagacgccggcgccatggagtacaccaccatcgtggcctccccggcagccgattccgctggcttcaagtacatcgccccgtacaccggctcggccatcggccagcactggatgtacaacggcaagcatgtgctcatcgtcttcgatgacttgtccaagcaggcagaggcctatcgttcgatttccctgctgctgcgccgcccgccggggcgtgaagcttacccgggtgatgtgttctacctgcactcccgcctgctcgaacgttgcgccaaggtctccgatgacctgggcggcggttcgatgacgggtctgccgatcgttgagaccaaggcgaacgatgtgtccgcctacatcccgaccaacgtgatctccatcactgacggccagatcttcctgcagtccgatctgttcaacgccaaccagcgccccgccgtggacgtcggtatctccgtctctcgagtcggtggcgccgcacagaccaaggctctgaagaaggtctccggtacgctgaagatctccctggcacagtaccgttcgctggaatccttcgccatgttcgcctccgatctggatgcggcttccaaggcccagctgacccgtggtgcccacctgaccgagctgttgaagcagccgcagttccacccgtactcgccggaacaggaagtcgtgtccgtatggaccggcacccacggcaagctcgacgacctcgacctgaaggacgtccttccgttcgagcagggactgctggactacatcgaccacaacaccgatatcctcaagaccattcgcgagaccgaggaattcaccgccgacaccgaggctgccctcgataaggccgtggacgagttccgttcgacgttcgtctcttccgccggcaagccgctggtcgagaagaagccggacgttgacaaggccgcgccggttgatcaggaaaagatcgtggcgggagaaaagtaagccatgggctcgcaactcgcattgaaatcacgcatccactccaccgagtcgttggcgaagatcttcaacgctcaggagatgatcgcgtcttcgcatatcgccaaggcccgtgatgtggccctgaacgcgaagccgtacaccgatgcgattttcgatgccgtgcaagcgttggtggcccacacccatatcacgcatccgatcgcggtgaaggacgagaagaacccgcgcgtggctgttctcgccctcacctcggatcgtggtatggccggcccgtacacctcttcgattatccgtgaaacggagtcgctgctgtcccgcctcgatgcggcaggcaagcagccggagctgttcgtgtacgggcgtcgcggttcgacgtactacaagtaccgtaatcgtgacatcgcggcgacgtgggaaggcgacaccgaccagcccggcgtggaaattgctgaaacgatctccaacactttgatggacgcctacatgaagccggctgagaaaggtggagtttccgaactctacatcgtctacaccgagttcatcaacatggtggtgcaaaaggtgcgcgtgctgcgcatgctgccggtcgaaatcgtgaaaaacgagaccaaggtgcccgatcctgatgaagaggcaccggctactgcggatgtcgctccgctgtacactttcgagcccagcctcgaaaaggtactggacgcgattctgccgaagtacattcagtcccgcatccacgagtgcctgctgaccgcggccgcgtcggaaaccgcaagccgccagaacgccatgcacacggcaaccgacaacgcacgaaacctgatcgacgaccttacgcgcaagctcaacgcttcccgccaggcctcgatcacccaggaacttaccgaaatcatcggcagcgctgacgcgctgaccaagaaggaagagtaggaacgcatatggctgacaaccagaccactgcggccgagcctaccaacggtcgcgtcacccgcgtccagggctcggttatcgacgttgaattcccggtgggtcatctgcccgacatctacaacgccctgaaagtaacgatcgtcaacaccggcgccaaggaagaaggcgaggcgaaggagaccgagatcaccctcgaggtcgaacagcacctcggtgattccacggtccgttgcgtcgctctgaagcccaccgacggcctggtccgtggtgcctccgtctccgacaccggcgccccgatctccgtgccggtcggcgacgtgaccaagggccacgtcttcgacgtgtccggtaacatcctcaacaagaagccggatgagaccatcaccgtctccgagcgttggcctatccaccgcaacccgccggccttcgatcagctggagtccaagacccagatgttcgaaacgggcatcaaggtcatcgacctgctgaccccgtacgtgcagggcggcaagatcggtctgttcggtggtgcaggtgtgggcaagaccgtgctgattcaggaaatgattcagcgcgtggctcagaaccacggtggcgtgtccgtgttcgcgggcgtcggcgagcgtacccgtgagggtaacgatctgatcggcgaaatggccgaggccggcgtgcttgagaagaccgcactggtcttcggccagatggatgagcagccgggtacccgtctgcgtgtcccgctgaccgcactgaccatggcagagtacttccgtgacgtgcagaaccaggacgtgctgctgttcatcgacaacatcttccgcttcacccaggccggttccgaggtgtccaccctgctgggtcgtatgccttccgccgtgggttaccagccgaacctggccgatgagatgggttccctccaggagcgcatcacctcgacccgtggtcactcgatcacctcgctgcaggccatctacgtgccggccgatgattacaccgacccggccccggccacgaccttcgcccacttggatgcaaccaccgagctgtctcgtgacattgcctccaagggtatctacccggctgtggacccgctgagctccacctcgcgaatcctcgatccgcgttacgtgggccaggctcactacgactgcgccaaccgcgtcaaggcgattctgcagcgtaacaaggagctgcaggacatcatcgccttgatcggtatcgacgagctcggcgaagaggacaagaccaccgtgaaccgcgctcgtaagatcgagcagttcctcggccagaacttctacgttgccgagaagttcaccggtcgccccggctcctacgtgccggccgacgagaccatcgaagccttcacccgcatctgcgacggcgtgtacgacgacgtcccggagcaggcgttctccggtatcggcggcatcgatgatctcgaagagaagtggcacaacatgcagaaggaactgggtgcgtgatggctgcggaaaaaaccacgatgaaggtcaacatcgtcgccgctgaccaccctgtgtggcacggcgaggcgacgagcgtgaccattcccgcctctgagggcggcatgggcatcctgcccgaccatgagcctgtgctcacggtgatcaagcagggtacgctcaccgtggttgagcccgatggcgatcgccacatgttcgaggtgaccgacggattcatctccttcgactcgaacaaactc

SEQ ID NO: 3453 - DNA, 3901 bp, Unknown
  R151_18m  MAG No. k141_60608
cttgacgtagatcacgatgccgcgggaggagctgaacttcttgccttccatggtcatgaactcgctggccaccacctgctcaggcaggttgagcggacccatcgggccggtttcgccgcccttggagcccttgccgttgtacgccagcatttcggacggccagatctgggagtggaaggtgatgttgtcctttcccatgaagtagtaggccgggcacgccggatcattccaccattcacgccacttctccgggtcgccctggcggcgggcccattcgatggaggccgacaggtagccgatcacggcgtcgaaccacacgtacagcttcttgttcgggttgtcgatccagcccttcaccggcaccgggataccccagtcgatgtcacgggtgatggcgcgcggcttgacctccttgaacaggcccagcgagaagttgatgacgttggtacgccagcccttgcgggtctccagccatgccttgttggcttcggcgagcgccggcaggtcgaggaagtagtgctcggtctgctcgaagcgcggggtttcgccgttaatcttggagacggggttgatgagctcgtccgggtcgagctcgttgccgcaggcgtcgcactggtcgccacgcgcaccttcggcgtggcaaatcgggcactcgccctcgatgtagcggtcgggcagggtacggccggtggacgggctaatcgccacctgctgggtgcccttgtagatgtagccgttctccaagcactgcttgaacatctcctgcaccacgtgctcgtggttaccggtggtggtgcgggtgaacaggtcgtagctcaggccgaggtcgcacagatccttggcgatcacgcggttgtaacggttggccagttcctgggcagtgaggccttccttctccgcctcgacgagaatcggggtgccgtgctcgtcggtgccggacaccatgagcacgtcattgcccttcatgcgctcgtagcgcgcgtagacgtcggagggcacaccaaatcctgcaacgtgaccgatatgacgggggccgtttgcatacggccaagcaacattcaccaaaacatgactcataaggcttgattatccggcgcggcggggacacgcccggatagctgccgcgccgccatcctcatcccactcacctatccacccgtaacttcccccacatacttatccgtacaccgcttgcgcgcttatccgcatacgcattcgcacacgtatccgtacgtgcatccgtacacacgtccacgcacccatccgtacgcacgtccacgcacatccgcacacacttccgcctgtcgatatccaccgagttatccacatcattcgcgcacctagtgaagttatgcacttatccaccgttttcgcttatccggtggcgcgcaagccgtacttctgcatattgttcgatcatggatatcacagcaggtccgatgacggacatcacaacagtcacctcgccggcaaccgcgcagcccgcggtgccgccgatactgtttaccaagaatctgccgggaccgctcagccttaaccgtctggccgccttcggcgcgttacgtaagctcgacgattccgccggctactggatcgagcattcgggcacactgtatggtcgcgcaaaaatcgtcgcggaggtcgccccgtttggcactgtggtgtgttcgatgaccgccgcttgggtatggctgggaggccccgactttccgagcaccatagacgtgatctccacatcgcacttccgctcggcatccgtcagccgccgcatccgcgtattcaaaagattgacgttgccggagcaaatcatcaagctcggcgggctgcctgtcaccacgccagcccgtacggcttgcgacctggtgatgagtcctgaagacatccccgatccttccaccgtcaacgcactggtgtgtcagctgatgtccgcgtaccagtttcggccaaacgactgtctgcaaatcgtcaaggagcatcggcatcacaagtatgccggacgcgcacgcatgttttttgaatcggtgcagaaggagattgacgaaccggctttggagcaatgcgcatgacgaggggattcattgccagaggccatcgcagaggccgccatgccgctcaccgtttacggcatttgcggcaggcgcaacggttgcctcgccacgcggcggcggcacactcatccgaatccgcatcgcgcgcaatctcggatatgaccgcgccgcctgaaccacccatcagacttacgcccgcggtggcatgttcgcccgatacggatgttgccgtgctctggcacatcgcatatcacgtgcccgaactgcgtaaatggctggttgccaatcccaaagccgacgcgcctttgctggaattggtctcgcagcgtggtgggcccggggtccggcaggcgttggaaatattgttcgagtcgatggaagcgtaacggggagataatcgccggctgctgcgctatcccttgattttcagcacagccgcatacacctgcttgcgattggccaacgatccgtcagccagtggatgctcctgcaccacttgcgcgatggcgtccttgatacgcaggccgtcctccaaagcacggtcgatggccagcacggccatgtcatccacgctcaacgtactgggcgcggccgcttcggcctcctcgttggacgcgccgccgacgaccagcaccatctcgccacggggcggatcatcaatcacactttggcgaatctcgccaatcgggccgcgacgaatctgctcataatccttggtgagttcgcggcacagggccatcgggcgatttgggccgaacgcgtccagcagatcgtccatcgaatcggcaatgcgatgaggcgtctcgtagaacacgatggtgcggcgttcgggcaacagcgtgcgcagatactgcacgcgctcggaatgctttcgcggtaggaagccctcgtagcagaagcggtcggtgggcaggccggagagggcgagcgcgtcgagcacagcggaggggccgggcgcgcaggtgacgggcaggccgcgttcgatggcatggcgcacgatggccaagccggggtcgttgatggtgggcatgccggcatcggacacgacgagcacggtggcgccggtttcgacctgatcgagcaggccatcggccttgtcgcgctcgttgtggtcgtgataggcgatgacgcgaccgttcacatagacgccgaggcgacgggcgagatcgtagaggcggcgcgtgtcttcggcggccacgatatcggcccgctccaagagggccaccagacgggcggaggcgtcgccgacgttgccgatcggggttgcggcgagcaccacggtgccggcggggatggtcacggccgattcgcgggattgggtggcggcggattcgccggcatgaacttcatcattgcgttcaggcacttgcgtcacgctaccgtcagcgtcatactgctcattcaactcatctgcgcttgtcatactcccagtattgcccataccacagagcaatccacgacaatccatggcggaatcgaggcattctccctttgcaggggctgatttcacatgttccggaagtctacttccgtttcaaggggctcctcatccggtgaagcaccagtacaaacggctttgacgcaacgctattccgccattttggcggcatatctacttgaccatcagcccctcgaaacgcaagtagacctccggcaaaccccaaatcagccccttgaaacgcgagatggcagaatttcaacgaagacaaataaaaagaccctctgcggtggaatgaatgcagagggtctcgtggagctgacggtagtcgaaaccgcgacctcttcgatgcgaacgaagcgctctaccaactgagctacagccccttggatgttactttgctccgcaaagcaac

SEQ ID NO: 3454 - DNA, 22576 bp, Unknown
  R151_18m  MAG No. k141_60972
agcgtagcaatgtgttcaaacatacagttgcccccgctggcgagggctgtcacatggagtgtgactgaggacagtcctttcaaagaccactcccagtcagctatgccgacagcctcgcagcgggggcgactgagtaagaattactcgacggtgttcttcgggacctcgatgccgttgccgaacttgacgtcgcgggctgcggccacgcgggacggcaggccatagatgtcgatgaagccgttggaggacctctggtcgaaggtatcgccggaatcgtaggtggcgagcttgtagtcgtacagcgaggagtcggaacgacggccggtcaccacggcgcggccaccgtgcaggaccatgcgaatctcaccggacacgtacttctgggtgtcttcgatgaaggcgttgagcgactgggttgccggggagaaccactgcgcatcgtaaaccagctcgccccagcgcttgtcgatgtcgcgcttgatgcggtgctgttcgcgttcgaggcagcagttttcgagttcctggtgagcggtgatcagagccacggcacccggagcctcgtacagctcgcgggacttgatgccgaccaggcggtcctcgatgaggtcgatgcggccgatgccctgggctccggcgcggcggttcatctcttcgatggcctgcagcggggtgacgtcacgtccgtcgatcttgaccggcacaccttccttgaactcgatgacgacttcatcttcgaccggcgggaaggccgggtcgtcggtgtaggagtagcagtccttggtcgggccgttccacggatcctcgaggaagccggtctcaatggcgcggccccacacattctggtcgatggagtacggggacttctcggtctgggtgatcggcagcttgtgctccttggcgaacgcgatctcgacgtcgcgggtcagggacaggtcgcgaatcgggctgatggccttcagcgtcgggtcgatggaggcgatggagacctcgaaacgaacctggtcgttgcccttgccggtgcaaccgtgggagatggtgtcggcgccgaactggtgggcggcgcgcacgaggtgcttggagatcagcggacgggagatggcggagaccagcgggtagacgccttcgtacatggcgttggccttgagggccttcatgcaatattcgttggcgaactcgtcacgggcgtcgaccacgtaggattcaacggcaccgcaggcgagggcgcgctgcttgatggtctcaaggctttcgccgccctggccgacatcgagggacacggccacgacgtccttgccggtgcgctccttcaggtacgagatggcgacggaggtgtcaagaccgccggagtaggccagaacaatgcgcttgttatctgccattggttccctttcattcaaggtctgaaaaacaaactgatgcaagtatatacagaggactgtatatttatgcacggcgtgttggttatttggaagcgaggcttagtagccagtcggagcgggagacggcggtgtcgtcattggtgcaaatcaccatgacggtgtcgtctccggcgatggtgcccagcacgccttcgatcggctgcctgtcaatcaccgaggccacgtattgtgcggcaccggaaggcgtgtgcaccacaaccagatttccggcggcggccaccgaggtgaccagtccgttcagcacgcgggacatctgtgcctcaccgcgctcccctacatcctcaccttccgaagcaacgacgctgcgacccaccgtgtaggccaccgtgccgtccttcagccgggtcttcaccgcatgcatctcgtcaagatcgcggctcagggtcgcctgagtcaccgcaatgccctcgtcgataaggattttggacagctgtgattgcgaggtgatgatatgcgtggcgagcgcctgttctatggcactcagccgcgccgccctggtggcagggcgctgcagggacggaccggtttcactcatgcgagcaggctttcgtctccacgggccttgccggtcaaccaagtcagcaacgctttctgtgcgtgcagacggttctcggcctcgtcccacaccacggactgcgggccgtcgatcacttcagcggtgacttccttgccgcggtaggcgggcaggcagtgctggaagagcgcatccggcttggccaatgccataagttcggtgttgacctggtaatcccagaacggcttggaacggatggcgtattcggcctcctcgcccatggagacccaggtgtcggtgaacacgcagtcggcgtccttcaccgcttccttggcatcggtggtgaccaggatggagccgccggtctcggccgcgacgcgcttggcgtcggccacgatgtccgggcggggcaggtagccgtgggggccggccacgcgcacgtccatgccggccacggcaccgccgagcaggtaggagttggccatgttgttggccgcgtcaccgaggtaggcgatggtctggttcttcaggttgtcgacgccgcctcggtgctcggcgatggtctggaagtcggcaagaatctggcagggatggaagtcatcggtcagggcgttgaccaccggatgggtggagtacttggccatttcttcgacgcggtcctggccgaaggtgcgccacaccacgccgtaagccatgcggtcgagcacacgagcggtatcggccacgggctcgccacggcccagctgggagccggacttgtcgatgaccagcgggtagccgccaagctcggcaacgccgatggagaagctggaacgggtgcgggtggatggcttgtcgaacagtacggcgacggcctgcggaccggcgaacggctgcttgtagaagcggtcatggtggaacttgatggcaagttcgagcacctgcttctgctcctcatggttgaggtcgtcgtcacgcagcatgtggcgaagttctggggtcatgatgatctccttggatcggtgggtcggcagtgacggcgagaaatcagtcgtcgggcaggtccgtaggcacatccttgaggatggcaagtgcctgatccacgtcttgagcggttacaatcagcggcggtgcgaaacgcagcgcattgggagccaccgcgttgacgatgagcccgtgttcgaggcagtagttcatcaccgcgtgggagcagggatgcttgagctcgacggcgtccagcaaaccacggccgcgtacggaaacgaacagcggattaccggtggccataatgccatcgcgcagctgttcgccgcgagcttcggcgttggccaccagattctcgtcttcaatcacgccaagagtggcgagtcccgcagccgcacccagcggattgccggcaaaggtggagccgtgggaaccaggagtgaacagagccgcaagtttctcgccgaaagcgatcatgccgcccatcgggaatccgcctgccacgcccttggcgaaagtcaccatatccggcgtcacgccgccggacagatcgtcacgctggaatgcgaaccacttgccggtacgtccgataccggtctgtacttcatcgatgatgagcagcgcgtggttgatatcgcacagttcgcgcacgaacttgacgtaatcggcgcccaacggctgcacgccggcttcgccctggataagttccagaatcacagcagccaccggacccttgccatagcggccgagaccggtctgtgcaaaagcgtcgtgcagggcgaccttgtcgccggcgcgtacgaattcgatgttcggcaccagcggatcatacggcttgcggataccgggtttccatgtggcggacagcgcacccatcgtacggccatggaagccgtgggtcattgcgagaatgcgtgcgggcttgccgccgatggaaggcagggcaccaggcaaggtgcggccatacagcttggcaagcttgagggcagcttcattgccttcagcaccggagttgccgaagtagactttggagccttcaggtgcaccagccagcttgaccagtttggatgccagctcaatttgcggctcggacgcgaaatagttgctgatatgagccaccttggcagcctgatcggcaaccgctttgacccacttggggtgggcgtatccgagggaattgacggcgatgcctgccaggaaatcgaggtattcgttaccgtcaacatcccagatgtgggcaccttggccgtgatccatgacgcgcaacggcgtaccgaacacattcatgtggacctgagagtactctcccagccacttgctgtcttccgtacctagtttttcctcatgctcagtagccataagagctcctcatttccagtccttcatcgggcataaccatggtaccgatgcctgcggaggtgaatatctcgttcaaaatcgaatgcggcttgcgcccgtcgatgatatgggcttggggcacgccaccgtcgatggccctgacacaggcctccatcttgggtcgcataccggattccaggtccggcagcatatcgcgcaggttttccacaccgatccggccaatcagagaattcttgtccggccaatcggcgtacagaccatccacatcggtcaagataacaagcttgcgtgcgcccacagcggcagccaaagcggcggcggcggaatcggcgttcacgttgagcacttcagtggcatcttcttcgttcggagccacggaagagacgaccgggatacgaccggcggccaccagatcctcgactgccgaggcatcgacggaaaccacatcgccgaccaagccgatatcggtgggcttgccattgatgatgggcttgcgctgcatggccgagaacaggccgccgtcttcaccggacaggcctacggccagcgggccgtgcgcgttgatcaggccgaccagttcgcgtgacaccttgccggtcaggaccatgcgcaccacgtccatggcctcgggggtggtgaccctcaggccgcctttgaattcggatttgatgccgagggccttgagcatgtgggagatctgcgggccgccgccgtgcacgacgatcggatgcaggcccacctgacgcaggaagaccatgtcttcggcgaagcactgcttcagatggtcatcgaccatggcgttgccgccgtatttgacgacgatacgctggccggcgaactcctccagccaaggcagcgcttcaataagcacttccgccttctgatcggcgcgcaaatcggtgtgcacgtcgaaatggaacccaggtcccttcaattctgtagccaatttttctcttttctgcgacgccggcgacgctatcgccgccggctgctacaaacagcccactgggctgtttgcgttatatgcgacgccggcgacgctatcgctgccggctgctacaaacagcccactgggctgtttgtcagctttcgtagtcggcgttgatgtggacgtattcgtgggtgaggtcgtcggtccagacggtggcctcggcgtccgagccggtgttcaggtcgatgtcgatgtggacttcgcgcggggtcatgtcgacctcgctgcggtcgcggccggcgccgccgttctcgcagatgcgcacgccgttgacgtccacggtcaccttgttcgaatcgtaaggcgcgacttcaggcggcacagtgcccaaggagctgacgatgcggccccagttcggatcgttgccggagatggcgcacttgagcaggttcgaggcggcgacggcacgaccacaggcaagtgccgcgtcttcgctggtggcaccggtgacggtgatgcgaatgtcgtgggaggcaccttcgccgtcgccgatgatctggcgggacagggagacgcagacctcacgcaccagcttgttgaattcgtccttgtccggttcgacgccggaggcaccggaggcgagtagcaggaccgtgtcgttggtggacatgcagccgtccacgtcgatgcggttgaacgaatgttcggcggccacggcgagtgcggcctgcatctggccggcggagacgaccgcatcggtggtgatgacgcacagcatggtggccagctgcggggcaatcatgcccgagcccttgaccatgccgccgatcttccagccgttggagccggtcagttcgaccgttttcggcttggtgtcggtggtcatgatggcgtgggaggcggcggcgccggcttcggcggtggcggcaagagcctcatgggcactcttggcaccagccagcacgttgtccaacggcagcagttcaccgatgagaccggtggagcagacagccacatcattcggttcggcgccgatgagaccggcgaccgtttccgcggtggtgacggactgggcgtaaccggcctcgccggtgcaggcgttggcaccgccggagttcagaatcacggccttgacgtgaccgtcggcgacgaccttacggctccactgcaccggggcggcacagaaacggttcgaggtgaacacgcctgcagccgcgtcgagcgggccgttgttgaccacgagggccaagtccttcttgccttcgacggatgaaataccagccgccacgccggcggcggagaaaccttgtgcaaatgtaacgctcacggtgctactccgatcttggtcaggcccgcgtcttccggcaggccgagtgcgatgttcagtgattggaccgcttgtccggcggtgccacggttgaggttgtctatggcggcaaaagcgtagatgcggccggccttgcggtcggcgacgacctgcaggtgggctgcgttggatccgatgatgttgccggtggcgggcagtgtgccctcgggcagcagcaccatgaagtcctggccttcataggccttggaccatacggcgcgaatctcctcatcgctcagcgccttggccttgtccgtcatgcgggcggacacggtggcgaggatgcctcgggacatgggggcgagaatcggcgtgaagccaagcgtgaattcgctggcttcggccgcgctcttgccggccgcgtgggcgaagttctgcaggatctcggggatgtggcggtgcttgccgcccaccgaatacggcagggcggattgcagggcctcggcggcaagcaggttggtgcgcttgagattcttgccggcacccgagtatccgacgaccagatcggccacgatatcctgcgattcaaccagtccttcggcgatgccgggctggagggccagcgtggtggcggtgacgttgcagccagggcctgcgatgcgcttggcaccaggaagcgccgcacgctggcgggtgtatgagccgtccgcggctttgccggtgatgagctcgggcatgccgtaggtccaatgctcatagaaatcgccgccgtagaactcatcccaagcggcctgctcttcgagacgatggtcggcgcccaaatccacaaccacggcattcggatcgagctgcgaggcgagcttgcccgaagcaccgtgcggcagtgcgaggatgataacgtcatgcccgttcagcacttcgggcgtggtatcttcgacgaccagattggccagttggggaatatgcggcatgtgcttggccatcgactcccccactgaggaatggcctgtcacgcaggtgatgtcgaagtcggggtgcgcggccagaatgcgcagcgcttcaccgccggcatagcccgtggcaccggccacggccactgtatatttcgccatactcatctcttttcactgatgtgtcttgggatgagtatacgcgattatgcagactattgcatatttatgcagtgggtgtgttggtatgtgaacgctacttatgcggagatggagtcggaggaggagccggtgccgccggtgagttgctggagggcttcctggtagaggctcatggcgtcatagccattgaaggccatccagatgacggcgatggtgtacagcacgttgatcaccacggcggccacagccaaaccgaagcctttcatatggaaggtgcgcgtgcgccacattgccaccgcgcccatcagtgccgagagcactggcaccgggaagaacagggcgaggataaaggagatgatcgcatacgaatcccagtgcccgtagagtgggttctggtttggatcgttcaggtcgatgccgtggtaataatgcggctggtgaggctgaccgttcggctgttgaccatacgactgcccctgcatgcccgggtacccgcccggatatgcgcccggaccggactgttggccgccttgagcatacggccagccgcccgcctgctgattgccgggccacgccggctgctgaccgtacggctggccggcctgctgggattgcgccgcgccaccgttgatgccagcggctgcggcggaatccttcttggtatccggctcgggagcgccataaatatacgggttgtaattcggcccgtattggccagacatagcaccatattcaggctgctggtactgcccgtatttcggcttgtcctgctccggttggctcatgacgctcctcgattcggatgatcggttgggtcaggcgcgcagctgggcgccgatttcggcggcctcagccacgatggccttgcggatggcgtcgctgtcttcggcggacagcgtcttgctcggcgaacggaacaccaccgcataggctagggacttcttgccctcgcccacctgttcgccggtgaacacgtcgaacagttcgatggattcgaggttcgcgccggcggccttgcgaatcacgttctcaagctggcctgcggtcacggtctcgtccacggtgaaggccaaatcctgcttgaccggcgggaacgtggagatcggcttggcctggacgggcttgccggtcagcgtggcgaacagcgcggtgaggttcagctcgaaggccgcggaatgggccgggaagccgagcgcctcgttgacgcgcgggtgcagttcaccaacccagccggtgaagacgtcgcccaccatgacgcgggcgacgcggccggggtgccattggacgggcacatcgtcggcggcgggctggtcgagttcgattgcggcaccgatacggccggcgatgcggcgcacggcctcgacggcgtcggaccagtcgaccgggcgcttgccgcccatccagccatcgtcctcggccagaccggtcaggatgccggccacatggtcgggctgttcgggcagaccggcgtcaagcgcggcgagctgttcgtcggtggggcgcacgccgccgggcagtgccgggatggcgggcgcgttcggatcccacaggtagacgtggccgagctcatacagggacacgttttcgatgccgcggcgaatgttgcgctgcacggtggtggccagggtcggcagaatctcgcgacgcaggtacggacggtcgccgtagagcgggttggcgatctcgacgctgaccttcttggtggcttccgggtcgaagccgaaggccttgtaatcgtcgtcgcccacgaacgggtagctcagcgattcgaccatgccgaactcggcgagctcgtccgccacgcgacggcgacgctgctggtccggggtcaggcccaccagaccctcgaccggtgccggcggcacggtgatcggaatctggtcgtagccgaccagtcgggcgatttcctcgaccaggtcgcacggctcgttcaagtccggacgccagctcggcgcggttacggcgaactcgccgttgccgccgccggccaccgtgcagccaatgtcggtcaggatgtcggagatgcggttgatgtccacgtcgaggccggccacgcgggccacttcggaggccttgaagtggatgaccttggcgcgcggcgtgttgttcacgtcgttcgggtgttcgctgggctcgccgttgccgtacttggccatgagctcggcggccatctgggtggcggcgggctgcagcgcggtgtcgacgccacgttcgaagcggcgggaggcctcggatggaatcttgtggcgacgggccgaacgggcgatggtcacctgatcgaagtgcgctgcctccagaagaatgttcttggtgtcagcggtcacttcgccatacaggccgcccatcacaccggcaaggccgaggatgcgcgagccgcgttcgccgttcggcgaatcggtgataagcagatcttcgacgctcaggtcatgttccttgccgtccagtgtggtgagtttctcaccctcgttggcgcggcgcacgacaatcgggccttcgagcttgtcgaggtcgtaggcgtgcatcggctggccgaggtcaagcatcacgtagttggtcacgtccacggccaaggagatggagcgcatgccggcgcgaatcaggcggcggcgcatccagttgggcgtgtgggcgttgggattgaagtccttgacgatacgcgcgtagtagcggtcgcaaccgggcacgccgtgaatcggattgttatcgtcgatttcaacatcgatgtccaccggggtgccgggctggtagtcagcaggttccggggccttctcgttcagtgccacggccggatcggtgtaggcggcaccggtggagtggtggtattcgcgggccacgccacggtaggacagcgtgtagccacggtccggggtgatgttgatctcaagcagaggctggtcgaggtgcagcaggtgcatggcgtcctgaccaggcttcagagcctcatattcagcctcggagaagccgtactgacgcagcagaatgatgccattgtggttgtcgcccagacccagctcacgttcggaggcacacatgccgttggagatgtggccgtaggtcttgcgcggctcgatcttgaagtcgccgggcagcacggcaccgggcagggtgacgacgaccttttcgccggccttcatgttgggtgcgccgcagatgatgccgcgcggcaccttgttgccgtcttcgtcggtctcgttccattcgtcgccgcagtccacgtggcaccagttgatggtcttgccgttcttctgcggttcgggggtggcgtcgaccacgtagccgaccacaatcgggccggtcacctgggaggagtggatctcctcttcctcaagacccaccttgacaaggtccttggcgagctgttcgtaggtcaggccttcgggaacctcgacatggtccttgagccaatcgatatcgatcataggcatggctgaatcactcccccatcacaaactgttcggcgaaacgcacgtcaccttcgaccaggtcgtgcatgtcgttgatgtcgctgcgcagcaggagcgtgcgctccatgccgacgccgaaggcgaaaccggtgtagacgtccgggtcgatgccggcggacttcagcacgttcgggttcaccatgccgcagccgccccactcgagccagccggggccgcccttcttgtcggggaaccacaggtcgagctcggcgctcggctcggtgaacgggaagtagctcgggcgcaggcgcgtcttggcttcagggccgaacatggcgacggcgagcttgtccagcacgcccttcaggtcggccatggtcaggtgcttgtcgacggcgagggcttcgcactggtggaagaccggagtatgggtggcgtccagctcatcggtgcggaacacacggccgggggacgcgatgtacagcggcacgccacgggtcaggagggcacggacctgatcggaggaggtctgcgtacgcaccaccatgttggagccgacgaaaccggcggcgtccttggcttgattgcccttgacgtagaaggtgtcctgcatctggcgggccggatggtccgggccgaagttcagggagtcgaagttgtaccattcggcttcgatttccggaccggaggagatctgccagcccatggagatgaagaagtcctcgacgtcttccatcagcttgggcagcgggtgacgggcacccagaggcttgcggttcaccggcagcgtcatgtccacggtttcagcggcgagtgcggccttctcggcggcttccttgagctcgacttccttggggccataggcacggccgaagtcggcgcgcagcttgcccatgagcttgccggcttccttcttctggtcgacgggcagggagccaatggccttgctggccttggtcatcgccgaatcggcacctgcgtacgttgtcttgatggccttgagctcctccaggttggaggcgttctggattttctcgatgcccttggcaacctcagcggtcacctggtcggcgtcgaacaccatttgttctgccacgagaaccctttcgtctgatgttttctcagcgtttcacagcgtttttaccggtttcacattctttcaacatgacccgacatagacagcgacatcaacatcaccgcggccgaggtgccgaggttcagcgattcggccttgccgtacagcgggatggagacgatgcggccgcagcgtgtgaggatgtccggttccaagccacgcgcctcattgccgaacagcacggctttcggagcctcgaccgccgccttgtccgccagtactgcgggcaggctttccggcttgcattcttcggtgccgtatacgtcggcggcccagacgcccatattatggtcgtcgcctgtccaggtgaagaattcgtcggtgctcatggcgagtaccggcagatggaacagggagcctgcggtggagcggatgaccttggggttcagcacgtccacgcagtcgtccacgaagattacggcgtcgcagccggccgcatcggccgcacggatcacggtgccggcgttgcccgggtcgcgcacctgccagaaggcggcgatctgcgggccccggccgttcttgccaagttcgacgtcatcggcaccggcgtgcatggactcggcattgccgacggccacgatgccctgggcgtccggactgatgcggtgcatcacgtcgccggtgcagtagtgcacataaatcgtggcatcctgcgaggtttcgacgatcttctccaacgtggaggagatgatacgcggatgttccaacgcctgcgaaacctccacatagaggtcctgcaccacgtccggccgccaagtgacggcctcgcgcacggattgcgggccttcgataagaaaacggcccgaacgttcgcggcctttggcgcgggtcagatcggcgatgcggcgaacgcggtcggatttcggattatcaagaatctgggcgttgatgggcatagccactaccctactgccgggtcattacgtcagtcgtggctcgctcccgctggcggagacatcgtaagcctgaaaggcactgtgccagtctgtcgcctttcagacaccttgaaaggcgaagtgccaattcccggtgccgatggctacgcctatggaggccagcgggacagccagacagatgacgtagaagatccagtcgataggcttcagacgcgagatacgggcttgggagcgtggggcgctggagccgaagccgcgcgcttccatggcggtggcaagtttggtggcgcgccggatggagagcaccagcagtccgaacgcttgggagagggcacgggcgatggcgttaccgtcgccaaggccgcgcgaacgctgggacaagccaagtgcgcgccaatcttcctgcagcagcgtaaacatgcgcaatccagccaacccgccgtatacgaatcgcggtgagaagtgcagaatctcaaccaaaccgtccgccaaatcagtgggatcgaggcccagggccaggatcacgccgggtacggcaatggccgccaccctgatagccgtggcgatggccagattaatggatccctcactgatcacaatccagccaccctgccacaggatctcgcccgaggtacggccgtagagaaacacggagataaaactgccggcggcggcgatccataccggccaggtcttacggcatacggtccacggagccacgccaccaatccacagcagcacgaattcgatgccgagcgctgtggatgcggataccacatccagactgatgaacatcggaacgcacagcaacagcgcaccgatgatgcgactgaccgcgttgatgcgcgctatgaaccatgagggcgatgaggctttgaccggctccacgcgcgtttcctgcgggctgacggttaccacgtcactcatgcctcgcctcctcgaacatcacgcgtcgtgcgcccagcgcatccaccagcgcctcatcgtgcgtcaccatgaccacgcacgagccttggtcgcggatggcggcgatcagcttgaccatttcattccacgtactgaaatcctgtccgaatgtcggttcgtccatcaccaacactttgggtgcggcggccagcatggaggccacggacagtcgccgcttctccccgccagacaaggtatacgggttggctttggcgaagcgcgtgagattcatctgctcaagcatgcggtcggcggtccgataagcctcgtattggctctgccccatcgacttggggccgatggcgacttcgtcacgcacgaaattggcagcgaactggtgttcgggctcctggaacaccatgccgatacggcccagcagttccttgcttttccagtcaatcggctcacgcccggcatgcgcgggcttgaggttgccggcgatgagcaccttgccggcgataggcttgagtagcccggccaaggtcaaggccaaggtcgatttgcccgcgccgttcggacccatcagagccgttacttcgccgggatagaaattcagattgatgccaacgccaagagcggttccacggccaaagcttaagttctcagtgctgagcaccggcgcatcgtgcgcaggctcctgcttcggcgagtaatcgggaatcgcacggcccggcacccacgcgccaccggcggccaacacgtcgcccatcttggcgaacacctcgtccggcttgccgtcggcgatgaccgcgcccgtgggcgaacttgcatcgggtcggccgagcacgatcacgcgatcgaccagatcgagccatacatcgatatgatgttcgaccacaaccatggtctgcccggtggcctcgatgacctttttgaccgcgtcatgcacttcgaccacgccttcggggtcgaggttggcggtcggttcgtccaacaacagcagaccgggcttcatagccagcacgccggccaacgcgagacgttggcgctgaccgccggacagatggcgggtggaccgatccagttcgagtccgccgagtcccaccatatccaatgattcgcgcactcgctgccgaatctcctcgcgcggcacgttgaggttctcgcagccgaaggccgcgtcatcgcccagtcgttcaagaatgatctgcgagtccgggtcctgaagcaccagtcccacgcggcctcgcgcctcgcgcgcatcgacgccatcgatggtgagcgagccctcctgctcgccttcctcatcgccgccaagtacgcctgcgagaccggccatcatcgtgcttttgcccgcccccgaagcaccgagcagcaacacacgttcacctggccggatggtgaaatcgacggcacgcaacgcgaagtccttacgcgtggcgtgccgccatccccagccgctggcctctaccgcagccggattaacctgcatcagacgcgcgccttgctgcggccggattcaaagcgttccagagcgccggtggcggcgagcgcacgagacaagtaccagaccaccacgccggcgatcacgacgccggagatgatggagccaaccagataccaagtgacgcgcaggccgttccagcccgggttggtggcccagtagtaggcccagcagcccacgccggcgagcgcaccggacaggatggtggtgccgatgttccacttcttccaggcgaagacggcgaaggcgatttcggcacccagaccctggaggatgccgacgatcagcgagccgccgacgccccactggttgcccagcgtaagctcgaggaaggcggcgagggtttcggcaaacagtgcggcaccgggcttgcgcacgatgattgcggcgagcgggccggcgaacagccagaatccgttgagcagaccctcgaaaccgggggtcacgccttcgaacagggccagcggggcggagcagacaatgtcccagccccagaaaatgacgccggatgcgacggcgatgattgcggcgacgacgatatcgacgacgcgccacttgtaattggctttggccacagcttcagtcatgaatgtgcctttcttctgctcgtacgcaggccgaacatacatggatatatgtacgcacatgatgcacatgttcgtggccacgcgcgggttggttcaggcacgggtgggtaagagcgacatttccgtgcgccggcattatccggtcacgttccatcggtcgagactatgaatctcctctcagccgcctaacggcagctcccgtgtcaactccccgactataaagcaagccgccgtcaaaggcaatagccacatccgtgacctacctgacggcagctcgccaccattaccgatgcggttcggttacttgccgagcttgtccagcagcaaagcctcggtgatcacgttgttcttgaggccgggcagggagatggactcattggggctgtgggcgttggccttcgggtcttcggggccggtgaccagcacctgagcgttggggaaaatgcgctgcagttcggggatgaacggaatggagccgccctcgcccttgttgatgggctcaacgccgaaggcctcggtcatggcttccagcgcgtctttggtggccacggcggtcgggtccatggcccagcccatgccgttttcgccgcgttcgacagtgaccttggcaccgaacggcgcgtgggattcgaggaatgcagccagtgcttcctgcgcttcttcagggcgctgggtgggcgcggtgcgcagcgacagacggaagcgggtctccggggcgatcacgttgaaggatccctcgaccgggtgggcgtcgaagccgatcacggtcacggacggcttggtccacaggcgtgaggccagcgaaccggtgccggcgaactcgtaaccggacaccacgccggaatcctcgcgcacggtggtttcgtcaaggtcgcgttgcaaaccgccgattggctcttccgcggccacgccgggcacggccagatcgccgttctcgtcgtacatggaagcgatgagcatggcggccaacgtgttggagtcaagaatcgggccgccgtactgaccggagtgcaccgggtgctcaaggccctgcacggtcacgtccacgcaggtgttgccgcgcagcgaggtggtcaaagaaggaatgtccgccgaccagttgccggaatcggccacgataatcacgtcggcggcgaattcgtcgcggtgagcctcgatgaagggaatgaagcttggcgagcccatctcctcttcgccttcgatgaacactttgatattgacgttgaggtcgtcgcccaaagccttcagcgcaccggagtggatggcgatgccgccgccgtcatcggcggagccacggccgtaaaggcggccgtcgatttcggtggccacgaacgggtcggtgttccactcggccgggtccggaacaggctgcacatcgtgatgggcgtagagcagcacggtgggggcgtccggagaaacgatatgcgagccgatgacctcccatgcgcccggagtgccgtcggcattggaagcctggaccaccttggcatccacacccacgaggcgcagttcgtctgccacgaattcagcggagcgcttcatatgttcggcggtgatgcccttggcggaaatcgactgcagcgcaaccttttcggccagcaccttgacgatgcggttccaatcggtttcgacgcgcgaacgaatctcgtcagcggtgagcgttgccatgatggtcctcctttatatgtgtgtgagcggcgtcattgcaatggctgcgccagtatataagtgtctgaacgtcaccgtaacctcaaagcatgacatggaatccgtttaggaaaaaagaagaggcccaagttcccgttgagcaggccccgaagaagaccgccgatccttctgagaaaaaaggccgtcctaccccgaagatgaagcaggctcaggccgccggtatccgtccgctggttccggtggaccgcaaggccagcgccaaggccgccaaagcccgtctgcgtgagaaggagaacgccgagtacgaggcgatgcagaagggcgatatcaaccacatgcccaaggcggaacgcctgccttggcgtatctacatccgtgattatgtggatgcccgtttcaaccttggcgaatggttcatcccggtggccttcgcgattctgatcgtctccatgttcgtcacttctttgatgcagaaccagtgggcttccatcatcatgatggcgcttatgtacggttacctgattgccgtgatcatcgacgtatggctgatgtggcgcaagctcaaggccaagctcatcgccaagtacggcgaacagtccgtgtccaagggctcccgctccttctcctacgcttggagccgttcgattcagatgcgtcgttggaggcttcccaagccgcgttacccgaagcgcggtcactggccggcagactgatgtccatatatactctggctcccctcgttgaggggctgagccgtaaagaaaacagtccagtggactgtttttaggcgaagtggcggcgatagccgcatatggctccctagcatgggagccatacttatatgcaccaaggaggcaatcatgagcgaacagtttgatctggtcatcatcggggccggccccggcggctattccacagccctgcgcgccgccgaactcggcatgaaagtggcactcgtcgagcgtgacgccaccgtgggcggcacctgtctcaaccgtggctgcatcccctccaaggcgctcatcaccgccacccacaccatcgacaccgtgcaccgtgcggccgaactcggcgtcaacgcctcggtgaatggcatcgacttcagcacgctgcgcgactatcgcctgcgcgtggtcaagacgatggtgggaggactggccggactgctggcccatcgcggcatcaccgtgttccgagccaatgccgcgttccatgcggatgagatcgctccagcaacttccaaccacatcgtccacctcgttccctcccccgaccaaagcgacatcctcacctatcacaaggccgatgtccccgaacccagcggccccacgatggacctcacggccacgaacatcgtcatcgccaccggtgccaagccacacccattgcccggtaacccgttcgccggcgccctcatcgactccacacaggcgctggaagtcaacgaatttccctcttcggcggtgattatcggcgccggggtcatcgcccttgaattcgcctcgatgtggaacgccgccggttcgaaggtgaccctgctgattcgcaaggaccgcgtgctctcagcctgggaccggagagccggcaccacgctgacccgtgagctcaaacgtcatggcgtgaacatcatcacccgcgccagcgtcacccatgtggacaccggcgcgaaccttggtgccaccgtgcactacacgcgcgaaggccaggacggcgaacagagcgtttggggcgaaatcgcccttgtcgccatcgggcgtgacccgatcaccgacccagcatggggcgtgacgattgatgaccacggacatgtcgccacggatgcgtacggtcgcaccgacaaaccgggcgtatgggcggtgggcgacgtgacggccggtcacgcactggcgcatcgtgcttttgagcaaggcatcgtcatcgcggagaccatcgccggactcaatcccaagccggtggacgaagccgctgtgccgcagatcgtgttctccttccccgaagcggcgtcggtcgggctcaccgtcgaacaggcgcaggcgagagaggacctcgtcgaaatcaaggagaccaactatccgatgctggcgaacgcgcgcatgctgatgagcggcacggccggctcattgaccatcgtctccggctgcgacgcggccaacccggacaccccgcgcgtgctcggcgtgcacatggtctccccgatggcctccgacatcatcgccgaagccgaacagctggtcggcaaccatgtgccgctcgccgacgcagcccgcctcgttcacccgcatcccacattcagtgaaacgctcggcgaggcgctgctcaaggccgacggacgaccgttgcacacacgctgagaccaaccagcacaagcaagttcggaccagcgcacctgataagatattgcccagtgtgtttcgtcccaacaaaggaagaagtgatggcggaaaaggacgcgaagccgaagaagcagagcacaatcaagcagatcatccagatctacaagtacacggctaaggaagacaaggccctgccgtggcttgaggccggtgctttcctgctgcctgtagtcgtgatgatcatcatcggtctgattgtcaagtggacctggctgacctggatcttcaccatgattaccgccatcatgctcggcattctgctggccaccatgatgctcacccgccgcgcggatgcagtcggctacaagcagattgatggcaagcctggtgccgccatcggcgtgctgagcaacatgcagaaagccggctttgacttcccgcaggaaccggtgtggatcgacccgaagaccaaggatgccatctggcgcggcacttcgatgaacggcatctacctgatcggcgaaggcgaatacggtcgcgtcatgaaggcgatggatcgtcaggaacgcgatatcaagggcgtcaccgccggctcctccattccgatataccgcatcgccgtgggccacggccccaagcaggtgccgctgaccaagctgcgtagcacggtgatcaagtccaagagctatgagtccacggaccacaagaacgcactgatcgccaagattcatccgcgccgtcgcttcctgctgaccaaggccgagatggaaacgctgaacgatcgtctgcgcacgctgcaggccaagaagggctatgccatccccaagggcatggatccgaaccgcccgcagaagatctcccgccgcgcgatgcgcggtcgctgatcggcagcacacaaccaaatcgcacagaagccccggaatccgttcaatcggttccggggcttcgtcatatgtctcataatcgcgtccacttacatccacctacgtcacctgtcaatacccactgtccacgttgcggacatctctatctactcccccgatagcctccgtttccattctgtaatgatgtttcgttgaaataacgcgcctgcgcgattgtcggccacagtcacgaaacattctcgtaacccaagtttcgagccggcgaaacgcgctattttacgatatataccgttatatctcatacgaaaggagcggtcccgtgaccgaactcaagtccaaggaagacgtcgaggcccttatcaacaaggaaggcatcgagtatgtctccgtccgtttcaccgatcttatcggcgttcagcagcacttcaccgtgccggctagcgaattcctgaaggacgctttcaccgacggcatgccgttcgatggttcctccgttcagggcttccaggccatcaacgagtccgacatgaagctggtcccggacgttgagacctctttcgttgacccgttccgcaagcacaagacccttgacgtggccttctccatcgtcgacccgctgaccgacgagccgtactcccgcgacccgcgtcaggtcgccggcaaggccgaggcctacctgaagtccaccggcatcgccgacaccgcatccttcgctcctgaggccgagttcttcatcttcgacaaggtgcgtttcgagaactccatgcagcgctccttctacgaggtcgactccatcgaagctccgtggaactccggcgttgactccgaagaggacggcaccccgaacatcggtttcaagaatcgcgtcaagaagggctacttcccggttccgccgattgaccacacccaggatctgcgcgacgatatggtcgccaacctgcagaaggtcggtctgatcctcgagcgttcccaccacgaggtcgccggcgctggccagcaggagatcaactaccgcttcaacaccctgcagcacgcaggcgatgacctgatgaagtacaagtacgtcgtccacgagaccgccgctctggccggcaaggctgcgaccttcatgccgaagccgatcgccgacgacaacggcactggtatgcactgccaccagtccctgtggaaggacggcaagccgctgttctacgacgagaagggctacgctggtctgtccgatctggctcgctggtacatcggcggtctgatcaagcactcctcctccgtgctggccttcaccaacccgtccctgaactcctaccaccgtctggtcccgggcttcgaggctccggtcaacctggtgtactccgctcgtaaccgttctgccgccatccgtattccgctggccggcacctccccggctgccaagcgcatcgagttccgcgctccggatccgtcctgcaacccgttcctggccttctccgctcagctgatggctggcctggacggcatcctgaaccacatcgagcctccggagccggtcgacaaggatctctacgagctgccgccggaagagcacgctggcatcaagcaggtgccaagctccctggccgaggctatggacgccctggaagaggaccacgacttcctcac

SEQ ID NO: 3455 - DNA, 14625 bp, Unknown
  R151_18m  MAG No. k141_61871
tgccccgcgtcggggacgcgggcggcgcggccgaatggctggtctccgacgagaagagcgaatacgccgacggcggcgtgaacgacatgcaccaaaggctcgtcaaggcacggcgcatgatccgcagacgcatccgcgagggccacctgttcacgttcctcgacgaggggctcgcgtccgtcggcccggtgccgtccaccaacaacctcgtcgaatcatggaacgcgcgcctgcgcgacatgccgcgccgccaccgcggactgcggctggtcagacggctgaaggcgatctgctggtggtgccaccagcacacggaacgtcccgagaccgacgcgtggctcgcggccaacgcgatgaccgacgaacgactcgagcgcctctaccggcaggcatgggaaaggagcccgcaaggccagtacgagacgttcggcatctccgcaagatacggcaccggcatcgactggaacgagttccacacacgggtcgaatggcagtcgaacgactagaccgccggacacacattttggcctataacccggtaagtccgtcgtcatgttgtctcatgttgtctgaaaacggaaaagccccggaaggcaaccactcagaagtggcggaattccggggctaatcggtcgggccggcgggatttgaacccgcgaccccttgacccccagtcaagtgcgctaccaaactgcgctacggcccgatggtgcaaaagcaccgagtagataatctaccagatatatgaaatctggcaaattacgcgcgtgtcacttccgcttcttcttctcgcggatgttcacggagatctgaatcggcgtgccttcgaagccgaattcctcgcgcagggagcgttcgatgtagcggcggtagccgtgctcgaggaagccggtggcgaagatcacgaaacgcggcgggcgcgtggacgcctgcgtggcgaagaggattcgcggctgcttgccaccacgcaacgggtgcgggtgggcggcctggatcttgccgaggaaggcgttgagtttgcctgtaggaatacgctgatcccaggattccaaggccttatccatggctcgcgtcagacggttggtgtgccagccggtcttggcggacaggttcacacgctcggcccacatcacacggtcgaattcggtgttccacaggcgttcgagacgctgcttgtcgaactcgtccatcgcatcccacttgttgaatacgagcacgattgcacggcccgcatccacggcggtggacatgaccttcaaatcctgatcggataccggctgcgaggcatcaaacagaatcagcgccaattcacagcgctcgatggcggcctgcgtgcgcagagaggaataatattccgcgcctgtgagcttgtgctggcgtcgcttgatgccggcggtgtcgatgaacagccagtcctcgccatcgatgttgacgatttcgtcgacggggtcgcgcgtggtgccggccaaatcgttgacgacggcacgttcttcgcgcgccagctgattgagcagagacgacttgcccacgttcgggcggcccaccagagccacgcggcgcaggccggaaggcgtgaggtagccggaagtcttctcggcctgcttgagcttgtcgagcgcgacgtccagcaggtcgcccactcccctgccgtgcatggcggaaatcgagtatggttcgccgaggccgagtttccagaattcggcggcaaggtattcgctggcctggtcgtcgatcttgttgacggccagcacgacaggcttgccggcggcacgcagcatcttgacgatgcgctcatcggtggtggtcatgcccacttgcccatcgaccacgaataccacggcatcggccaaggtcacggcaatctgtgcctgtgaggcgatggcggattcaatgccttccacgtcggcttcccagcctcctgtgtccaccagcttgaagtcggtgccggcccattccgcgtcatagctcacacggtctcgtgtaacgcccggcgtgtcttccacaacggcggcacggcggccgaggatacggttgaccagggatgatttgcccacgttcggacggcctacaacagccagcacgcccaccggcttgggaccggccttgcgcgcgccttccgtgaaaccacggccggaaatcagatcctcatcgccttcgtccagctcatagccttcgagattggcggcatactgctcgtattcttggttctcgatggcgtcctcgaccacaccgatgagcagatcgagcgtgtgggcaaagtccagatcggaattgtcgatagtggtaacgccatcggcggcggtcaggaagctggtgaccttggaatcggccttgtcgcgcgcggccacatcctcagcgcccacgcccttgacagcctggccggcgcgacgggcctgacggacctcctcacgggcggtcagcagcacgcgcacctcggcgtccggggacaccacggtggtgatatcgcggccctcggccacgatgcccagccccccggagaaggagtcggccgacgcctcgcgggcgatgtaggcgcgctgggcggcgatgagcacgttgcgcaccgggatgacgttcgacaccttggagacatggctggagacttcggaggaacgaatggcctcggagatgtcctcgtcgtcggcgaatacgcaggggttgtccgggtccacggagatatcgaaatggtcgccggtgaagaactcgcccaccgcttcggtgatgacacgctcatccacggtttcggcgtccagatcgatgccctgcttcaggcaccaccaagcgcaggcacgatacatcgcgcccgtgtcaaggtaggcgtatccgaaatacttggccagcgccttggacgtggacgacttgcccacgccggcggggccgtcgatggcaacgcgaatcacaggccaacctccttggacagcgaacggacttccgtctgggacagcacgcggtaggaaccgggcttcaaatcaccgagtttgatcgggccgatctgggtgcgcaccaagcgcttgaccgggaagccgattgagccgaagatacggcgcacgatgcggttcttgccggagtgcagcacgaccttgaccatcgtgtggtcgcgtgaggagtcgatgatcgcgcagtggtcgagcttgatccagccgtcgtcgagctgtacgccggtggtcacgagtcgacggcatacggtgccggagatcttgccttccagtgtggcgacgtaggtcttttcgacctcgtacttggggtgcatgacgtgctgcgagagttcgccgtcgttcgtcatgaggataagaccctcggaatcgtagtcgagacggcccatgtggaagatgcgctcgtacttgtcgcccacgatgtcgcgcaacgtgtagcggcccttcgggtcgtccatggcggagagcaccttgcggggcttgttcagtgccagagtgacgtggttcggattgacgcgtacgcgcgaaccgtctacgcgcacctgctgcttatgggggtcgacgcgagttccgagctcggtgaccagttcaccgtcgacctcgacacggccttcggtaatcatgtcctcgcacttgcggcgggaaccgaatcccgcttgggcaagcagcttctggagtcgaatggaattggaatcgtcttgcgctttcgcagcgcgggaatatgcgtttggcatcgttctcccaacgtggccggacagactctgtcatcgcagagactgtcgatttgtatacatacttcagagttggcggactggaatcccagccaattccaacctatatatcataccgcaacgtaggactgctgctagactggcaaccgtttgtgcgggttcgcccgtcttccaacagatgaaaaggaatgaacaatcatggaagaaaccaagcaacagccgctggccctgcgcgtgtgcgccgaattggccggcagcttcctgctgtgctttgccatttacgccttctccacatggggttcggccgtgtatggcatcaatatcgtgttcttcgcgttggctaccggcttggcatatgccgcagtcaccgccatcttctcccgcgtgtccggtggccagctgaatccggccatcaccgtagcctccgtgctggtttccaagacgaaaatcctggatggcatcctctatgtgatcgctcaggtcatcggtgccatcgccgccggcttcgccgtggtcaagctgctgcccacatccgagcaggtagctgccaaagtgtggctgactccggccgttaacggtttcgagaacggctccgtgtcttactcgctgctgacccagtatggcattacgttctcgattacgctggcgattgtcgtcgaggtcgttgcctctctgattgtcgttgccaccgccatgtcttctctgggtgatcacggcgagtcctcggaccgtcatgtcattgccatgggtcttgcctatggtctggccgccgccatcagctacccggttaccggtgccggtctcaatcccgcccgttccaccggtatcgcactggccgcgatgaatgagggtcttacgcaaaatccgctgcaacagctgtgggtgttctggattagcccggtcttggccgccgctgtggtggcgttggtcatgatcatcgcgcagatgatgaccactcccaaattgccggctgccgccgatcttccacagacggatgccgatgcgaacgcggacacgctcgacgatggcgaattcttcgatcaggccgcctcgtctgatggcgattcagcggaaaaagatgttgccgaagagtccaaagaagctgaagtaggtaatcagcaggccgattcccaaggcgatgccgatgaaggagtcgaacgccactgagcgcactttccatgggcttttgtcctgaagaatcaggcgaacaagcccggtgatgatggccgtcacggcaagtatgaccgtggcggccatcgtatatccgaaagcaaccagcagtgtgatgacggcgacgacgccgagtacgcaccattcaaaccatggcttgccctcatgcgcttcggatacatagggatggttgtgcatgttgcgattccttctgtcgaacggttacgtgaccacaatagcaggcgaatagcaaaggtgggattccgcttggacccgttgacgggtcaggcggaatcccacctttgtgcgttttggctgagctgctcccctcagagagtcccgatcagtggaagaagtggcgggtgccggtgaggtacatggtcacgccggccttcttggccgcttcgatgacctcctcatcgcggatggatccgccgggctgcacgatggccttgacgcccgcgtcgataagcacctgggcaccatcggcgaacgggaagaacgcatcggatgccgcgaccgcaccggtggcgcgatcggcaccatcggccagcgtgttggcgcgctcgacggccaaatggcaggagtccacgcggttgacttggcccatgccgatgccgaccgtggcctggtcgtgggccagcaggatggcgttggacttcacgcagcggattgcacgccatgcgaacacgaggtccttcagcgtgtcggcgtcggcggcatcgccggccacgagcttccaggcgtccggatcgtcgccgacggcgttgatcagatcggtgtcctgcacaagcaggccgccatcgatctggcggatggcctcgtggcccttcggcggctcggccaccttgaggatgcgcaggttcttcttcttggtctgcagcagttcgagcgcggccggctcatagtcgggggcgacgatgacttcggtgaaaatcgggcgcacgctttcggccatctcaagagtgaccttggagttgcaggcgatcacaccgccgtaggcgctcatcgggtcgcaggcgtgagccttcttgtgggcctcggccgcggtcgcgccgatggccagaccgcacggattgttgtgcttgactacggccacggcaatggcgggagccatatcccatacggtgcgccaggcggcgtccgcgtccacgtagttgttgtagctcatcggcttgccgccgagctgctcggcgtgggcgaaaccggtctggttgagcgggtcaatgtagagggcggcctgctggtgggagttctcgccgtagcgaagggtgtgggcgcggtcccaggtacgggtgaatcgtgccgggaacttggcggaatcgacttcggtgccctgatcgtccttgtccacttcggcggtgtccagcgaagccggcttgggccagtgcttggcggtccattcgttgatggtggcgtcataggcggcggtgtgggcgaatgccttggcggcaagccacttgcgctcgtcgagggagaagccggtgccgtcggccacacgctcggcgaccaaggcgtaatcggccggatcggtgacgatggccacggtggcgtggttcttggccgcgccacgcaccatggaggggccgccgatgtcgatcttctcgatggtgtcggcctcgttggcgccggagcgaacggtgtcggcgaacgggtacaggttgacgaccaccagatcgaacggcttgatgccgaagccgtcaagctgcttggcatgttcggggttggtcatatcagccagaatgccggcgtgaatgtacggatgcaacgtcttgacgcggccgtcgaggcattcggggaatccggtgacatcggacacctcggttaccttgacgcccagctcggcgagcttcctggcggtcgaaccggtggaaacgacttcggtgccggccttcacgaacgcttccgcgagtacttcgatgccttccttatgaaagaccgagaccagtgcccgacggatcggtcggttcgtgtttgtcatcctgttcctccttggattcttgtggttgtgacgccagggaccgcgcctgacggacgatgacggtcttcggggtcgcggcggtggtgcgggaatcattgatcctcccaaccaaccagcctatcgaaaaaacgagcgctgtgccaatcagcgcgagcagccatgccgcggtaaatcccaatgcggtcgaatgaccgacgactctggtggaggccatgacgtcgacgccaatgtgagcgagacgatgatcgccaagcgatccattggacagagcgaacagcaatgtggatgccagtgagatcagcatcgcgctcaggcagaatgacccggcggagtagatcagcgaaaccagtactgggccgcgggtggacgcattccgtatattcaacggtctgcaggcgaatccttgcggcaggaatacagccagcaggcccacgagcgcagcgatggcgagaggcgcgttcaaggcaacggtacgccatagttcgctgctgaccggttcgggcagaataccgaataccggtattgcaggaagctctttggattggccgagccataacgtgaaactggccaaatcaccgatggcgaatccgccgccgaagagccaggaaacagcccagagcatgacgttgggtagccagatcagcatggcgacggtggtgagaattcgtgaaccggtttccatcccggacaattcgaacaacgatacgacagcggcatggttgcgtaccgaccatacgatgacggtaatcaatccaattgccaggtatatgcccagtatcgcgacggccaagacgacgccgattttcaggcagtggcgtatgtccgccggcacctgcttgcgagtccagtccctgaatgctcgcatcttggctgattccggtacggctgcgcataggaaaccgatcgagaatacgatggctgctttcagcaacaccagccactggtcatcgacaagacctaggtgtacggattgccggaatgcctcgttcaacccgagccaaacattcaatccggcaacatacgcatgcggcccgtatgctttgattcgcatggtgagtgcattgatcagccatatcagcagtatggtcaacatcaatggcgtgatggtgagggtgaacgaatcggttctagagcccgatccctcactcagaagcacaacggcctgtgtcagcgaggttgtgccgacggtgagattgtcgccgccctcttccatggagacaaccaataacatcagcgctgtatagcaacctaatgcaacggcatagatggccatggatgcgagggcgactatggctccccgcacccattggcgaatcacggctttcatcacgattggttggaaccgatcagtcgatgttggccttggcgagtatgtcgcgcatgatttcagcggcctggcccggggtcttgcccacggggatacccgccgcttcgagcgcgttcttcttgtcctgggcggtgcccttgcctccggagacgatggcgccggcgtggcccatctgcttgccttcgggggcggtgaaaccggcgatgtaggcgacaaccggcttggtcatgtgctccttggcccatgcggcggcgtcctgttcggcgaagccgccgatctcgccgatcatcatgacagccttggtgtcggggtcggcttcgaatgcctgcagggcttccagcagcgtcgtgccgacgatcggatcgccgccggcgccgagacatgcggtgaagccgatatcggacagttcgcccatgagctggtaggtgagggtgccggatttggagaccagtccgagcgggccgcggccgacgatgccgtcggggatgatgcccaagttgacgccagggttgccgagcgtgatgaaaccggggcagttcggtccgatgatgcgcacgcccttcttgagcgccagttcgacgaagtatgcggaatcggccaccggaatgccttcagtgatgaccacgatgagttcgatgccggcttcgacggcttcgaccacggcggacttggcgaacttcggcggcacgaacaccacgctggccttggctccggtggcttcacgtgcttcgccgcaggtggcgaacacggggatgtccacgtcggcaccgttcttggcaccggggaaggtgacggatgtgccggccttgcgcgggttcacgccgccgacgatattggtgccggccttgagcatgcgagccgtgtgggtcatgccctgatggccggtcatgccctggacgataacgggagcgccgtcttcgatgaacagcatcagcgaacctccttggactgggtcgcctcaccggcgagctgcgcggccttggctgccgcgccttccatggtttcggacacatggatattcggattgttggcggaagcgaggatatgcagaccctcggcggcggcgttgccatcgaaacgcacgacgatcggcttggaaccgccgagcttggcgaccgcttcgaggatgccgttggcgacttccacgcaggaggtgatgccgccatagacattgatgaacacggattcgacctgagggtcggacagtacgatctccaggctttcggccatgacggctgcggaggcgccgccgccgatgtccaggaagttggcgggcttgatgttggtgccctgttcctcgccagcgccggagacggcatccagggaactcatgacgagtcctgcgccgttgccgatcacaccgacctcgccgtgcaggtgcacgtagtgcaggccgtgttcgcgggcgcgctgttcgaaggggtcgggaacgatgagatccacgaaacgcgcccagccatcatggcggaaggaggcgttgtcatccaaggagatcttggcgtccaaggcgctcagctgcttggtggattcgtcatccgggtcgccgatcttggcgagcggattgatttccacgagcgtggcatcgttgtctttgaagcagcgccacatcttgagcagaatctgcgcggcctgatcgacgtccgcgtggtagaagccgatgctctgtgccatttcggtggcagcggccaggtcgaagtcgccgagcgcatcgatgtgcaggcgcttgacggcctccggatgttccttggcgatttcctcgacttcggtgccgccgttggcggtggccagcacgtcgaagtcgcgcgaggtgcggtccacggagatggacacgtaatattcgtgcaggatgttcttggcttcggccacaagcacgccggaaaccttgtgcccgtggatggtcatcggcaggatggactcggattcaagaatcgcctcgtcgcggttatgggcgatcttgacgccgccggcctgaccacgatgaccgatcttgacctgcgccttgattacgcagggatagccgattttgtccgccgcttcggcgacttcatgggagttctgggcaaagatggcgtccggggtgggaatgtcctgttcctcgagcagctgacgcgcctggtattcgtaaagatccatcgatccttccctgactatgtaattggtccggcatataactgtacacagtacatgccggaccttgaaaactaactgtacgttgggtgagacggaatctcaggccggcatcgcgatcagcgagctgctgggcttgccgccgagcttatccagaccgtcgagaccatcgagccgcatcacaaaactgaagcccaccacagtgccgcccgccttttcgataaggtcggcgccggctttggcggtgccgcctgtggcgatgagatcatcgacaatgagcactcgctcccccgcctgtacggcgtcggtttcgatttcgacgctggccgtgccgtattcgaggtcataggattcaccgatggtttcgggcggcaatttaccggccttgcgcacggcgatgaaacccttgcccagatgggcggccatggccgggccgaacaggaacccgcgcgattcgagaccggcaatggagtcgaattcgctcggggacaccggcagagccgtttcaagcgccttgagcagaatcttcaagcccttggggtcggcgagcactggcatgaaatcacggaagataatgccttccttgggaaaccccggtatggaacgcaccaaggacaccagatattcggcttcctgttgccctaccttgctcaatgcgtcgatggtgatgtccgactgtgccatagtgctcgccccttttatgcctttgcgatgcgatactcggatggtgctaccgaatcgaacagcttacttcgtcttggtttcgttgtcgtcaccggtctcgtcagcggtgtcttcctcggacacgacggacgcctcgatcggaacctgaccagcctcatcgttagccggagcctcggtgtcttcgtcgggcagcgggttgccgttctcgtcgacctcatcatcggacacataggccgggcgggtgtactcacgggcgatggcgttgaagccgaaacgcagcttggagccttcggagtcgatgacgatctcctcatactgctcgtcgacttcgacgaccttgccgatcacctggccgatggtgatgacctcggtgccgggctgcaggttgcgacggaagtcctgcttctcctgctgttgctgcttggccttcttggactgccaccacatcatgccgccgaacacgacgacgatcacgatgagcataatgtactgttgttccacgaaacaactccttcaaacgagcgacattgacgaaacgccgccaagtgtgcaaacaggagaaagtctagaagagcttgctgacatcatctttgggcgtaattcccaaatgctgccatgccttctcggtagccacgcggcctttgggcgtgcgaatcataaaaccttcgcgcacaagatacggctcgcacacggtttccacggtttccgattcctcgcccaccatggccgccagattgttcaggcccacgggtccaccgttgaagttgcgcacgatggcattgagcacggcgatgtccagccggtcgaggccttcggagtcgatctggtacagggccagcgcctccttgacgtcgtccggccgcaccacgatcaggtcgtggacgatggcccagtcgcgtacacggcgtagcaatcggttggcgatacgcggcgtgccgcgcgaacgcaacgcaagctcatgagcggaacccgcatcaaggtttacgcccagtacgttggccgaacgttcgatgagcttttccaactcctcatgcggatagaagtcgagatgtgcggtgaagccaaagcgtgcgcgcaacgggcttggcagcataccttcgcgcgtggtggcaccgatgacggtgaatcgcggcagggtcagcgggatggagcttgcgcccgggcctttgccgaccatcacatcgacgcggaagtcctccatcgcgatatacagcagctcttcggcggcgcgcggcagacgatggatctcgtcgatgaacagcacttcgccgacgtcgagggagctcagaatcgaagcaagatcaccggcatgttgaaccgcagggccggaagtcacgcgaatcggcacttcaagctcattggcaacgatcatggccaacgtggttttgcccaagccaggagggccggcaagcagaatatggtccggtggcacatcgcgtttacgggccgcgtccaggaacagttgcagctgggccttgagccgtggctgtccgataaagccttcgagaacatgggggcgcagctcctcgtcgctgaccggctcgttgccgatcggctgggaggagaccatgcgcaacgactcttcgttggcaccggtgtttgaggtaccgtaatccgttgtctcgctcatcagcggcccctatccatcagcgccaaagccagacgtagcacacgcggcacatcgtcggtggcaagcggcgtgggaatatcgttttcggcgcaagcctcggcaacggcctgctgggcgtcctgctgacgccagccaagtgaaatcagtccttcgacaacctgttccgtaccggtatccaccggagacttggatattgccgcctgagcggaagcaccctcgatctgactcaaatcaatagagcccttaagctcgaggatgattttctgtgcgcccttcttgcccagccccggagccttggccagcgcggtggcgtcgttgtcggcgatggcgtgggccagctgactcggcgtcagtgtggagagtaacgattgggccactttaggtccaatgccggagaccttgatgagttgcagaaaggttttcttggcgtcccgatccaggaatccatgcagggtaatggcatcctgagagaggttcatataggtgaagacgcgggtgtcttgcccggcgtgcagacggctcaggtcggtggcggacatgcgcacttcgtagcccactcccccaacatcaatcaatgcggtatcggtttcgaccgattcaacccgcccggtcagcatgccgatcatacaggtactccttcagggctccaggattcaagactcgaacaactgttcgaaagtatactacatgcctcggtcgtggttgatgcggcggcgcgtggatttctgtgcggcctcagcccactggcgttgcgcggcggtcagatgttgttcgcgttcgccgccctgcaatgcgcctgccgggcgcagcgcatggcaaatggccaaagccaaggcatcggcggcatcggcgggagtcggcattttggtgaggttcaaaatacgtgtcaccatacgctccacctgaatcttctgcgcctgcccgttaccggtgatagccagcttggcttcggtaggcgtatgcaacgccacgggaatattgcgttgcgcggcggcgagcatggcgaggccggcggcctgtgcggtaccgagtacggtgttgcggttggattgtgcgaacactcgttcgatggatacggcatcgggtgcgaagcgatccattttctcggacaggccgttgtagatggccagtagacgcagatcctgggtgatatccggtgaggaccgcaccacgtccacgtgaataaacgaaagccggcggtgctcgccggcttcgatcacgccgaccccgcaacgtgtgagcccggggtcgacgccaaggataatcacgaggattactcctcgtcgagctgggccatcacctcgtcggaagcggtccagttggagtagatgttctgcacatcgtcgaggtcatcgaggttgtcgatgagcttggacaccttgcgggcatcgtcgaggctcaactcgacctcgttcttcggctgcatgacctggtcggcggaatcgtagtcgaagccggcgtcctgcagagccttgcgcacggtgaacaggtcggacggaccggtcacaacggtgaacacctcaccgtcatcggtaacgtcctcggcaccggcttcggcggcggtttcgaacagcttgtcgaagtccacgccctcggacggcaccacgatctggcccttgcgctcgaagttgaaggacacggagccggaggtggccagggagccgttgcccttggtcagggtggaacggacttcggcggccgcacggttgcggttgtcggtaaggcattcgatgatgaggccaacgccggcaggagcgtagccctcgtagacgatgtcttcgtagttggcggcgccgtcttcagcaccggcaccacgcttgacggcacgagcgatgttgtcggccggcatggaggccttcttggccttgtagatggcatcgtacagggacgggttgccgtccgggtcgccaccgccgaggcgggcggcgatttcgatgttcttgatgagcttggcgaagagcttgccgcgcttggcgtcgatggcggccttcttgtgcttggtggtcgcccacttggaatgacctgacataatgctcctagca

SEQ ID NO: 3456 - DNA, 8031 bp, Unknown
  R151_18m  MAG No. k141_62076
cccgatgttctccgaagttcgctgatttataggaagagacttggcagacaacaaacgcaccggcctgtccgctctagccgacgccggcaatgaaggcgaggatttctccgtcatcgacgccatcggtggcccgcgtggcgtcatcgaatccatgctgcctggcgtggtgttcgtcgtactgttcgtggccacgagcaatctgaatctcaccattgcggtttcggccgtgttggcggtattgcaggttattgtgcgactgattcagcgccagtcggtaatgggcgcggtctctggtctggtggcggtaggcatctgtctgatttgggcatggcagactcatgaggcccgcaattactacatcttcggattcattaccaatgccggctatgccgcgttgcttgccgtgtcgctgattgcgcgcgtgcccggactgggtttggtcgtcgaattcatccgtagcctgcccaccgagcatttcaaggcatggttccatgactggatggacgacaaggccctgaaacgcgcctatatgattgtcaccggcctgtgggtcggtctgttcctgctgcggctggtggtgcaggtgccgctgtatctgaccaaccatgtggctgcactcggcgtgacccgcctgctcatgggcattccgttctgggcattggcgatttgggtgagttacctcattattgccacgccgatgcaccggcataaggtcgcggctaagaagacacagactgaagtcgctgttgatgccgaactcgaaccgagcgcaatcggaaaggacgatgatgcaagctgaagttcgtatcgaacgatacgccgaccaaggccgctgcgtggcccatatcgacggtcgtgtggtgttcgtccgcttcgccttgcccgacgaactcgtgcgagtcgaacttgacgagccccacgaccgggacgaccggttctggaccggcgaagtcgtcgaggttctcgagccgtccgaagaccgagtcaccccggcatggccacttgccggtcccttggcgatgggcgggggagtgggcggcgcggatctcgtgcacgtctctttgcccggccagctcaagtggaaggccatcaccgtctccgaacagatgagccgactcggccatatcgacgtggccgttcccatcgagcgcatgcccggcgacaaggcagccggcggcctcaattggcgtacccgcatcgaaatgattgccgacgacaacggcatgccatccatgcgccggcgcggcacacacaaccgcgtggccatcgacaccatgccgcttgccacgcgcacgctgctggacgtcgccaagcgcgaacacgtgtgggaaggcggctttgaacccggctcccagattcgtctttccgtgcccgaaccgcgcggcgagatcgtcgataccgcggcagcaggcgacaattacgccgtacttgtggacggcgaactgcgcgccggctcccagctgctcaccgaacaggtgaccatcaacggcacgaccttcgactatcaggttgacgccaacggtttctggcaagtgcatcgccaagcgccgatcgccctcggtacgcacgtgatcaacctggtcaacgggcagctgcagtcagcggcggacgccgtaatctgggatttgtattccggttccggcctgttcaccctgccgctggccacaatgaccggtgaacgcacccgcatgctcagcgttgaaggcgcgcgtgtggccgtcaagaacgcccagcgcaatctgcgcgccatgaacctgaacgacgtggacgcccgcgcgggtgacgtctcgcgcacgctggaccatgtgccggcgcatctggccaagccgaatgtcgtagtgcttgatccgccgcgtgccggtgctcgtgccaaggtctgccgccagattgccgcggccggcgcatccagcgtggtctacatcgcctgtgatcccaccagcctcgcacgcgacaccgcgacactcatcggcgaaggctacgagctcaaagacatccgtgccttcgacatctacccgatgacccaccatgttgagacggtggccctgtttacccgctgacaggtgagcatatgacacgacgaattctcgaattgctggcctgcatggcggctgtgttgtccctggccgcctgcacgccggccggtagggcggtcggcgatacccaagacagcatgccggaagtcgcccacgattccacacatcccacggatgtcacagtcggctttgtggggtcgactgacaccgccgcagacaagtccgccatcaatgcgctgtctgatgacaaactcaatgtctactatgcctcgctcgaaacatccgcaagctcggcaaacgcaactgatggtgtatccggtgaaaccgaatcttctgacgccggcactaccagcgaaaacggtgccgatagtatggatgctcatactggcgtcgacaagaatgcggccaccgcacagcagggtgttgccgatttcgtagctcgcgcggtcaaaatcgtggttatcagcggcatcgacgttaccgacgccaaccgggagagctggaaccagacgttgaccaatgcgcgtgaagccggtattccagtcgctctcattgatccaaagcatgcgcccgaagatgaactgctgtacgccgtcatccttcacctcaacaccaacagtgccgattctggcgacactgccgataccaagccaatgactattactgacgccgtgctcaccatcacgcgcgacgaaccccacgaacgcgagatcaaagtcaccgtttcctgagccgaatcaggcccttgaagctgagaaagcaccctgaatcatccctgagccttagcggattgcgaaacaagacgcggtaggctggagaatatgagtgcaacaacagccgtggaaatgcctgagatcggagcgaccggtcttacctccaaagaagtggtgcagcgtatcgaaagtggccaatcgaatgcggtgaaaacatccacctcgcgttcggttcaagatatcgtgcgagccaacgtattcacgctgttcaacggcatcatcttcgccgcgatggtactggtgctgatcaccggttcctggagggacgcggtgttcggtttcgtcatcatcatcaacacgggcatcggcatcgtcaccgaactcagggccaagcgcacgttggataagctttccatccttgtggcctccgaattcctcgtgcatcgtgacggcagggacgtggaggtgccccacaacgagatcgtgctcgacgacctgctgtggatccgtgccggcgaacaggtgccggccgacgggcagatcatccagacctggggactggaactcgacgaatccatgctcaccggcgaatctcgtaccgtgcgccacaaggtgggggagcaggtgtattccggcgccaccgcggtctccggcatggcattggtcaaggtcaatgcggtcggcagccattcctacgccgccacgctcaccgcgcaggccaaggtatacaagaaaaccgtgtccgacctgaacaagggcatcaacacgattctgaaattcatgaccttcctcgtggtaccgctgtgtattctgctgattctttcgcagattcatacggtcggcggttggggcacggcactctccaccggcgaatggcggcaagccgtggtttccgcggtcgccggcgtagtaggcatgattcccgaaggcttggtgctgctgacttcgctgaacttcgcggtggccgccatgcgtctcgcccgtcacaatacgctggtgcaggagcttgaatccgtggagacactggctcgcgtggacgcgctgaacctcgataaaaccggcacgatcaccgatggcggtatcgccttcaaccggctcgtgatgctcgattccgccaatgcggctgcggaacaggcagccacgcaggccctctacgactgctgcaacgaagagcagcccaacggcaccggccaagccgtactcgccgggctcaaggcccaaggatatggggcaggtgcggttgagtctcgtgtcccgttctcttcggcgcgcaaatggagtgcggtgcgtaaatccggcgagacctggtacatgggagcgccggaggtgattatttctgcgcttgagggtgactattcgtcggtgttgcagcaggttaacgagtatgccaatgacggcaaccgtgtgttgcttgttgcgcggtctacagctcccctcagttcgcgaagcggactgagggacgcagttgagggagccaatgtctcggacggcccgcaactggatgtgcaggctgagccggtggcgttggtgttgtgctctgagaagattcgcgaggacgccgagcggacgctcgcttggttccgtgagcagggtgtgcgctgtcgtgtgatttccggtgacaatccagtgaccgtgggtgccatcgcccgcagagtgaaactgacaggcgaccatgagccggtggcgatggacgcgcgcgaactgcccgaggacgtgaacgaactggcccgcgtgctcgaaaacgtcgatgtgctcggccgcgtgctgcctgaccagaagaaggccatcgtgcaggcgctgcacacgcagaaccacgtggttgccatgaccggcgacggcgtcaacgacgcgctcgccatcaaggaggcggacctcggcatcgccatgggcaacgcggcacccgccaccaaagccgtggcccaagtggtgctggtggattccaagttctcgcacctgccggacgtcgtggcacggggccgtcaggtcatggccaatatggagcgcgtggccagcctgttcctcgtcaaaaccgtgtactccgcgctgatctcgctcggtgtagtgctgacgcaaatcccatacccatacctgccgcgccatatcacgtatatcggcgctctcaccatcggcatgcccgcgttcatcctggcgctcgcgccgaacacgcgccgctatattccgggattcctcaagcgcgtggtcacgttcgcgctgccgggcggcatcgccactgcgctgtcggtgctgctggccgcttgggtgctgccgccggtcatgggctggaacgtgaccggcgatgccgcggacctgtccgccctgcgcgccaccagcgccatcatcctgttcgcgatgggcgtgttcgtgctggcccgcgtggccagaccactcaacggttggcgtggcgtgctggtggcggtgttcgcggcggcgggcgtgatcggcgcgttcgtcccgttcgtggcgaacttcttcgccctgattctgccgaccggcgccacgatggtggccacgctgatcgcgttggccggttccgcgctgatcttcgcgctgtgcctgtggctggcgccgttcgtgcgcggactgacgggcaagctctcgcgtcggcattgagacggcggcgcgattgtctcatacttcaagccgacacgccagagcctcggtaacgtgcccgtaccatgtgtagcggataatcagcggcatcataagccgattcatgatttcggaggaagcatgtccttacgcgacgaccagctggctaccctcaaggcagccggcaaggacttcgattactacaacatcgccaatctcgacggcatcgatcatctgccgtactcgctgaaggtgctggtcgagaatctggtgcgcaacatcgacggtgccaacatcaccgacgagcacgtcaagaccctgctcgactgggatccgaacgccgaacccagccacgaaatccagttcacgccgtcccgcgtgatcatgcaggacttcaccggcgtgccctgcatcgtggacctcgccaccatgcgtgacgcggtcaaggacctcggcggcgacccggaggtcatcaacccgcaggttcagtccgatatggtcatcgaccattccgtgcagatcgacaagtatggcgtcgccgatgcggcccagcggaacatggacatcgaataccagcgcaacggtgaacgctaccagttcctgcgctggggtcagcaggcattcaagaacttccgcgtggtgccgccgggaaccggcattatccaccaggtcaacatcgaatacctggccaaggtggtcatgagcaaggccgaggccaacggcaacacgctcgcctacctcgactcctgcgtgggcaccgactcgcacaccaccaccgaaaacggtctgggcgtgctcggctggggcgtcggcggcattgaagccgaggccgccatgctcggccagccgatctccatgctcgtgccgcgcgtggtcggcttcaagctcaccggctccatcccggagggcgttaccgccaccgatgtggtcctgaccatcaccgacatgctccgcaagcacggcgtggtcggcaagttcgtggaattctacggcgagggcatcgcctccgtgccgctggccaaccgtgccaccatcggcaacatgggcccggagttcggttccacctgcggcatcttcccgatcgacaacgtcacgctcgactacctgcgtctgaccggtcgctccgaagagcaggtcgcgctggttgaggcttatgccaaggccaacaagctgtggggcgacgcctccgacccggattacgtggaaccgcagtactccgagtacgaggagcttgacctcggcactgtggtgccgtccatcgccggtccgaagcgcccgcaggatcgcattctgctgtccgaagccaaggagatgttcgagaagaccgctcccgcctacgagaccgagaagaccgtcaaggatccggtggctgtgtccaccgacttccgtggcgatttcgacatcgagaacggggacgtggctatcgcttcgatcacctcctgcaccaacacgtccaacccatccgtgatgatcgccgccggcctgatcgcccgcaacgcgcacgccaagggcttgaagccgaagccgtgggtcaagacctcgctggctcccggctcccaggtcgtggccgactacctgaaggccgcaggcctccaggacgacctcgatgcactcggctaccagctggtcggctttggttgcgccacctgcatcggcaactccggcccgctgctgcccgagatttccgaggcgatcaacaccaacgatctaaccgtcaccgccgtgctctccggcaaccgcaacttcgaaggccgcatcagcccggacgtcaagatgaactatctggcctccccgccgttggtcatcgcctacgcgctcgccggcacgatggacttcgacttcgaaacccagccgctcggcaccgatgcggatggcaacgacgtgtacctcaaggacatctggcccaccaactccgaggtggccgccgtggtggacggcaccgtgagccgtgaaatgttcctcaaggactacgcttccgtattcgacggcgaccatcgctggaagggcctcgacgtgccggaaggcgaactgttcgcatggaacgacaagtccacctacgtgcgcaagcagaccttcttcgacggcatgaaggccacgccggacccggtcgctgacatccacggcgcccgcgtgctggccctgttgggcgactcggtcaccaccgaccacatctccccggcaggcgcgttcaaggcctccagcccggccggcaagtacctgaccgagcgcggcgtggagccgaagaacttcaactcctacggttcccgtcgaggcaaccacgagatcatggtgcgcggcacgttcggcaacatccgcctgcgcaaccagctgctcgcctccgtgggcgaggaggtgacgtccggcggcttcacctacgacttcctcgccaagaagccgactacgattttcgaagcctcccgcgactacatcgacaacaaggtgccgctcgtggtgctggccggcaaggaatacggcaccggctcctcgcgtgactgggctgccaagggcacggtgatgctcggcgtcaaggccgtgatcaccgagagcttcgagcgcatccaccgctccaacctcatcggcatgggcgtgcttccgttgcagttcccggcaggcgaatcctatgagtccttgggccttaacggcaccgagacctatgacatcgccggcgtcgagaagctcaatgagggcgtaacccc

SEQ ID NO: 3457 - DNA, 10728 bp, Unknown
  R151_18m  MAG No. k141_63164
attgcggcgatcggtacatggcagtagccgccggggttgttcaccagatagtcctgatggtgtgcctcggccgggtagaagttgcgcagcggttcgaccagtacggccgggcgctgcggctggcggtcgaccagctgctccagagccgccacatacacggcgcgctgcgtctcgtccgtgtagaacatgccggtgcggtactgccggccgcggtcctcgccctgctggtccacggagaacgggtcgatgacctccaggaacagcaatgtcagcgtccgcaggctgacctgtgccgggtcaaactcgactttcacggtttcggccgcatcggtgccgcccgcgcatacctgctcgtaggtcggcgattcgacggtggattgcgcgtagccgaccgtggtgtccgtgacgccgtcgacgttctggaagtagcgctccagcccccagaagcagccgccggcgaagtatgcggtttgcgtatttccgtcattgtgttcgttacgttcgctcatacgccccacgttactacgtcgaggcggctcgcgatgcagtcaacgacacctctgcaccggcaaacccgctttcgaggggctgatttgacccccgccggaggtctactcccgtttcaaggggctggtcggccgctagaccgcatgtaaaaacccatccgcgccaacgccattccgccgattttggagcgtgaatacttcggcatcagcccctcgaaacgggagtagacctccgggagagaccaaatcagcccctcgaaacggagatagcgcttgccgcgccctccttgtcaggctttctccgttcaaagaggtacattcgggcttctgcagaatgctatcttcgttcaaagaggcaccgaatacgggaaaccccgagtacaaacgttgtcattgcaacgctcatactcgagatttcagagttcaggcacctctttgaaggcagttagttgtccgcaaggggccaaatgtacctctctgaaagcagataccccgtctcaggctcgaatcggctaacctgcgtacccgtgtgcacaccttcacgaccgcagcgtgctgagcatgccggccacttcggcgggcgtcacgctgggcacgtaggcgcgcaccaccgcgagcccgatctgcggcaacgccgccgggtccgggtagcacacgtagaccggcgcctcggtgggctggaacttgcgcttgaagttgaacagcgagtggaagccgtaggcgggttccatccagtcggccacgatctgcagcgcgtgttggagcacctgcgtgccttcgctggccggtgccccgtcctccccggcgttgtcccgatcgggattcatgccggccaggggcgccgcggacaggctcatgaactccacggcgtgcgtgggatcggcttcgccctcgtcacgcagccgctcggccatgcgcgcgatcaggaactccatgatgccgttggggctgtcggtgcgatggcgcatgaaatccaacgtccagccgacgatgcgcccgtcgcgccaggtgggcaaccagctggtgacgcccagcacgcgcccgtccgcgtcgatggcgtaaagcagccgcacgcgcgggtcgcgcagttcctcgacgccgccgagcgtgaacttcatttccggcagcgccttgagctgcgcccactcctcggagatgtcctcgatctgttcgcgcacatcgagcgacgcttccaggaatgtggactgcacgtcggtcacgccgtcgcgcttggccttgttgatggcggtgcgcacgtcctgccatttcttgccggtcgtcttccagccgcgcgggtcgaccaccatttcgctgccgacctcgatggagttccagccggcttccagcaacgcgtcgcgctgttcccgatgcacgccgtagaacaccggcgacagcgaacgttccgcacagtgctgggcgaaaccattcagatcgtccatccattccgccggatcgccgaacggtccggtgcaggtcagcgcgatgccgttgagcacgcgatacgccacggccgatctgcccgtgggggacagccagtagctgttgccttcccacgtggtcatgaagctcatcgattcgccgccggtttcgaccagacgttcggcgcgcgcccgggcccgctcgttcgattcgctcacgtcgcccatccagtggatcaccacggccagcaccacgatccagaacaccaggccgacgccttggtacatgatcgaggccatcggagtgcgcggcacgaacgacagcttcatatggctcaggaagccgatgggcaggaagcgtcccggcagctcggccagcagcgacgaggccgtagcgcgtggcgagaaggtggcgggttgggcgatgccgtatatcaggtatatggcggcgcacgccagccaggccagcacgatggcgccgatgccgccgaccagcctgcaccagccgatgcggatcgggaagtgtttcatcgccgccagcagggcgatggcgaacagcagcgggggcaggacgttcgccacgcaggccacgatcgcgccgtgctgcagcagggaggccatgccgtccggcgcgaagctcagcggcacgaccagatagtaggcgacggcgatggccaccgtgaacaggttgatggccacggtgcagatggccgcgaaccgacgtccgcgatacaggccccacgccagcaccagggtcacggcggtgggcagcaacgagcgcagcaccgcgccgggcatcgaggcccgcaacagatcgaactgcaggaagcatccgccgtgcgtgtcaccggccaggcatttggccagcatgccgttgtcgacggaaaccgggctcatgagcaggccgatcgtgctgagcgggcccgcatggttatgggaggtgatggcgatgaccggccccagggccagtaccacggcgatggccgcgaatatgcgccgcgcctcgaaggaggtgctgcgcagccagtgccattcggcttcgacgtgcgcgggcggaccggccatcacacggccggcggcatggccgatcagcgcggcggcgagtatgcagtagccgctggggttgccgctgtagagcaacgtgaccaggatcgccacatagccgacgagtcggatgcgcctgcgccataggtggctgcagaacgcgctggccgccatgagcgcgccgaccggcaacaccagcgggctcaatgcgaaccgcatgcgggagacgaacagggagtcctggaacatccatccggccgccgcgcacagggtcaggcccgccagcacgccgccggccgcgcaggcgagcgcggtgacgacggtgcgcacacggccgagccatggttcggctatcgacagcatgacgagccacaggacggcgtcgaccatgagttggatgacgccgcgcgccaggaacagcgagcagatgagtttgccggcgttgaatgcggccatgctggtgctgagccgcagcggaaacgcgaatccggccatcgcggccaccagccacgccaccagattcagcgccaccagcgccgccgtggcggtgacggccagccggtggtcgtccgcccactgccgcacgtcaccggccagttcacgccagctttccgccgcatggctggaccttgccgtatgcggtttggtggcgcgggaggtcgtggcgggcttcgtccgcgagggttccgcgtcccgcaagggccgccgcgtctgcggcatggccgccggccgcgcgttcccatgctgttgttcttcgctcattgcaacacctccacttgtgggtattcctccaacgatttcgtcatttcgcccagcccggttcgcgcgccgaaccagtcgagaccggggttccagaccgcctgcaccgcatgccagtcatggtcggcgccgggcacgaccagttcggtggtctgcatgccggccgcgcgcgcggccgcggcgatggtgcgcatgttggcgaccgacttccgatcccctttgccggcgccggcgaacagcgcctggccggccgtgccggtggcggcgatggcgttgaccggcacctgcccgtcgtaggccttgcggtcgccggcgaaatatcgccgaaccatcgtctcgacgctgccgtcggtcggctcgagctcaccatccaccggcagcatcgcaccgtagatgtcggggtgacgcggcaccagctgcgtggtgcaggtgccgccttgcgagaatccgcccatcgcccacatacgggccgacttggctaccggcagcgtcgccctggcccagttcaccacgtccttggtgaggtaggtttcggcgttgcctcgggtggtgtcggcgcacaggctgttgtgcatggccgaaccgttttggtcgggtgcgagcacgatcggcgccagcccgtcatgttcggcggcgtaagcgttcatcgtggcggcgatgttgccggcgtcgatgaggcggccgggactgcccggctgaccggcgagcagctccatcaccggcagggccggcgggcggtcggacagcgcggcgggcggcaggtagaccatcgccttgcgcgccttgaacttggattcggtgttcgggatgctgacgacgaacaccctgcccgagtcgggcatggatggcagagcgtccttgcgcgccttgtcgcgccactcgccgacgctcatcgaggctttgcgcacggtgaccgaaccgagcggggggtatggcgtatagccgacgagactgccgatggtctggtattcgccgtagatcgagtccacgccgagcgcggtggacgccagcaccagcggcaccagcacgacggccagcgcgcgacggcccccccgtaacgtcacggcggcggccagcacgaagccgaggcccgcgaagcctcccgcgacggtgaggatcaccggccagcccaacgatacgccgaacaccatgaacacgtcggacatcagccatgtggccagtagtccgcccgcgccggcgagcacggcggcggccagcgcggcggccagcggatgcaagtgacgacgttgcggcgtacgcaggccatgggaaataaacgtctcttccgtcgaagctgcggatgacgccgtagcagccgcgttcgtaggctggttggccggctggttatctgggtcgacgggcgattgggccgacgattcgccgcccggtgccaggccgtctgctgccgggccgcgcttcttgctcaatgccagcccaacaatcagtatgattgccgcgatcgcggtcagtccgaacacggtccacggcacgattccgcggaccagcgacaattccatgaacgttttccaaacggagttcttcatccttcgccccccgcactccaggctcctcgtcttgtaagctcacgcaacactagcgcgcgattcatagagcgtcacccaatttcacaaaaattgtcgcgagttctcatggtttccccagactccgttcagctcctgttcacatccggcctggacgtccgcagctcaaggccagtgtcagcgctggattagcggtgcgcaggcttgtcccagctttagccggaagcagggaatatgctggtggatatgactcacgcaaacgaacaacgtccagcagcgaccggcaatgtcgccgataacgtgtctgacgcccctactgaccccgcgacgagcgcgacggcaaggcccacgaccggcacggctgatggcacaacagccacaaacgccgcggccagttcaacagcaaaacccgcagccagcacctcttggaccagggaaaccaacccacgtcgagcactgttgacgattatcgtcacggtggtggttgtggtggccatcgtactggggctcggattcttcgtgaactggggattggcggccctttcggtgatcattatgattccgggggcgatttcgctggccgttctcgccaagcaccctgaatccaccggcgggcgcagcatgttcggcatctccgatccgaatacgctgcttgacccgattcgccgcccgtccgagcgccgcggcgagtaagttgctgctgcccatcgggcggtaatttacccatggggcggtaatttacccatggggcggtttgaagaaattgtgaaacggcagaataaagccattttgggataccgccccatgagggttttaccgccccatgggattattaccgccccatgagcaaagccaccccgctatttgcgcgcactgaccaagtaattaagcaccgatccgacggccaccagcagcgcgccacaccaaaacggcagcgacagcgccaaacccagcaacaccgcactggccccggtggacagcaccggcgtggcataggacgcaatagcaagccgctccatagacccatgcagaatgccatagccccagcaggcataaccaccgccaatcgccgccgcggcaatcaacacaaacagccatgcgaccagactcggcggctcggccggccacccctgcccggacgcgaagtggataatccacaacgccacggccacgcaggggaagaacaatgaagtgccgtccaccccatgactcatggctggcgtgaacaccgcgtacaccgaccaggcaagcgcgcccacgaacgccagcgcgtagggcaaaggattggtggcgatatgctgcacggccgcatgccagtcaagcccggaattgccgccgaccgccagcaccacgccggcagtggccacgatcgcacccggcaacaccttgacgaccgcgtgcttgcgatgggatacgcccgccgacagcagcaccatcatcgtgggccacagatagttgaccaggctcacttccaccgaggatgcgtcggtagaggccagacccagcgagagggatatcgacgattcgtaaaatacgaacaacaggccgccgataatcaggtatttcttggggaactcgcgaatcggggccgggcgccggaacatcagcagcaggatgccgccgaccgtgtagatcagggccgagccaagcgtggcgccgaagttttcggagacgatgcgcacggtgccggccatgaagctccacagcaggattgccatcaggccgatggtcgtggcgcgcgcggatacgacgtggccgccggaatggcttgccgccggtgccggtgtgccgcttgcgttctgtgcgccgttcgccatatgtccgcctctctcgcatcgtttcgaagtcactctacccatcggatgtgtacagcggcagaacggcacgcgaccggcgcgcgaacagggtggggttcggtgattgaaacagcaaaatgccgggtagggtaaatccctacccggcatttgcattggctatgtttcccgccgtctgtcaggttagtcggcgttgaaagcgtagggcagacggcgtgggaagcatggtttggttacgatttatctctcccccacccgcttcgcgggagccccctcgtcagagggggcgaagctactcgaagcgggacttcgggacgaatcaagtatcgtcagccctcaatcgcgatttggtgcttggactcgacttgcggctgggcctgcatcttcggaacctggatgcacagcgtgccgttccggtagctggcgtggatgtcggactccttcacgtcctcgccaacgtagaagctacgcgagcaggagcccatgtagcgttcgcgacgcagccacttgcccgaatcggacgcgcaagcacacttgctgtcggaagcctcgtcctcagcggccggagccttgtcctcatgctcgctgcaacgcgaggcggacacggtcagatagccgttgttgagctcaaggttgatatcttccttcttaaagccaggcatatcgatgtcgacgtcgtaacccttgtcggtctcgcgcacatcggtagtcatcatgttggcgggcattacggcactcatcgtgttgtccgtgttgcgccaaccctcaaagaacggatcatcgaacagatccgagaacatcgtgtcattcatcaaagccggaaacattgccataatcggtactccttgattaggagagaatcggcttggctgccggccgccaacccgtatcgcggggctagcagcggttatcgtggccggttccggaaccctcccgggctctcaacctttaaccttcacttcatccaattcccgagcgcggcaatcattccgggattatgcccacagagaaattgcggcgggaatggctgccggtaaagccggccgagccgagcgccgtgaccaccctcagccagtcttacggctgccagctcccgccagcgggagcatatatacgcacaccagtaggcgtactcatatacctctgccaacgggagcatggttgcacgttcccgcaaactccgccaacgggagcatgctggcgcgcgaacggctcacatctgctgggcgttttcgagcaaggcgtttttgaggtcggactcgatttggcgcatcttgacctgggcggcctcgcggttggccttgccttccttctggatctgcacggtctccttcagggtggcgatgagttcggcgttgatcttctccagcgtgtcgatttccaccacggaacgctggttggccttttccgcgtccactgcacccttgtgcagggcggccgcgttacgcgccagcagcttgttggtcacatcgtcggccttgttctgcaggtcgagaaccttgcgctggttggacaggcccagcgcgatcaccatctgactcttccacaccggaatcgtggtggagatggtggtgtcgatcttgtccacgatggtctggtccgcgttctggatgattttgatctgcggcgcggtctgcaaggtaaccacgctgatgcggtcgaggtcgtcgagtcgcttggcaaaacggtcgagcttggacttgaagtccttcagcacttgcgcctgcatggcgtcgccactggcggcggcctcggcctccagcgctggcagctggttggcgttgaagtcggcgagcgccttcttgccggccagtacggtcattttcagctcgcggtattgctgggcgttctgcgtgtacatcgtgtcgtacatggagatgtcggccacgagtttggcttgcgcggattggagggtggtgatgaggtgttgcatggcgtcgttgttgggcagttcggatacggccgggatctggtcgagcgtgccggccacgccgaatcggctgatcgaatcggtgccggcgaagttggccgcgcggaagccgtggcgctcccacgccagcttctgcgccgccggtgttttcaacaggttcagcagtgtgtcgcctttctcgtccaaggccatcagcgtgtgggtgctccacacggtcggcgtcgggtagacgatgaccacgtcgtccttgatctgcttgaacgcatccgtctggttcacggccaaatcaagcacatgtgatacgcgcccgaattgtccttggtcacaagtccgccgttcacgagcccgtccgccacggccttgtgcgtgtatagcacaatcggtgagttgaagacgatgtcgctttggggggccttgacgcctttcgcattgccgtattcgacggccgcgcgcgaggaggggaacatgtaatccatgcctttccggtccgcatccatcatggccagcgatccggccttgcgatagtcgatggcaatgccttgcttggcggcgagcgccttgaacttggcgtcatcgaacaggccgattttctcgccgcccaggtagccggtgatgctcacctgttcggtcggttcggccggcgctggttgcgattgccgccacaccagcgtgccgcagaccacgcccactaccgcaagcagggcgatcagtccgatgatttttgatttggagagtttcattgtgcgtccgttttctggtccgactggtgagccgggccgccagatggagtctgactgggtgcatgccgtccttcatcagcagccgaggaaggcacaggcgaaggtgcgacgtcgtcgtatccatccatgcgggccaaccgttggatggcgtcggagtcggccgtaatgcccaacgtcttggcgcttaccgcccggctgagttcgccggcggcggtctgttcgagcacttgcagcgcctcgatggtttcgattcgtaccgtggctatctgatcgcgtgcgccggaactttccacgtccacgtaggagcgcaacagtttctcggtctgctcgccgtacacggtgatgtagtggcgcaacgtcgggtaggcggaggtgtctcgggtcacgtattgcactcaatctttggtagcggcgatgaagtcgttggcttcggctttgacggctgggtcacgtacttgcttggtgagcatggcgatcgagttgagttgagcgttcgccgcgtcgatcgtatcggcggtcttctgaccgttgggcaaggcggaaaccagcattttgccgatgcgtcgctccggctcggtgagcgtggaggcggcgatatacccaagtgcggccagtaccacggccacgatcaggccgggcactccgccgccgaccagtccgaaaccgagcccggcgagcagcagtccgacaacgaatccacagattacctggagcatcagttgaagcccttgacttggcggaagacggcggcgaggtcgccggagcggccgtcgaataccttggcgttgctcagggtggcgagagacttcagctggctgggatcggcatcgccgaacagggttaagggtcaaaaagtgtgtccggaatcgcggattttcacggattgacctgtaggtttccggaaagtatatgctccggaagcatatatctagcccccgacgggaaatcctcggtgtggcagccgtgatgtgctatg

SEQ ID NO: 3458 - DNA, 20008 bp, Unknown
  R151_18m  MAG No. k141_63653
agacctatcaaaagggtgtggagattaccgatcaggccactcaggagttcctgaacgaactggatgcgctggataagcccgtcaccgtagtgttctacggcgatcacttgccgggcatctactcgtccgccagcgaggatggcaacaactccttggccctgcacctgaccgattacttcatctggtcgaataaggcttccagctcccaaggcaataaggcaagcgatgcagcctactcttcgccgaacttcttcgtggcacaggccgccgatcacatgaacgccaaggtcagcccgtatctggcgttcctgaccgaaatgcattccaagattgccgctatggaaccgcctgtggtcaacaaggtccaaggctgggatcgtattcccgaaggccagaacatctatctcgaccaaaacggcaacccgatgtccaccgatgacttcgacaaggaaaccaagcagttgcttgccgactacaagctcatccaatacgacatcaccgccggcaaaaactacctcaaagacacagattttatgacgttgccgtaaagcagacagcccggccgaaccgtaaagcggatagctcagtgggctatccgtaggtgaggggagcggctgtgccgcgacggaaaatccggaggattttcggtctgtaggcaacgtgcgagccgacaggcgagccagcaaaacgcgggcgaagcccgtccaaaattgctgtaccgttgccatagtgctgtgagctccctctgatgagggagctgtcgaacgaagtgagactgagggagagatcccacagaccaatcactcccgccttacaataaagccatgaagcgcatcgatgtgaatcatggctggcggttccgttcaattggcaaggaccgcgatacggcagcgcggcagccagtcacgctcccgcacgatgcgatgattcacgagtcgcgcgaccctcgcgggccgcacctcgcgattcatcgaacgaggacatgacggcgtggccagctggtcatgggcgggctatgagggccgcgacgccatcgtgcatgtcaccgatgaccgccgcattgtggttgatgcaggcgggcatatcgccgtcggaccttctgccgaagctgtggatgtggaggtacaagtggactctgtggccgcacaacacgacctgcctgccaatgccgaactgctcggcgtggccagcgccaatcccatcaccgtcgatgaactcgccgacaatacctgcaccacctacttcggccgagcccaagctatttggcgaataccagccgaaacgtctggtattgcctgcagcacaaacgccctcatgccatcgtcatgacggtacgataggtacagtcgatgcccggaaaaccgacccgggcatcctgcgggaaggatgtgccatggtcaatgcggatttcgctcagttgcgtcacgcctacgaatccgggtgtacgcggccattggcttggcgacgggcgcaattggatgcgctatgccgtctggtagcggacaatcgtgatgctttcgtggctgcggccatggccgatttgggcaaacccgcggcggaaaccatactgatggagctgaatctggtggccggcgaggcgcagttcgtccgcaaccggctcggactgtgggccgcgcgccatcccaaggcgatgcattggatgctgcaacccgccgccggctggacgatcgccgagcccaagggcgtggtactcatcatctcgccatggaattacccggtgctgttggctctggagccaatggccgacgcgctcgccgcaggcaacgccatctgcctgaagccctccgagctttcgcccaacacctcgcgcctcatcgccgaactcgtgccgcaatatcttgaccccgagtccgtgtgcgtggtcggaggcgggcccaaggaaaccggcgaactgctgaaatgtccgttcaaccatatcttctacaccggcggtgggcacgtcggcaaaatcgtcatgcgtgcggcggccgagcacctgacaccggtcacgttggaactcggcggcaaatcaccgtgcttcgtggaccgtacggtggatatcaatgtggccgcacgacgtatcgcatggggcaagttcaccaatgccggacagacctgcgtggcacccgactatgtgctcgccacgccggatgtggccgaggctctggccgagcgcatcgccgtagccatcaccgaattctatggcgaagatccgaaggcctcgcctgattttggtcgtattatcaacgatcgtcattttgaacgactgtgcaagctattgccggtcggcaccgtgccgtctgaggagccgagctcgccgctggtacaggtggcatcggcggtaggcgcggccatggatatggtcgggcgacgcttcaatgtcgtggctgccggacgcggaagcgcgggggagacagccggtggtggcaccggtagcgcgaacaatgcggcgaagccggcggccggttcgaatacggcagccgctgatagtgatgcgactgcctcggccgctgttgagccgagcgagattcacaaggtgcccggcgtattcgatccggccgggcgaatcgtttgcggaggcaaggtcgatcgcgccgcccgatatatcgcgcctaccgtgctatacggcacgtcaccggatgcgccggtaatgaaggaggagatcttcggcccgattctgccgatcctggtggttgaggatgccgagtccgcaatccgattcatcaacaagcggtcccggccgttggctgcatatgtgttctcgcgcgatcacgaggttcggctgactttcgaacgtcagaccagctccggagctttgggatattcgttgccgttgggtcacctgctgtccagccggctgccgttcggtggcgtgggcgcgtccggcatcgacgcctaccacggcaaagcaggcttcctcaccttcagccacgtcaaaaccgtggttaccaagccgcagttccccgacactctgcgcctcgtgtacccgcccttcaatgaagctaaggccaaactgttcaacatcatcgccaaattcagctagcgtgatatcgctcgctgatattgggtgatggcgttgtcatagtgacgttcgctgtcccggcagccacgtcaatcgattgattcgtgtaccgggccagatttttctgtcctggtatttgatttcgagtcattttctgcttaccgggacaaaactgacgccgaaagtatcgtccgcgtattacgaaaatggcggaatagtgcggttttgcatggaatggaattccaaatattcctatattcgaggtgttcaactgtcctggtttgcgaaaaagagccgaaatcagctaccgggacagaaaaatctggcccggtagccacgtcaatcgattgacatggccaccgggccaaaaatatgcggcagatgcgccgcttctgttacttcagggctttgaagccgatgtcgtggcggtagaacagtccgcgcagctcgagcttgtcgatgatcgcgtagaccttgtcctgagcggacttgatgtccggggcggaggtttcgacgagcaggacacggccggagttggcaatcagaccacccttgtcgtcggaggcgacgccggcatagtagacatgcgaatcctcgtcgacctcgatctcgggcacacgggcacccttgatgacgttctccgggtagccgttggaggcgatgaccacgccgagggtggcgttggactcatcccagatgaattcgggggtttcgccgtcgagaatggcggagatgccggcaccgaggtcggaggtgagcttcgggagcacgacttcggtttccgggtcgccgaaacgagcgttgaattcgatgaccttcggtccgtcggcggtggcgatcaggccggcgtacaggatgccggtgaacggcgtgccttcctcggccatgccttcgacggtggggcgcacgattttctcgatggcctcgtcgaccacggactgcggaatctgcggcaccgggctgtaggcacccatgccaccggtgttcgggccttcgtcgccatcgtgggcgcgcttgtgatcctgggagatcggcatcggccagaaatcagtgccgttgacgaagctcatcagggagaattcctggccgtcaaggaagtcctcgataacgaccttggcaccggcggagccgaagcgatgatcgatgaagatgtcttcaagcgcacgctgggcggtgtgctcgtccatggccacggtcacgcccttgccggcggccagaccatcggccttgatgacgatcggcgcgccatgctcgtgtacgtaagcctgagccatgtccaagtctccgaacgtcttatatttggcggtcggaatgttgtgacggtccatgagctgcttggcgaagtccttggaaccctcgatctgggcggcggccttggacgggccgaacgccttgatgccggcggcggcgaaatcgtccacgatgccttcgatcagcgggacttccgggcccacgaacacccagtcatagccattgttcttcacgaattcgataagtgcggcgtggttcgactggctcagctgcgtggtgtggatgccgtccttgagcatgcccgggttgccgggagccacggtgacttcgtcaatgctcggtgccttgagcagcgtgtaggcaatggtatgctcacgcgcaccggagccgatgaccaatactttctgacccatgtttttccttcctaaagtctttggctcccctctttgaggggagccggtatctggagctacttcagtacgatttgcgtgtcggtggtgtcggtggtgatctggccgagcacgtaggcgggttcgttgttgtcggcgagcagcttcagcgcctcgtccttgcgggcggggtcgatggccagcaccatgccgatacccatgttgaagatgttgtacatctccttgtgatcgatgttgccagccttctccagcacgtcgaaaatcgggagcaccggccaggtaccgagctcgatctcggcggccaggccgtccgggatcatgcgcgggatgttctcgatgaagccgccgccagtgatgtgggccacgcccttgaccacgcccgccttgaacagcggggagagggccttgacgtagatcttggtgggggtgagcagcacgtcgccgagctttgcgccgcccagctcggcgagctcagtgtccacggtatagccagcctgctcgaacagggccttgcgcaccagggagaagccgttggagtgcacgccggtggaaggcagaccgataagcacgtcgccctcagtgatggtggaaccgtccacaatggcggacttttcggcaacgccgaccgagaaaccggccagatcgtactcgtcctcgtcgtacatgcccggcatttcagcggtctcaccgccgaccagtgcggaaccggcctgcacgcagccgtcggccacaccggccacgacctgctcaagcagggccgggtcgttcttgccgcaagcgatgtagtcaaggaagaacagcggctcggcaccctgggcggcgatgtcgttgacgcacatggccacgcagtcgatgccgatggtgtcgtgcttgttggccagcttggcgaccatgagcttggtgcccacgccgtcggtgccagagatgagaaccggctctttgtatccaagggaagccaggtcaaacaggccgccgaagccgccgatgccgccgaccacaccggggcggttcgtgcgggctacgtgcgacttgatgcgcttgacgacttcgtacccggcttcgacgctcacgccggcgttctcatatgcttttggcatttggtggggcctttctgttctattttcaagctcccttgccggggagccacctgcaaaaagcggattttcgtttgtactaagctccccttgtcaggggagctgtcagcgaagctgactgaggggtagtcgtaaagaccaatgactgaggtgtagtcgaaggaccggccgagcctactgcacgtccggctgcacggtgttgtactcgttgccgatgtacttgctcttgtacagcgcgaattcaggcagacgcacacggtcctcgggcgtgagggacttcaggaagtcggcctcgtagtcgtcgagcgcggtggggtagtcgccgttgaagtaggcgacgcacaggccaccgtatggggcgtcggcgttcagtccgatggattcgaccagaccgtcgagcgaaaggtaggccaaggaatccgcgccgatgtattcgcggatttcctccacgctcatcttggctgcgatgagttccttggtggtggagatatcaatgccatagaagcaagggtacttcagcggcggggagctgatgcgcatatgcacttcagcggcgccggcttccttgagcagctgcacgatgcgcttggacgtggtgccgcgcacgatggaatcatcgataacgataacgcgcttgcctttaaccacgctgcgcacagcagagagcttcatacgcacaccctgctcgcgcagttcctgcgtgggctgaatgaaggtgcgagccacatactggtttttgattaggcccatttcgttgggcaggcctgctgcttccgcatagccggatgcggcggacaatgaggagttcggcacgccgataaccatatcggcctccaccggggattcggcggcgagacgtgcgcccatgcgcttgcgggcggagtgcacgttgacgccatagatatcggaatccgggcgtgcgaagtagatgtattccatcgagcagatggccagctgcgtgttgttggtgtactgcacgatcttgtagccgtgatcgttgaccaccacgatttcgcccgggcgaatattgcgcaccagctcggcgccgacgacatccagtgcgcaggtttcggaggcgagcacgtaggcgccgttcttcatcttgccgagggagagcgggcggaagccgttcgggtcgagtgcgccgatcatggcgtcttcggtcatcagcaggtaggcgaaaccgccatgcaccgtgttgagcgcttccttgagcttgtccataaaggtgcgctgcatcgaacggcgaatcaagtgcatcagcacttcggtgtcggagttcgaatggaagatggcgccttcgtcttcaagcttgcggcgcagtgacgggcagttcgtcaggttgccgttatggcacagagccacgtcgccgtcatggaagcggaagatgaacggctggatgttgtccgtggtgcccgagccggccgttgcgtaacgcacgtggccgatggcgcaattgcccttcagtcgttcgatttcgcgctcatcgccgaacacctgggtgagcaggccgagtccgcgatgaccgatgagatgaccgttatcgttggaaacgatgccggcaccttcctgaccgcgatgctgcagcgcgtgcaggccaaaataggtgagtcgtgaggcgtcggggtggccccatacgccgaagatgccacattcctcatgaatgtcttcgagttcagccgacaagccaaagctcctttttcaaacaggggattaactatctgccaaccctaccaatcggcggctacatcgcgtgttgtggggtggtggaacttgttggggttcgcggacgcggtttaagcaccagatcagttgagtatgaatagtggcttaggattttggcctttcgtcgtatgaatccggtgcttgtttttcggcttcgtctcagtgcctgaaatggctgaagaactcgatggtctcgggatcctgcgactcgtccatcacctcggcgggtgtgccgttctcggcgatgacgccgtgacggagcagtacgatgcggtcggccgcgtcgtgggcgaagctcatttcgtgcgtggccatgaggattgtggtgccttgggcctttaactcggcaaccatgttgagcacttcgccgaccagcatcggatcaagagcggatgtgatctcgtcaagcagcagcagttccgggtcggtcatcagtgcgcgcgcaatcgccacgcgctgctgctggccgccagagagctgatcagggtaggcgctggctttatcgcgcatgccgatgcgttcaagcagttccatagcgcgggtttcggcgcgatccttgctccagtggtgaaccttgattgcggcaagggtcacgttcttgagcaccgacatgtgggggaagaggttgaactgctggaacaccacgccgatacgtgcgcgaatcttgtcctgatcggcacgcgggtcggtgatatcggtattgcccagccaaatctggccgtcatcgacctgctcaagcaggttgacgcatttcatcaatgtggatttgcccgaaccggaaggccccagcaaagccaccacctcatgttggtgaatgtcaaaggaaatgccacgcagcacctgcgtgtttccaaaggatttgcgcacgtcatcaagacgcagcaccgtcttgttgctcacgggggagtcactcgcctcggtgttgatattggtcatttcgctcataccgttcctccgctgagttcgcgtttacgcagacgttccgtgtaccagtcgttcagcaggatgaacggcacgctcatcaggatgaacagcaggctggcgaccacatacggcgtgaagttgtaggtgctggccacgtcgatctgtgcggcgcgcacggcatccaccgcacccagcacggaaatcaggccgacgtccttttgcatggagatgaagtcattcatcagtgcgggcgcgactttgcgcaatgcctgaggaatgacgatcagtcgggtcgtctggccggaggtcaggcccaacgagcgggccgaggctcgctgagaaggatgtacgtcgttaaaaccggcacgcagcacctcggagacgtaggcgctgtatcccattaccactgcaatggtgccgagtaccgagggatcgatacggccgaacaagcctaggccgggaatgccgaaaccgattagatacagcacgacgataataggcacgccgcgcatcacagtcgtgtagatcaatgccaggatacgcagcgggaacagaataggggagcggctggtgcgcaccaatgcgatcagcgtgcttagaatcgccacgccgaccactgcgacgagcagaacgcggatgttgagccataggccgtcaagcacatggggaaacgatttgacgaagtattcgccggagaagaaggtctccttgactcgtggccagccgggggagagcttcaggccgatgacgatgaccacaatgaacacaatggtgctgatcagactggtaatcgtcgattgaatttgctgatgaacacgatattggcgtcgtttgagctcgacctgacttacctcgtgtccgtcaggggcattgtgctgcctggtttcggttggtgctgcggtcatgtgatgaatgtcgctcgcttcctgaatgccggaatggccgggtgtcacaggaaaatttccgcaacgcccggccaaggtgttgtgaccttatgatgtgagcctactccacttacttcttcagttcggtcaggtcggtggtgtactcggccagccacttgtcctgaagcttcttgatggtgccgtcggcgttcaggtcatccactgccttggtcacggctgcagtcagcttggaatccttcggcagcacgatgcccatgccgctcttgtcttcggagtcaggcagacggccgagcaccttggcgtccttgacctgctcggactgcaccatgtacacgcattccacggtgctggtgaccagtgcgtcgatttgaccggcgtcaagtgcctgagccagtgcggcatcatcattgaacgtctggatgtcgtccttgatgttcgccttggcgtagtcgtaggcaagggtgccgaccatgacgcccacggtcgcattcttcagatcggataccttggtggcgttggcgaacttgctgtctttcttgaccacgacggactggctgtcgttgtagtagctggacgagaagtcaacggccttcttgcgctcgtcggtgatgccgaactgctggatgttgagatcccagtccttggcgccgggagcgatggcggtgtcgaatgcggtgcgggtccacaccacgtcgctcttcttgaaaccgagcttgtcggccactgcgtaggcgacggccgcctcgtagccctcaccgctttccggcttgtcgttcataacccacggctcgtaggccggctgtccggtggcgatggtcagcttgcccggcttgtacgtctgctgggtgatgtcgttcgaatcggcggaattggatgcggtggactggccggaaccgcaggctgcggtgaacgacagagccaggatgctggcggtggacgcaatggtacggacgatgtgttgcttattgaacatgggcttcctctcctcaagtgttcgtcatgcacacggttcaaagtcgtgcttgatgcatgcgcgccaattgtatggctattgggttactacaaaacagcgatattctcggatgctggttatctccattgcttatggccggctagagccgcgcaatctggcgcgtaagcgaacgaatatctcatattggcgcagagcgaaatggcgttcactgttcgagtgtgaagccgtcgaatacgaatcccggactgaccacacaggagaccagcgcatcgccctggccaggcactgtgcgctgccagacgccagccggtacgaccgcatgtcccgatacggttacgtcggcctgatcggtggtgatgccggaacccagggtgattacggttcgcttggattcgtcggattccggagtctcgccgctgccgccgagttccagcttgaccgatgccgggccatgccacagccagacctcatccgcatcgaccttatgccaggcgctggcatctccctcgggcagcaggaagtaaatcagtgacgatagcggtcggcttgaggcctcatccgtgtgcggggattgccagtcacgcgtgtaccagccgccttcggggtgggcttccagtccaaggcgttccactatggaccgggcgtatggactcatgtctcgcaaagcgacgctcataatgagatctcctgttcttggcgggtttgctggtttttggcttcttgatatcaggtcgggtcagcggtgtcaccaggcgttgttgtaggcttcgcgcccggatatcaccgtggctcggttcgtgcctgcgccgtgcttcaccagtgtttccagcgtttcttcgatgccggccggagatgatgtgtcgacggggatgtcgaagaacgcgaaatcagccaatgcgcccgcgttgatctgtccaatgcggttgcggcccacgtgcatgcccatggaggcggcaccgcccagcgtcatcatacgaatcaggcgatgtgtcagatcgtcgctggcatagccttgttcgcgggccaggtcgtaaagcatcgacacgtcatcaagcagatcgagggtcggcgtgctggagagcgaatcggtgcccacgcttaccagattgccttcctcgaggtattcgcgcaccggtgcatctttgccggtgttggtaatgcgattcgatcgggggcacaaggccacgcccacgccgcgctgacgtagaatacgccgatcctcgccattggcccacacgccgtgtgcaatgtgcacatccgggccaagcgagccaagctgatcgacgaactggatggcggaggcacctttgcccacgtccttgagctgccggtagctttcccaatcgtggtcacgccagtcggacgccgaataagtggtgagcaccggcggataagtgccggcctcgagcggggtctccgccagatggatatgcagtcgcatgttcagctgacgagcaatgtctggaagatcaacgaacggttcggactccagcgtatacggagcatgcgggctgatgccgaggttcggcagctgctcctcgttcatccggcgcaactgccggatgagctcggtgcggcccttttccatccattcgtcgttgtgccagcccattacctcccaataagcgatgccgtgcatgccctgcgaagccagcgcgccggcggcgtccaaatcggtgacgatgtctgcggcggccgtcgttcccgattcgaccatctggcgagcaccgtcctcggcccactgcttccatggctgggtcttctgcgcctcggcgtacacctcgttgaatgccagttcccaggcgcggaaccgatcgtaggtgccttgcccgacctgcaccatgccgctgtactgcagatgagtgtgcgcgttgaccaatccgggggtgagcaccccatcccaatgccgttcacggatggtgccgtgagacgtcatttcctgcttcagcgcctccagcacccagcggcgtttacctacatgaaccacgcggtcgccatgtatggcgactgcgccatcgatgatgacggggcccgtcacggggatgatgagtttggcggaatacagtgtcacctcatcgataagctcggtatcgacggtcggccaggtgttgtcggtcatattctcctcgctgcgttgtgttcggtgccgtgcctatggctatcggtcggcgttctctcggtcgttttccgcgaatctggtcagtcgccaatcgtagccgttgtcctccacggcatggctggctcggtatccgcgcgccttgagcgcgctggcggcgatgcgctggtcggtcgctgcgtcaagtctgataagcgtgtgatccagtgtgcctcgatgttccagaagatatgcgacggcgctggcctgtacggcgaagctcagatccatgatctcgattggattgccgcctcccaccgtgtagttcacgccatcgccgtcggcgattagcgtgagcgttggtccgtcgggaacattgagttgcgcggtgtccctgttgacctgtggggtgaagtcgcttacctcgtccaaggcgatttcgttggcgatgccgccgatcactgcgagcgccgcgccctcgtgcattgcgcgcatgtgctcaagtgtgaccgtatgtctcacgccagtggcggacaccaccatatccgcgcaagggagtgcctcgtcaatgtcttgtgcggcgaagccgtcgaacaccgctttgagtgaagccactggatcgatatcgcagatggtgacttcggctccaagcgcgcgaatacgccgtgcgaagccttggccgaccgggccgtagccgatgacggtgacgttcttgccgtcgaatgcatgctcgccgagaatgcgctgcatggtggtcacgcatgtctccccagtgccgtgggcgttgtcgaatccagttttcagcacactgtcgttaacggctacgaccgggtaggtgagggctcccgcttcctgcatctgctggaacgcgcgtacgccactggtcgtttcctcggccactccaatgagattcgccgtgagctcggggcgttcgagcgaggcgaggcgggcgaagctggcaccatcgtcgatgatgatgttcggctgtatcttgtccagcaggcgcagggctgcctcgtgcgcctgttccgcggtccaggctcggctggattcgaccgtgattccttctcggcgcagctgttccgccactcggggatccgtggaatccgggccgcaatatacgccgacgattgcgccggtggccttaagcttgcgcagcagaatcgcggtttttggctccagtatcaggcagacggcaatacgaatgcctgaaaaatcgatgcgggtggtgaggtcatccatggtgtcgcgtaataccggcatgtgctgttccgcgtactccattgcctccagcccacttgccgtgcgcatgtcggcaatggaatcaatgctttgtgtaccgtcacataggaattcctcgctgtgcccgtcggtcatcgtggcatcttcgacggtcatgccccattgctgggcctgagacttgatttcggcatgcttctgcggctccggaatcgcgaggcgggctcctgccagtgatcgattcgttttctgggatcgggctgccgcccacgccgcaaaatcgctgtctgccgtaatgcttttcttcatattcccatggtacgcatgcatgtcgctgctctgccgctgcgcgtgtggtgtgggtgaagagcatgcttgggcgcgttgcgtgcgtcgatttcggcagcttcgaacaggcatgttgtatcgaacaaatgttcgaccgtattgatatgctggtcgggccggcggtggtaaggaggtgatggcgatgggcagcggaacggtatcgacgcaacgcgagcatacctatattgccattgatctcaagtccttctttgcctcggtggagtgcgcggcgcgcggactcgacccgttgaccacgcatctggtggtggccgatgaaacccgcaccgataagacaatatgtttggcggtctcaccctcgctgaagaactatggcattcccggtcgtgcgcggctattcgaggtaaaacagcgcctgaatggagtcaacatcgagcgcgcggtccatgctcccggcggccgattaatcggggagtcctgcgatgcgcgcgacctggaacgctcgccgagactcaaagcctcgatggtcatcgccaagccgcgcatggcgcactatctggaaatcagcgggcggatctacggcatctatctcaggtatgccgctcccgaacacattcatgtgtattcgattgacgaggtgttcatcgacgtcacgccatatctgcgctcgctgggtatggggccgcatgccatggcgcgaaccatcgtgcgcgaaattctcgatgaaaccggcatcaccgccactgccggcattggctccaacatgtatctggccaaagtcgccatggatatcgtcgccaagcacatgcccgccgacaaggacggcgtgcgcgtggccgaactgaatgaaatgtcatatcgtcggctgctctggagccatcgtccgctcaccgatttttggcgggttgggcgcggctatgccaggaaacttgagcacgccggtctgatgaccatgggcgatatcgcccgatgctcggtgggtcgtgcttcggattactacaacgaagacctgctatatcgcatgttcggtgtcaatgccgaactgctcatcgaccatgcgtggggctgggagccgtgcgaaatcgcggacatccgatcctatgagccggatgcgcacagcatcagcagcggtcaggtgctcaccggtcccgccgattggcatacggctcggctgatcgccaaggagatggccgatgcgctcgccctcgatctggtcgataagggggtgatgacgaatcggctgacactggcggtcggctatgacattggcagtctcgatgcttcgaagcttgattcatgcgcagaccgggcgatgaggcgtgccgccgaacgcgcggcaaagacctatcaagggccggtgaccgttgaccgtttcggtcgtcgggtgcctaagtcggccgtggggtcgattggattgggcgattttacgtcgtctgccgcacgtattcgcgaggcgatgaccatgctgtacgagcgtattgtggatgcgcggttgctggtgcgtcgactcacagttgttgccgatgatgtggccacgcccaaagaactggcggcgggcaaacgctatgagcagcttgatttgttcggtgatgatggcgatatgcgatatgactgtgatagcacggaatccggtggcgacggaagcgggcgtatgccggcttgtggggacgatgccgccgcacagacgttggctcgagagcatgatatccagcgtgcgctgctggatgtgaaacgtaaattcggccgcaacgccgtcatcaaagccatggatatggaagacggtgccaccggtcaggctcgcaaccgtcagatcggaggccatcgcgcatgaccctgcaagaaacccatgcatacgacgacatcatcaacctgccacaccaccaatcacgcaagcatccgcatatgtctcgtcaccagcgggccgcccagttcatgccgttcgcggccttgaccggatacaaccaggtcattgagcaaacagcaaaaaacgccgaaaccgccatcgcccaggccgaggcccaaggcgataccgatttcggcgcttaacaatcgctcccgttggaggaagtctcagattcgtcagcccacgtgacgcgagaaccggccggcagcggctggcccttgcgatacttgccggtcagcagaccctgcgcgagtggggagaacgtggtgataccaatgccgagcttgcggcaggtgcccatgatctcatgctcgatatagcgatcctgcaggttgtactgcggctgaaccacggtgattgggtacaggttgtagcggtcgataatgcgctggacttcctcgaggcgggccgaaccccactcttcggaaacgccgtaatacagcaccttgccctgggcgaccaggtcgctcatcgcgcgcaaggtctcggtaaggtcggtggtctcgtcaaaacggtggcaaaagtacatgtccagataatcggtctgcatgttcttcagcgtctggtcgatgctttcgaaaatgtgcttgcgggacaggccgcggtcgttcacgccttcgccggtggggaagtagaccttgctggagatgacgagttccttacgcgggtactgcttgagcacttcgccgaggaatcgttcggcggcgccgcccgagtaagcgtccgcgcagtcgaagaagttgacgccggaatcgtaggcgagcttcacggtctccttggtcacgttctcggccgctgtgcccttgagatccgtgacccagctgtccagcgcgacctcgctgatcttcagtcccgacttgccgacgctgcgatacttcatgtgtactccttgatgattaatcgtcaccgccgtctcttcatggccggccgtgaacgctaacaattcgattaaaacagttcaaccccacttgaacgcaagttggtggctaccgcgacacgccggttgtagtcccgtgaccaatttgccgcaatcagtaactgctaatatatgagtaattattggctttttaggcataaattgctaatatattagtatgttttctttgttggatgagcctatgcctgggggtgtttcggccgctattgccgaacgcatggttgccagacgcaaagagcataagttgtcgcaaacggctctggctagaaaatccggtgtgagtcttggctcaatcagacggttcgagcagcagcacgaaatctcattgacggcgctcatcaatatcgcgtttgcgctgagttgcgagcaggattttgagacactgttttcacagccgtactatgcaactatcgatgatgtcattgctgcgcgggagagggaagcgcgatgagcgagacagtgccgttggatttatcggttgatcgggtacgggtgtttttggatggtgaaattgttggctcgctgacactgtcgccggcaaaaacagtggcgttctcgtacgaaagctcgtggttgtccagtggattcagcataagtccgctgagtctgccattgcgtgagggggtctttgtcgccaaaagagatccattgcatggtttgtttggggcgttcgatgacagtatgccggacgggtgggggcgtttgctcacggatcgtcttctgcgtcagagaggaatagacccttactctatcggaaccttgacgaggctgtccattgtgggatcaagcggtatgggagccttggaatatgaaccagcggcggacattgaaaatggtgttgcagctactgacttggacgatatagcgagagagtgcgcgaatcttctggaaactgatttttctgaggatttggatcagctttttgcccttggtggctcgtccggtggcgcgcggccgaaaattctgactgaggttgatggagaagaatggattatcaaattcccctcatccgtagactcggcgaatatcggagaacaggagtatcaaatttctgtacttgcgcgcgagtgcggcattgatatgccggaaactcgtctgttcgcatcagcgcaatgttctggatattttggtgtccggcggtttgaccgtacgcgggatgacgatggcaccgaacataaggtgcatatgatttccgccggcggattgctggaaacgtcgcatcgtattcccaatttggattacggactattgatgcggctgactatgcgtgtgtgcaacagcgcagaggagtgcgagcggttgtaccgtctcatgtgctttaacgtgttcatcggaaaccgcgacgatcatgcgaagaatttctcttatctctatgatcgttctcgccaagcgtggagattgtcgcctggatatgatttaacggaaaaccctggaatcaacggcgagcacactacttcggtgaacggaaaggggaagaacatcactgttgcggatttgactggtgtcggtgtgaaggctggtatttcgcgggcgcgctgtattgctattgccaatgagatgcaagataggattcgtgatgctgggtttgccgtccgagattgatggtctcgccatacttagtttttccaatacgcattctctagtacgtttgccttttgaaaagcttcgcgataggcggtgataaggtccggcaaacgcattgaggcgttggctgggctggtggagggcagttgggtcatgccgatggcgataccggcttcggtcaggcgcggctcgataagtttgcggtaaagttgcgctgatttcgcgccggttgtgaagatgtgggcgattggagctccgcgcaagattggtgtcaagtcgttgggcgcggcattgcggatgctggcatcgctggctccggtgatatcgcaagaagcaatgacatcccataacgcaatgtggtggcgcagagcaaacgcacgacgggactcaggtgaatcgccgacggcgtcggcaggatcagcggagttggcaaacagcgcctgcatcaccggccaaaaccggttctgcggatgcatatagtaaaacgccgccgctcgggatttcggactcggcatcgatcccaaaatcaaagcccgggactcaccatcccacaccggcccaaacccatgctccacatgttcgctcatggtttccattctaagtcgggcgattgagcgcacgaggcaatcaggccgagaactgtttgccgaattccgagaagagctgacggcgggcgaagacgagcaggccgagcagcaccagcagggagaccagcccgctgaccatcaccagcacatcccacggagcccagccgagcggaatgaacgtcagaggcagcagaccggcgacgatgtcgaacgccagatacttggcgtactggtcaatggccttggcccgcagcacgataagcagcaccacgtcaaagaccagcgaaaccagacacgtgatcggtatgacgaacatggtgacgacatgattcatcgtcgccacaaaccagaccagcgcaatcgccagcatgatatagaaatatcgaaacatgaggcgaagcggccgcggcgcgtgcagaatcgcactgttgatgaacagcacgctgatgatcagcgcggccgccgatgcactggcaatcggtatcggccacgaaaacagatagctgaagaagccatgcagcagcagaatcgcgccggttacaaacgtgatgatctccaccgccaaacgcctcggacgcagatagatctgctgcgcggggaatgcggcgggagaggcctcgccgtgcaattcgttctgacagagtgggcaacgggccatatcgccggtgaaatcgacgttgcaggcatcgcaatgcttcatgccgacgctcctttctccacatgcgcgccggcgatgttcatacggccgctgatgccctgcgcggcgagaatccgacacaggttcttgatgacgttcagatcatggtagacggtggagatgccgatgctcaggtcgtcgccaaacgagcagaccgtgaaattcaggctggccggtgtggtgaggaagctcaccgaacgcacatggctcgcgagtcgttcgtccaaggtgactcggccaaggttcgagacggtggtcgtggtctcgcggtcggcgatgaaccgggccagctccagcacccagtccttggcaggggagggcgcgagacgcagcgccggattcttttccagcgcaat

SEQ ID NO: 3459 - DNA, 27617 bp, Unknown
  R151_18m  MAG No. k141_64267
caggccatcgacacggttctggccacgttgcgcgcgcaacgtgaggccagcgagccgatcgacatgctggtgaccaactatgtgtatgacaaagtgaccaagcgccacaagatcgtggtgaacttccgtcatgtgatggaggccggccgcgtgctcggctgggatgacctgggcaagttcggtctggcgcagtacatcatcatgcatgcgctcactttccgcgcgcaggtggtgcgcgattccgggctgaagctgccggagcatacgttctacgtcgatttctattactcgtaccagccgttcccgtgggtgaagcgcatccagtatctcgacgtgccgttctaccactacttcatcgggcgcgagggtcagagcgtgcagaccgacgtgatgattaagcgtgtggatcagctgcggctcgtcaatcggctgatgaccgaggccacgcccgaacgtggtacggtgccggaggggctgtaccggtatatgattcacttcctgacgatcgaatcatgcgttacctcggcgttcctgattctctcgcgcgatccggccaactacgttaagaaaaccgagctgtgggatgcgattgacgcccattctccggccatcggcaaggatgtgcgctcgaagctgatgtcccgcgcgctcaatctgcctggtaaaaccggccgctggatcgtgcgcaacggctatctcatcgccgaacgcatcgtcggcttcaactgattcggattgcggctttgccctgctgacgcgttatcagcagggcatccctattacctccccagccgaggtcttgctactcggcccaacggtcggacattgcgaagctgttgtgcatcaggttgctggaggtgtatagcacgtcgttcagcagcttggttgtatgctcgcgcaggtagtcggccatctcgtcgttggccgcttcgagcacatccgccacgccctgcacatccttctcatcgccgtggccgccatcgagcggccatgcattcgtacccgtcgattcggcatcgcttcgagcaagcaactgctcatccgtgcgctcgatgagccggtgcccgaacgcgcgcacgccttccgcatagccctcgatgaaccggttcgtctcataccaatgcgcgtcggccacgacggcgatcaggcggttcgtccaatacaggttgccggtggagacttcgggcgtggtgtcgcgcaggtaggcaggcgtgtcgttgacgttcgcgtagaacggcgcggcggcggtgaacggaccggagccgaaagatacccacatcaccgtgcgattggccgccggcacatacgggcggacctgaatcgccaccatatggccggtgcggttcacgccgatcggacggtaacggtggcgcgattccgccgtgccggtcgtgccgtacgggtcgtacggcgtgccttcgaagtgcgaggacagcaggaaatcaacgtcttcgaggctcaccttgtcttccggcacgcggcaccacgggatgtcgtcggattcgggcgtgtagcgggcggccggcgaatcccagtcctcgctggggttgaggcggcgttgcatgtaccaggcacgcggcgtgttgtagatatggtccttcggcgtcgcggtgccgaaagccttgcgcgggttgaagcgggtgggaagggcaacggttgttccgaatccggcgctatgcacgtgacggccgttggaagagaccgacgttcccattgtgcggtcaaggtgatgcgtggccatgaactcgcgcaggtcggcgctgcataggtattcgcgctgctcgccgaacgcatcggcgaggtcgaagtcgtcgatgccgagctggttggggatcgtggcatagcagtcgtcgggcactcggcgggcgatccaatgatggccgccgatggtctcgacgtaccagatctcgtccgcatccgaaataatcacgccgttcgattcgtaggtgccgtaggtttcgagcagttcgcccaaccgcgcgacgccctcgcgcgcggtggtgacgtacggcagcacaagggtgatgatgtcttcctcaccgataccgccgggctgctcggcctgataatcggtgctgtccggcccgccgacagccggccgcaactcgaccatcgggtccgcaccgagcacgcgctcgttgacagcgatggtttcggtggcgctcatcgccacgttgtgttcgttggcaccggcttcggccagaatgccacgattattcagcacgttcggtgcgatggtgtaccggcaaggattgtccggtagttcgatttcgacatggctcagcacgctgcggtagtggcgcggctggtcgtcgggggcgacggcgacgaagcgcttgggatcgtaacggcccgagcccgaatcgtcatcgcgggcgatgatggtggaaccgtcgtaactggcatttttgccgacaagaatcgtggtgcatgacatggggcaccactctaggagccaggctggtcgaaacaaaaaatccttggaaccattgcgattccaaggatttgttgtgccccctgtgggattcgaacccacaacccacgacttaaaaggacgctgctctaaccgttgagctaaaggggcaactcttctaaaatacacaccgttttgggatatttcaactacggcgttgcgtacacgtttgcgtacgcgattggcccaacgcacggcacagcacacgcaatgtggcccaaatcgcagcccaaatcgcatatcgcctttagcgatagatagccgccggcggctacccttgtacattatgagtgaatcccccaattggagcaatcccctgcgcgactcgcgcgacctcagactgccccgtatcgccggcccgtgcagcctcgtcattttcggtgtcacgggcgatctggcacaaaagaaactgctgccggccgtctacgacctggcgaaccgtggcctactgccgccgagcttcggcctgaccggcttcgcccgccgagactggacacaggagcggttcatcgaattcgtcaaggccgccgtccgggcgcattgccgtacgccgttcaaggagtcgacttggcgcaatctggccgccggcatccgcttcgtgcagggtacgttcgacgatccggaggccttcgagcgtctgagcgccaccgtgcaggagcttgaccgcgaccgcggcacgcagggtaaccatgccttctacatgtcggtgccgccgcgcgccttcccgcaggttgccaagcagttggccgcctccggcctgtcgcgctcgtccgagggcgcatggcgccgcgtgatcatcgagaagccgttcggccatgatctggccagcgccaaggaactcgacagcgtggtatccgaagtgttcgacccgagctccgtgttccgcatcgaccactacctcggcaaggaaaccgtgcagaacctgctggccctgcgtttcgccaacgccatgtacgagccgatctggaacgccaactatgtggaccacgtgcagatcacgatggccgaggacatcggcatcggcggccgcgccggctattacgacggcatcggcgccgcacgcgacgtcatccagaaccacctgcttcagctcatggctctgaccgccatggaggagccggtgagcttcaccgccaaggacctgaccgccgaaaagaccaaggtgctttccgccgtgcgcctgcccaaggacctcgccgccaacaccgcgcgcggtcagtacgccaagggctggcagggctcgcacgaagtggtcggctacttggaagaaaaaggcatcgaccccaagagcaccactgaaacgtacgccgccatccgcctcgatatcgacacccgccgctgggctggcgtgccgttctacctgcgttgcggcaagcgcctcggcaagcgtgtaaccgaaatcgccgtggcgttcaagcgcgccccgcatctgccgttcgagcagaccgccgtgcgcgaactcggcaagaacgccatcgtgattcgcgtgcagcccgacgagggcgttaccatgcgcttcggagccaaggtgccgggcggctccaccatggaggtccgtgacgtgaacatggacttcagctacggccgctccttcaccgagaactcgccggaagcctatgagcgactgattctggacgtgctgctcggtgatccgccgttgttcccgaccaccgaagaggtgaacctcagctgggagatcctcgatccgattgaacaattctggtccacgcttggccagccgcaggcctaccgcgccggtacgtggggtccggcacaggccgacgaaatgctggcgcgcgacggccgccactggaggatgccatgatcatcgatatgccgaacacccgcacccgcgagattgcgcacaaaatcgaacagctgcacgaggagcgcggcgaatcggcgaccggccgcgtgctgacgctactcatcgccaccgaggacgcggacctagagcatgcgctggaaatcgcgaactcggccagccgtgagcacccgtgccgcgtgattgccgtagtaccggataccaatcctgccgatcagtccggcgaaggcgaaccgaacgagaccgaagtggccgccgaggtgagcgcgaatcgcgataatccggccgtcgatttgaccgacggcccgaacgatccgaacgattccaacctgaacgcccaagtgcgattcggcgcggacgccggtgccggtgagattatcatcttgcgtccgcgcggtggccttatcaaccacccggatacgctggttatcccgctgcttgtgccggatgcgcctgtagtggcgtggtggccgaccacaccgccgtcgaacccggccaaggatctgatgggtgcgatggcccgcagtcgcatcaccgacgcgctgcactccaataatccggaggccacgatcgagcgtttgcgccgcaattggacaccggaagacatcgacttgtcctggacacgactgaccgtctggcgcgcaatgctcgcctcgatgctcgatcagccgccgcacctgcccatcaccgccgtgaaggtgaccggcaaggccgacttcctgcctctggaaatgctgtgcgcatggctgcgtctgaaactcggcgtaccagtcgaaactgagttcgtgcccgacgcgcaggccgtgaccggcgtgtacctgacccgtgaggacggtgtgatctcactggaacgcccgtatgaggaccaagcgctgatctcgctgcccggccagactccgcaggaagtgtccgtgccgatgcgcaccatcgaggactgtctgaccgaggaactgcgccgcatcgatcccgatgagatctacgccgaggtcatcaacgaaggctgggatctgattcgtcactgaagtcggtagaaccgttgccacagcggcgttggcatgagttcggcaattgtggtcgagccatgccaacgccgttgctcatcgtttcctacctcatgcgatgccgaagctcatgaccgcggagtaataaagtgacatatgcgatgtcgcacaatgtacattgtgttgtcaactgacaacacatttcattgctgcaaatggctggattcccggcatgccacccgtattatgcgttgtcaactgacaacacaatccacattgcaaagtacgacacataccccatataaggaccatacatggcaactcgaaaactcattgtgtatccgaataaagatctgatgattcaggctggcgcgcaacgttttgtcttggcgctactcgatttgctcgccgaacgattgcctgatggcacgcatcgcacacgtgtggatgtggcgctgtctggcggttcggccgcacagccgttgggtttggcgctgcacgatccactggctgatgcggttgattggtcgcgcgtgcatttctggtggagcgacgaacgttttgtgccggcttacgacaccgatcgcaatgctctggaggcccgtcgcctgctgcttgaccagctggtggcggatggcaagctgcctgaatcgaatattcatgagatggcggccgatacccgttcagccgatgacatcgccgatgtgatggatcaggccgatagtgatgacgcttccgttcgcgccgccgccgatgccgcgaatgatgcgctgctggacgatgccgcgagcgactatgagcgcgagttggtgaatgaattggggccggaaccggtcatcgatctgatgattctcggcatgggaccggacggtcactatgcgtcgctgttcccgggtcatgatgaggtcaaggttaccgataggctcaccgtgggtgtgaaccactcccccaagatgccgccgttgcgcgtctcgttgaccgcgccgctgattgcccgctcgcgccgtacatggttcttcgccgccggtgccggcaaagccgaatcgctggcccatgtcttcgagcggcccaacaacccggattacccgtcctcctacgccaacggagtggacgagttcacctggttctccaccgaagaaaccgtcaccgagttgtgatggcgcctcctgtgggccggaccctgaatgaggggcccggcccacagattgtcgcagacgctcaagcctgctgttcctcgggctggccttcctgcgcccagagggtgtggaacacgccgggcttgtcgacgcggccgtaggtgtgggcaccgaagaagtcacgctgggactgggtcagggcggtgggcagacgcttggagcgcagaccatcgtagtacgccagggagctggagaacaccggggtcgggataccggcctccacggcacgcacgattacacgacgccatgcatcctgcgattcgccgatgatcttctcgaagtacggatcgaacaacagggaagccggcaaattatcgcccttgaaggcctcggtgatgcggtcgagcaggaactgggcgcgaataatgcagccgccacgccaaatgcgggccacttcggacaggttgatatcccagccgtattccttagcaccgtcctgaatctcgttcaggccctgagcataggccacgaccttggaagcgaacagggccttgcgcacgtcctcgacgaacgcggccttgtcttctccggccagatcgatggtcttgttcgggccagccagaccttctttctgagcgtcttcacgcagctcaccgtgcgaagacagtgcacgagtgaacacggcttcaccgatagcagccacaggagaaccaaattccagaccagcctgcacggtccaagtaccagtacccttcatgccggcatgatccacgaccacgtccacgaacggcttgccggtctcggcatccttgtggtgcagaatctcagcggtgatctcgatcaggtaggagtcaaggtcgcccttgttccattcagcgaacacgtcgccaatctcctcggtatccatgccgagtccacggcgcagaatgtcatacgcctcaccaatcacctgcatatcggcatactcgatgccgttgtgcaccatcttgacaaagtgaccggcaccatcggtgccgatgtgggtcacgcacggttcgccgttcaccttggcggcgatggactgaagaatcgggcccaaggtcttccaggattccgcagtgccaccaggcatcagagacgggccgttgagcgcgccttcctcaccaccggacacgccgcaacccacgaagtggaagcccttggcacgtacttccttctcacgcttgatggtgtccttgaagaaggagttgccaccgtcgacgatgatgtcgcccggttcgaacacctcttccagctgcgcgatagttgcgtcggtcggagcaccggccttgaccatgatgatggcggtacgcggacgcttcagggacgcggcgaattcctcgagcgtttcggccggcacgaagttgccttcggcgccatgctcgttcatgagcttctcggtacgcgagtagtgacggttgaacaacgccaccgtgttgccatggtgcgccagattacgcgccagattggagcccatcgtggccagtccaatcacaccaatgtttgctgtagcttcggccatgtgccttgcctttcgtttgattgtcccatcgtcatcacgcgcgtcacaaaacagcgcatcagcggagggaatcattccttcaacgctcgaaagtgtatcccacttaccacccacacgcgaaggctgtcttaggttctacgcaccttctgcccgcgaagcgtaattacttgccagccattcacatacgcccggccttggaagggtcgatatgcatggtctggaagcgattggccatgtaagcgtcgctgtagcgttcgctgaaccacatcgcgaccggtgaatcctgcggctggccggccatgcgcccataccagcaatccaaggccatcagcgtgaaggcaatgtcgatcaccatcagcaccgtgcataccgcagtcagcgaataccgtactttccatggaatgcgattaatcagagccagcagtcgcggcaacagccacttgacccacaccacaccaatcagtccccagaagaacatgaacaggcccgaggtgcgtccgtcgatggacagccaacggccggtgtaatcccacgcggtaataccgaacgccacttccatgaaccagctggtgcagtattcgaacgcgccgccgatcaccgccgaagcgcagaagatcaagaacggattcgccttccacaggcgattcaggcacacggttaccaataccgcaccacagccgtaaatcggcgagaacgggccccacagcaaacccgcgcggtcctgaagttcaccgttatacagcgccatatggtagatcgtctccataatcaggccacccaccgaagcgatggtaaacagccagaagatattgaagaagtccagtgcaatatagcccttgccggattggtcgcggcccagcatgccggccgccaccgccgattcataatcatcgcgatcgtccatgcgtttgagcgcgcgctgcaaacggcgttcctcgctcagggagggatcggcggtcaccgaaatcacgacgagaataatcatctgaatcagcggcagcagcaggttgaagccaaggccggtcagggccagcgacagcatgccgtcggccaacgtcaacggcatcagcacgtaggtccagcgcgcggcataccggcgatgattgcgcagcagcatcacgccgaacacaatcaggcatgcggcactgactaccagcaccaccgcatgaatcgcggacaggatgaaagtcaggctcatcgcatcgacgtgcacatgaccatccagaatctcgcgcacggcatagaggatggaaatcaccataatcggcaatgtggcgagtccgtccagcagcacgaccgcgccatagatgcgcgccagaatcggtaaccgcttggcgttcaggttcaagccggcgtcgtccagttcgacggccaccagatcagccacgactgcggactcggcgtcacggttctcccgcggcttgccaggggtagtggccgtgccatcgtccttgaattcaaccatggtttcctccccacatagcgtccccttacactatcacccgattgcagttttgccgaacttgatgggcagccggtacatgtctgtctacattgccggacaccgagcccgctatcgctttcaggaaacatccaaaaaccatccagaaatcttgtcaataagttccagaacgcctttcgctccagccaaggcactgacggccagtccgcaccggcagcagctccggcacaggttctgatacttccggtaactccaactccgaccagtcatccagccagaacgagcagtcggccattgatggccaatccggcaccatcgaaagctgatacaacggtttacccatggggcggtagctctctcatgaggcggtaattaccccatggggcggttagcccaaaaccgcattccgcggaataaagccattttaagccaccgccccatgggcattttaccgccccatgggccacttaccacccaatgaaggttttaccgccccatggagggcagcctcacaccaacacacacagcacacccggccacacagcaccccagccacaaaaaattaggcacactgcccagcgacacacgataagccgctgggcagcggcgttattccgccaaaaccatcatcaatcaccccaataatctccggcagccgtattacgctactacaaccgtagcgctacgattaacgtatcgctacggaaaacgtagcaaccaagcaacaccaagctccggaggtatcagtgggcaatatcttcaaggtcctcaaacgcgacttcctgcgcctgttcaaggtgccggccgcatgggtgatcctgttcggcatggtgtttatcccgccactgtattcgtggtacaacatcgtcggcttctgggacccgtacggcaataccaaaggcatcaccgtcgccatcgccaacaatgacgacggcaccgacaacgcgctcatcggcaagcaaaacctcggcgatcaaatcgtcaagcagctgaaaagcaacgaccagctcggctggaccttcgtcaccgaagccgaggccatggaccaggtggaatccggcaaggcatacgcagccatcatcatccccaaagacttttccgacgatctcgccggcgtggtgaccggcggcaagagtcggcccactctggagtattacgtcaacgaaaaagccagcgccatcgcccccaaagtcaccgacgtaggcgcgtccactgtggaccgcacggtcaattccacattcgtctccaccgtatccgaagtacttaccgaagtcatcaatacggttggcggcaaagccatcagcaccgaagacaccaccaaagccaaggccctcacggcccttgccgaggcctccggcgacgtgcagcacacacgcagcaccatcgccaagctcaccaccaaactcaccgataccccggagcagacacgcaccgcacgtcaggcgctggacgacgcgcgcgcacttggcatcgacaccgcggaaggcctggccggcgtctccaccctgatcggcactacccaagccagtctgaacggcttcgtcacctccacgtccgaagcgcttgaccaaggctcaagcctgctgagccaggccgcagcacaggccaaccaaagcgtgggcacggtagccggaaccatcagcgccgccaatcagcaggtagacggactgatcaatacggcggaagacatcaaccaagcgaacgccgacatcatcgaccaactcaaagggctgccgaacgccgatcgagaaccgctgcaatccgccattgccacactggaaagccacaatagcgagcttgccggcgcactgggcaacctcgatagcctgaacaccactatcggcaacgcctccacagacaccgccggattggcgcagcatctcaataccgccacccaaaccacggtgcgcgaggccaataccgctcgcggcaccatcacctccggcgccattcctcagctcaacaccggcctcaacaccctcagctcgaccgccaacactctgtcgaccggcatcacgtcgcaaggctcactcatcgatcagtcgaagagcaccctcgatcaactcgacaaagccgcctccaccacggtgaccgccctgcacgacaccgataaggcgctggccggcatgcaaaccaagctcgatacgctgaccaccgacatcaaagccctgagcatctccagttcactcagttccctgatcggcaccgacggcaaactggatgccgccacaatcgccgacttcatgctctcccccactgttatcagcgaacgggccgtctacccggtcgcctcctatggttccggcatggcaccgctgttcaccaccctgtctttgtgggtgggcgcgttcgtgctcgtggtcattcccaaactcgaaaccgacgacgagggcatcgacgatctcacgccaacccaaggctatctcggccgtttcctgctgctggccacgctggccgccgtccaaggcctggtcacggccatcggcgatcttgtcatcggcattcaatgcgcgagcgccccggtgtttctgctcacctgcgtcatcacctcactggtgtatatgtcggtgattttcgccctctccaccacgttcatgcacgtgggcaaaggcgtgtgcgtggcgctggtcattctgcaggtgccgggcgcctccggcctgtacccgattgaaatgatgcccgcgttcttccgcgccatctatccgctgctgccgttcacctattcgattgacgcaatgcgtgaaaccatcggcggcttctacgacggcctctggttcgcctatatcggcaaattgctggttttcgcggttctggcctttgtgcttggcctcggcgcccggccgaaactggccaatctcaaccgcctgttcgcgcgggaaatcaaggaaagcgacatgattatcggcgagccggtgcacctgcctggcagcgaataccgtgtcactcaggccattgcggcactggccgaccgcgacgaataccgtcatgccatcgaacgtcgggccgccaaattcgcctaccagtatccccggctgctgctgggtgcgcttatcgccggattcatggtgccggccgcgctcattatcgtgtttgtgctgaccaccagcgagaaaatcgtggtcatgggcacatggctggcatgggtgctcatcatcatgggcttcctgatggtcgtggaattcatgcgcgattccatccgccgccaaaccgagctcggcaacctctccgacgagtcgatccgcgccatgctgtacgggcataaggccaagcgtcgcgacacctccgccgaacgccacgaagaagcggacccgagcgccgccgttaccgcaatcatccccactattccgccgaccaaggaaggcaggcacgcacgatgaacaccatgtggaaactatttaccggcgacatcaaacgcctgaccagcaacgtggtctccatcatcatcgtgatcggcttggtaatgattcccggcctgttcacctggttcaacgtggccgcatgctgggacccgttctcgaatatgaagaacctgaaattcgcggtggcgaatgtggatgaggggtatcgttccgacctgatcccggtgaaagtcacggtcggtgatcaggtggtgaacgcgctgcgcgccaacagtcagctcgattggacgatcacgtccaaagccgatgccgtcgagggcgcacgatccggcaaatactacgcggccatcgtaattccgaagtcattcagcaaagacatgatgaccttcttctccgacgatgtgcagcatgccgaactgacctattaccgcaacgagaagaagaacgcgctggcaccgaatctgctcaacgagggcacggacgaggtggcggcggaaatcaacaccacgttcgccaagaccatcacttcggcagggctggaaatcgcgtcttcgctggccgatcagctgtccaagcccgaagccaaagagcaactgaataccttcaacgccaatatcgccgatttcgccacacggcttgacgatacggcggatttgcttggcacatacagcgcattgaccgatacggccggcgccttgcttgacacctcgaactcgctgatcactcaggtttcctctgccgccaaacaaggaggcaaggatctcgccagcgccaagcagggagtcaccgacgtggtcggagccctgggcaccaccgctgacgcgatgagcagctcactggacgcgagcgcctccagtttcggcgcggtgtccgattccatagacaagctgtattccgacgcgaatgatggtgccaccacggccgccgacgaattggaccgtcaagccacggccattggcaagcagacggagaaatacactgaaattcgcaacacgttggccggcatactgggcaacgactcatccatcatcacggcgattgaccgttcaatcgcacggcagaacaggctgcggcaagcgctgaatacggcggcgaccgatattcgccaaggtaatcaggacgcgcaggatcagcatgcgcaggtcaaggatctggccgatcaagcgcagaacagtatcgccaatatcaagtcggatttcacggccacggtgaaaccgcaaatcgactccctgtcgtccaccgtctctgacgcctccggcatactgagttccggcgccacccagttggactccacgctcggcgacctgaaaaggacttccgacgacgccagcgatatgctcagcgacgctcgcaccaccttgggcaaggtgtccggcaaactgcgttccgccggtgccgaactggcttcgttcaacagcacactgagcgacgcactaaacagtggcgatatgagcatggtcaaagaggtgctgggcaatgatcccgaaacgctggccagtacgttggccgcgccggtgcagctcaggcgcaaggccgtattcccggtggcgaatttcggttcgtcgatggcgccgttctacacgctgctgccgttgtgggtgggcgcgctgctgatggtggtgacgctgaaaaccaccgtgtctcgccggacacgcaaagcattgggcgatccacggccgcatcggctcttccttgggcattacggggtgttcgcgctgattgcgctgctgcaatccacggtgtcgctcggcggcgatctgctgttcctgcgcgtgcaggccgtgcatccgctgctgtttatgttgtccggatggctggcctcgctggtgttctcgttcttcacctatacgatggtggtgagtttcggcaatgtgggtaaggcaatcggcgtgcttatgctcatcgtgcagatttcgggtgcgaacgctgcctacccggtgcagatgttgcccgacttcatcgccaaagtcagtccgttcttgccgctcacccatgcggtgacgatgatgcgtgcggccatcgccggcatctacgacatggattactggcgggccgccggaatgctgctggcattcgtgccgccgctactgttgcttggactgttgctcaggaagccactggtgcggttcaaccagtggtatgcggccaaagtcgagagcactaaagtgctgggctagtaggtattatccgggggttgcctacaaacggcatggacttaccaccctcagtctggctttgccagtcagctcccgccaacgggagcgtacgggagcatatttcgaagagaagagatgacggagatgacaggtacgacggcgacaccgcgcggtgagcgcacgcgcgaggcgacggatcgcaagctcatgcgagccacgctgcagattgcggtggaccgcggcatcagcggcgtgaccatcgaggaggtggcccggcgctccggcgtggccaaaaccacgatttaccgtcgataccataatgccgacgagctgctgcgcgagatcagcgcgatgtatctggccatcccggattccgacccagtgcccagccccacgcgtgagcatttcacgcaactattgcagcgattggtcgattgggtgcgcgacaacgacatcgacgtcaagcgcgtgggcattgtattgtccagcgaggccgagttcttccagcacatcgtcgaccaggtggtgaccccgtggctggagcatgtgggggcgttcctcaagcagggagtcgcgcagggcgtgtttcgcgaggacgttgacgagaagttgctgttgtccacgattatcgggtctttggtggcgtatgaggccatcgagggcaaagcgatggacgacgacaccgcctgggcctcgcgcatggccgatctgctgtggccagcattgctgaagtagcggtcttactcctgaatcgaagcctcctggcgggcgacttcgagggctttgttgaaggcgtcggaggtccagctggcaccggcgaccttgtccactttgagtcccttcaggggcttgccgtccactacgccgttgatggctttggcgaagtcgtcctgatggttcttggaaatcgtggtgaacgggtgcccaatgattttgacggtctcgacgttgccgtccttgatggtcagatggacgtcgatggaatcctcgccgaccgggccgtactggccgttgatcgagtagttgccgtccttgtagttgccggtgtccttcttgtcggacgtggtggtggacgggtcgttgtgcgatgagccggaatcggagccgtcggagctatcggagccgttcgactgggattgcgactgctcttcctgcgacttctcggtctcgcccgagttgccggcgtacgcatcgtccatcggcgtggccttggattcgccgcacccggccagcagcgcgccagccacgaccagtccggccgccgccaatgtcgcggatttcttcaacgtattcttttcggtcatattcacgctccttaagccccctctgacgagggggctgtcagcgaagctgactgggggagagaccatcagcttgccatgtattcctcacatactgctcgatgcccctgacggccctactcctcgccgccggttttcgcggccttggtggggtcagcgaaaccaatggcggtctcgccgttctgcgcgccctcgacctgtgcacccgtggaggcgggcttgccgccggccgcctcgtaggccttgcgcgcatcctcgtcattccacttctcaccgacgagcacgccatggttgagcatgatctcgcgctgcgcgcagctggcgacaagcgcatcgtgggtgaccacgataatcgtggtgccctgctcgtgcagcttgcggaacaggtcgagcacgattttctcgttcttctcgtcgaggttgccggtgggctcatcggccagaatcagcttcgggtcgttgatcagcgcgcgggccacgcacacgcgctgctgctcgccgccggagagctggccgggcaggtggtgggcgcggtccttcaggccgaccttttccagcgcctccatggcctgcttctcatcgaccaccgaatggtagtactgggccaccatcacgttttccacggcggtcaggtgcggcaccagatagaacttctggaacaccagtccgatgaggttcttgcgcacgtcggccagctgcgtggcgttcaggtcctccagcttgcggccttccagcttcacggagcccttggagggcgtgtccatgcagccgatcatgttcatcagcgtggtcttgcctgagccggaggagccgacgatggcgagccattcgccttccggcacggtcaggttgaggtcgtccacggcatgcaggtcgccgtagatcttcgagatgtggtcgagttcaagtagcatgacgtttctctttctttattcttcgcgaagcacgacggcggggtcgatgcgggtggcgcggtggacgggcgggatggaggcgacgatggcgaccagcgcgctgaacagcacggagatcagcgccagccaccagttgaatccgatggagcgttcgaacaccgtcacgcacagccaactggcgagtccgtagccgattgcggtgccgataagaccgccgatcaggccgtagagcgatgattcgatgtagaactcggtgccgatggcgcgcgagctggcaccgagggccttgcgcaggccgatctcgttgcgtcgctgcgagacgatcgagctgattgtggtgccgacgccgacgagcgtcagcaccagcaccaccaacgagacgatccagaacagcgtctgcagcatggtgatgatgcgggtgtcggaggcggtgatcttggtgacctgctgcgccttgacgtgcatggaggtcatgtcgttgatgctggacaccaggcctgcgaggtcgctggagccggccgaatactcgatgacgtccacgccgcgcgtgatgccggtgagcttgttgacgtcggcgttggtggcgtagatgatcgagtcttcgctgccgccggtgtccacgatgccggccacgcggaattcggtgccggaggtgtccatgatgtcgctggagacgcggccgtctttggtttgctggtcgatcgaggagtttgacgaagtgccgttggtgctggcgttatcggatgcacggtagccgatggtgatggcggagccgattctcagaccgatggcgtcggcgatgtcacgtccgaccagcaccttgccgtcggtcggccacgagccgtcgaccacccagtgatggttgaggttcttgacctgcgccgcattcacgccggccatcacgtacggcgaggcgttgacgcgcacgttctcgtagcggtaagtggcgtatttcgcggaacccttggccttgaccatttcagtggtgtgctgcaccatcgccttgtcgatgccggccttgccgtcggcattggtcgattcggtgggtgtgacaatcaggttcgcgccgtacgcacgcatctcctcgttcatctgctgcggcacggcgaggcagatcatcgccaggcagaacagtgtggccgcgccgaccagcgacgccaccacggccatcaccgcgcgcgaacgccggcggaacacggcgctgaacagcattctgaagaacataccggtgttggtcatcggtttcctccttccacacctacgtagataaactcagcggccatggagcacctccgcgggcttgagattcagaatcgaacgaatcgaggaggcggacgccagcagcacggtgacagccagcagcacgaacaccagcacgaacaccatcggccgcatcgtgatgccggaaccgaataccacccggcctatcagctgggccacgccggaaccaagcaacgcgcccacaatcgcgcccagcagcgagattgccgccgtttcggccagcatcaggcgggataccgcggcatcggtggcaccgagcgccttgagcagcgccagctcgccagaccgttcgccgatcgaggcgaccatcaggttggccacggccacggctgcggcgatcaggctcagcacggtcatcagaatcatcacggcctgcgtcttctgcagcacattgccctgcaacgcggcgacctgacgcacctgcttggccaccgcgcccggaatcacctcttcgatctggtaggcgatcgagctcgggtaggcggtgcagtaccaggtctcccattcctcttggctcagcgcggccgggttcgcggcggccttacgggccaggtcgttctccggcgtggtcagggccttgacctcgatcttgtcgaccgaatcgggcaggtcggcgagcacctgggccgtggaggaggcgatgtagagcgagccgttgtcctcgtcgccggaatcgtagacgccggtgagcttgattttctgctcgttcttcttgcccgaggcggtggtcttgttgagggtgatggtgtcgccggtggtcacaccgagttcggaggccagcgtcttgccgatcacgccctggtcggaatcgtccttgggccacttgccgtccagctgccaccacgagcgcatgccttccacgcccacgacggtggtctcgccggtggagatcttgaggtccttgttgaaccacgtgccgacgaccggcacgttggcaccgttcaccgtggcgtggatgttgagctgcggcgcgaagttggtgatgttgaacgaccagaagatcgtcttgatcttggccgcgtccgactccttcagaaaagcggtcgggtcgctggtggacgccgcgccgcccgactcggtgttgtacaggtcggaaacgaccgcgtccgccttgggctgcacggtgatgttcgaaccgtaggtggacagctcggcgttgagcttgtcgcccacgtcgaacacgacgcccagcatcgatacggacacggtcgccgacaggcatacggtcagcgcgataagcaggcgccggcgcagctgtcgggtgaacgagcgagtaatcatacgcagaaagaacatgattcttgtctcctgcctgactcactggaagtgggcgctcagcgcgtccagatccgtagtctgaatggtgatcttgccgtggccggtcttgtacgggaatggtatcgggttgcagccacccttgaagccgatggtcgccaggttgatggccacctcgcacttcttgcagatgatcttgccgtccttctcgtagtagccggcgtcgccgcagttctcgcaggcgtccaggccgatgccgtacgcgccaccgttctttcggatgatgatgaagcgcatgacggtgccgtccttggccttgtattcgaaacggtgcaggtggccgtcctcgacctggctgaagggaatggtggccacgccgtccttgagcgagtaggcttccggcggcgaaagagtgatggtctgatgggtcgcggcgacgccgacggtgagggtcagcgtgacgccgatcatggccacgaggctccagacggcggaggccacggcgcggcggcggaacgccttgtgcttgcggccgatggcttcgttcgcgccggtcagcggcatgcggaagccggccaccacggaggcgacggccggaatcaggaacacgaacgcctgggccatgatcatccagtcgttgtggttgatcgaccaggcgagggccacgaatcccgtgtggcctatcgggaaaccgcgtgcctgcaggatctgcatgacaccggtcaggtgccggacgaacagaatcaccagcaccgcgagaacggcggcggtgaacgaggcacgcaccgcggtcgaacgcatcgtgcggaagatcgcggccacgatgatcgacatggccaggcccagcgcgaagccgagcgcgcgcagcaacatgtcggacgtgaagatcgggtcgccgggctccacccagatggtcagctgcaggatcacgtccggcagcgcgtagaacagggtgagtgcgatgtcgatggcggccacggcgttcgcaatgtgcatgaacaccttgtgctgctgccaattggtggtgatgcggcgtgcgaacaccaccacgacgatggtcaggatgtcggcaatgatcgcgcaccacagcaccggatagttgacgaacgtgcgctggttgatcacggccgaggcgcgcaggccggcgaatgtgatagcggcgatcaggccgacggtcaggccgatgagacgccaatgcgagcttatcggcttatctcgcccctcgccgaccgtgagcatcacgctcaggctcatcaccagcaatgcgggggccaaggtgcccggcatcactgccacgaattgttcaagcattcgcgtcctttctctgttcatcttaggctcccctccctgaggggagctgtccgcaaagcggactgaggggagtttttagaccgtcctaagaattatctccctaaagcggcgtaaagccccctctgacgagggggctgtctgcttattcaatcaccactgacgcggggtgtagtcccagttgtcgaaggtgacctcgatgggctcggtccagaacttgtggttcttgacaccggtctccgggtcaacgtggagcatccagccgttcttctcaggggactcgatggagagcttgagttggtaggtgccggccttgtcgagcttgacgttggcgccgtagtgcgggccgtcggaggcgttcatctgcatgaaggtaccggaggtggcctggccgccctcgacttccttgccggtggacttgtcgatgatggtgtagttcacagtaaggtcagggacgaagtcgcccttgccgtagccgtagtcggtgccttcctgggaggcgtggatgtcggcttccaggtggaaggaagcgtcagcagccttcagacccatggaagcagggtacatgtcgatgggctggaagtagacggcacccacggtcagcgggccagcggccttgtcctgctccttggcggtgccggaggggccgaccgggacctcttcgaagccggaggtctcagtcggggcgtcggccttcttggagtcgtctttcttggcggtgtcggaggagctggtcgaggacttggtatcggaagcgttgttggtggaaccgcaagcagccatcgaaacagccatggagccggcgagcagcacgccgagcagagcggcaagcttcttgttcttcatcatttctcttattccttctgttgtggtgaatggattattcacgacttatctgtttttagttgtggcggcgtgggctggaatcgcttccattgccatgtcgcaagttgtgttgcgcgagatggtcgcaccgggcgttgtgctacgcctgcgcgctctcctcgtcagccttcgcgtccgacttgctcgcaccggccgcaagccgggccttggccttacactgtttggcaaagccgaccacgaacagcgcgatgacggcgatggctgccagtacctgggcgatgatgcattcggcgtacgggtagaatccgagccagtcgttggtgggaacgcccggcaggtagttggcgggcagcaggtcgccctcgatgagcgcgtgcacgccgccgccggcgaagacaaccaccagcacggacatgaggatcgaggtgaccaggaagaacgggccaatcggaatctttacggaggtgaagcgaatcaccaggaagatgatcacgagcaccacggcggcggcgagtgcgccgaccaccatgccatgcgtatcctggctcatcgtgtagatggactggtagaagatcacggtttcggcgccctcacggaacacggcgaggaagctcagcatggcgagcgaaatcaccgtgcgggaagccaccttctcgccggattcgacctgcgaggagacagaggccaccgcggcttcggtcttttccctgatgtagcggttccacgcttccaccgaggacttgttgagcatccagttgctggtccacagcagcatgcacatggcgacgagcgcgcacacgccttccatgatctcctgcagcgggccggagccgccgaacgcgagcatgaagatgaccgccacgatgcctgcgccggccagaccggcgagcacgcccacgtagatccacttggtgaagcgcttgttgccggacttgacgaggtaggccaccacagcggcgaccacgagcagggcctcgagaccctcgcggatcagaatcaggaacgcctggccgaccgagctggtgatgaacttgaggaagccaccctcctcatcggccgcgccgccgtcgagcttggcggcatcggtggccagcatgttcttcaggtcgtcgatgtacttcttgacttcggaagcaggcttgccggtgttcatcgaggagcggcacagcttgaactggtattccacctgggagacgcggttgccgctgatggcgctcagcacggtcttctcgaagccgagcttctcgtagtgctggtagtaggcgtcgttcacgagcgtggcgcccttggcggcgtcgccaccctcataggccttgtaggcgttgtccaggatcggaagcatcgcatccgcgacttccttccaagtcttggccgtttcctcggtgcgcttcttcttggtgtcgagctccttgcgctccttggcgatctgcttctggaggtcttcggagtactgcttcgggttggcgaggctggtgttggcgtcgagctgctgggccgtggcgtcgaggtcggtggtcaggtcgttgaccttctgggtaagctgatcggcctggtctgacgtgaacacctggctttgcaggtcctggaaggcctgctgctgcgcggtctgcttgtctgcgccgatggtgtcgctcaccactttgttgaagttggacgtcacgtagacggtggtgtatgcagccccgaaatcggacttggcacccattgggttgccgtccttgtattccttaaggccttcctgcaactgcgcttcgacggccttggcaacgtcggcccaggtcgcgtaatcgacgctggtggtgtcgtcgctcttgacggtggcagcagtggcagtggttgccggcgtcacggcgaacgcggactgcggaatgatggcggaggggaggaaggtcgcggcgatcatcgcaaacagaaaaacgatgaccgcaaatgcacgagccgagaccgtggccgactgcagacgaccggtgctgcccgacttcgcgcgcacgcgagaaacggcaacgcgcgtatcacgttcccgcatcgtgttcatttcagcggactgcgcgcaggcgcgacgaaccatgctgaattcctctcacttcaagtactcgaatggtccaaaaacaactatgaactctatagaaaaaaattcttgaacaacagtcttgattttttgacgggtgcgaggtaatagaaggcgttttagtgcttttcaaccccgcaattatttcactatctgagataactatgctcagagaggatggctttcccggaatgtgaacggcaacaccacaaaaagcggcaacgtgaggaataccggaatcggataccaaaatagtgccacgggtgaggcatacagcgacagcaccgtgaatgccagcaagccgtaagcggccagtgcggggccgtagcgtcgtcgcgcaggccgcaccgccagcgcaagaccagcagccagcggaatccacgtgacgtacagggccatcgaagtcagcggattgcctttgcgaacaccgacatgaccatccgaacgcgcccaccgatgaatcgcccgcaatatgtttttctgccattgcggcttgtcggaggtacccctcagcggcgcaaggtcatgttcgatggcggcaagccgttcggccgccacggtatcggcatcgccgtcggaagtatgcttccaagcaccttcagtcaggaaagacgcccattgcctgagatagctaggcgtgaacaggtagtcggaatcagtggggtacgcgaaattgacgcgcgggtcccaccatccgcgagtcaccccggcataggccgtggcatattcaaccggatgcgcgaggccgagctgcacccagacctgcagggccgcgagttgttgcgccgcggttggcctagggtgctcgcgcagagtgcggaaggtctcatcggtgcggtgcgggttgatgccggcggcggcccagtcgagatccatgattgcgttcagccgctgccgctgaaccttgtctatcgcactgggatcatcgtgcgcgagccgggccactggctgggtgaccaggccccacacctcacgtccgggcgatcgattcgcatgcgtggcggccgcgcttaatggcgtccacacgccctgcgccacaacgatggcaaccgcaagacacgcgaacgcacgacgccgcgcgcctttgggcgtacagacggcgagcaaacagcagccggcgcatagcacgattatgagcgccgtccgcttggaggcgatggtggcgaacagcaggatgacgaacgcgaatgccaccgggcggcgagccagtaccgagccgcgcgtcagacaagcctccacgaacagcacggccaacggcagatagaacacggcatgcaacgagtccttgcccatcgtggtgattgcgccgaccaccacatagttggtggcaagatagacaaggccgagaccgatgagccagcgcggcgagccgattttgcggatgtagcacagcagaagcgcgcacccggcggcgagtagaaccgcttgggtcacggtgtacagggcctgcccgatcagaggggagccgagtgcgctgccgatatgccagaacaggccgaacgtgagcgtatcaaacagcggatgctgggtgtagtagtggtgcagaccggacgattgcagatattgggcaagcgtatcgtcgcgcatcgaacccggccaagtgagtatgagccacggcagccaggcgatagcgagcgtgagcaggtaagggaggaatcgcgcgcgcagcgatgtggataacgtggtcgggcggcgggccgtgagccaactaaggatcgcggatatgctgcggtatgtctttgagtgtttcttcgattggcgcgaccggccgccatgtgctgcggttacgtcggccgctgtcccctcgttcatgactccatagcctaggcgcgattgcgggcgcgcgccggacgaacatcgaaaattcacctggacacggtgatttctttaccgggggttgtgtaggtgcgcgcgggtgtgtgggccctgcacaagcatgcggtccttgtgcgggtgttgcgcgggactttccagtgagtctttcactcgcagtgatcattcttcacatccgcgtcgcgacacgcgccacgccgaagcgtgcacttatccgaaacctgtggtaacttattcgagttgcctgcggaacacagttcaactgcgcactgcaaagcatggaggattcgcctagtggtctatggcgcacgcttggaaagcgtgttggtgtaacagcctcacgagttcgaatctcgtatcctccgctagcagggctttcgaagaaattcgaaagcccttttcttttgccgaaaacagcttcctttcaacgattccgaacggcttggactgtcggaatagtttccttgtagtgtcttcagagggtgttcggcccgacgatgtcggtggcacgttacgtggtgcatccggtaggccaaatcggtgcaccactctatgcctgaagggagccactcatgacattcgatgatcgatcggcgtgccatatgagaacgtctccgtcgattccgacggtgtttacacttttacatcttcctacaccttcttacacttttccttcaggtcgaaaagtgttggaagtattggaatcattgggattgaagaccattttcctttacacttttgctcttttcgcgggtctattgcacaagggatcctcaaaatgcgttggaatccttggaatctttgggattcagggatccggaggaatgcgatgagcgggcgccgtaggattcggttcggtcgtgtccagaacctctagggacggaaaacgcaggtatgtggaggcacgctaccagccgccggtatgggcctatgccaaatggcccgatttgccgaagcattattcgagacgattcgacgccgactacaccgcaatggcggaggcctggctcgctgacgttgaacggcatataagactcggcgactgggaaccgcccagaatcgtggtgagcaagacgagggcgacggcgggaacatcatcggggccatcctcgccggccatgacggcagacggtcacgcatctatcacactgcggtccatcctgaagcgcgcggcatgggtgttggctcacttttggccgggcatgcggtcgaggcgcttcgcgcactcgggttgccgaaggttgccgtcggcgtatatgcggacaacaaggccggcaacgacttctgggagcagcagggctttgcaatccgagacgacctggtctatcgcgagctttccttgtaaggtgtccacccgcaatccggcttttgcggtcggtcattcactcgtttcgttgccgcacgcacatttcatgtcgacgatctgttgactctgaatcgtgattcaaatgatccgggccgtatggcctatggattcgatgtcggtttgcttcaatcgcacagacgtctgatgcacacaagtccgcaccggatattgaaacactcagtcttcgatgacgctgggatcggcgccactttttttgcgtggcggccgcttacgaaggtgcatatgccgtcggagacggtagccttccggccgtatgacttcctcatagatgcaagcagcagaccatgggactacggtctccccggttctgctagatgtatagattgtttttaagaaaacatagaaagtatgggagatataggtaatcgtgacacctcttgtcggcgtgaaggtatggaaaagcgcaagtttccttctggcgggctttgagcggcgaacagagtggtacactc

SEQ ID NO: 3460 - DNA, 17955 bp, Unknown
  R85_18m  MAG No. k141_ 409
cggcacccaggagccggattccggccgcgtgacgaagcgcggcggactcacgttcggcatgcttgaccagcgcgatccgctcgacgacaacgccaccattcgcgaagccgcacttgaggggcgcgccgactacgaatgggcgtccgacaacacctcccgtgaaatcgtcgaggcattgctcggcggcatgagcctggatgccaaggtcggctccttgtccggcggccagcgtcgccgcgccgatttggcccggctcctgctcaaggattgggatattctcgcgcttgacgagcccactaaccaccttgatgtggtcaccatccactggctcgccgaacatctgaagaaccgctggtccaaaggccagggcgctctgttactcgtgacccacgatcgctggttcttggacgaggtctgcgaatcgatgtgggaagtccacgatggcgtgatcgagccgttcgagggcggctattccgcatatatgctgcagcgcgtcgaacgcgaccgccaggctgatgtgcgtgaaacgaagcgccgcaatctggcccgcaaggagctcgcatggctttcgcgcggtgcccgtgcccgttccaccaagcagaagttccacgtcaaggccgcacgcgaattgattgccgatgtgccgccgatgcgtaacacacttgaactgaagcaaatggccacctcccgtctcggcaaacaggtggtcgatttggtcgacgtgacgcagattttcgaaaaaccgcagggcatggccgatatcgacccggatgtggcggcgctctccgcgtccgcttcccgcgtggatgtggtcaacgccatgtacgccgagccgcagctgcacggttccgttgaggtggcggtcaccgacatgactgacctgcgcctggtggacgccggcgtgccggaagccgtcgaggccgctgaggaagcgcgtaagaaggccgaggctgagagcggcaatccgcagcttgctgacgatcgcgaggttcgtcgcatgaacacgggtggtgaaaccatcggcggtgacactgctgcaacgaattcggatgatggcactgctgcagccggtgtcacctcggctgcacgcaaggtgacggtttccggccgcgagattcttgacgatgtgacttggctgattggccccggcgatcgtttcggcatcgtcggtgcgaacggtgccggcaagtccacattgctgaagttgattgacggttcgattactccgaccgtgggccatgtgaacatcggcaaaaccgtgaagttcgccgtactctcgcagcgtcttgatgagctggagaaactgggccagtacaagatcaaggaagtgctttcccgctataagccgagctacattgtggatggcaaggaagtaacgccgggacagttgatggagcgtctcggctttgaatccgcccagttgatgacgccgattcgcgacctctccggcggacagaagcgccgcatgcagttgctgctcatcctgctcgacgagccgaacgtgctcatcatggacgagcccggcaacgatctggacactgatatgctcgccgtcatggaggatttgctcgatacttggccgggtacgttgatcgtcgtatcccacgaccggtacctgctggagcgcgtcaccgatcagcagttcgcgctgattggcggcaaggtacgccatctgcccggtggtgtgcaggattacctcgatatggttgaggctattaagaacggcaagggattgccggctgacacgcctggcttcgcgggcaccggtagcagctcggcgaagtctggtaggggtaaggcggccgccgtcaatgttgctgcatctctccctcagtccacttcgcggacagctccctcgtcagagggagccaataacggtgaggactccacctcgaagctcaccggcaaggccttccacgaggcatccaagcgcgtgaatgccatcgagcgcaagcttgccaaactggaagagcggaagaccgaacttgaggcacagatggccgcccatgacccgagcgactacgagggtctcaacaagctcaatgaacaactcaccgccgtcaatactgaaagcgataatctcgaagccgaatggctcgaactctccgaacaattggagtagcgggagaaaccgtaacgttcacaaggcctcggtagtttgccggggcctaccgctatgcaaactcccacggattaatcaattccacgtcggtaccttcgaagtccttgatattgcgcgtggctatggccgcatcccaggaacaggcaattgccgcaatcatggcgtcttgaatactggtaggtgtgcccctgcgttcgcgttcgacaaggatatgggcataatccgcagctgcctgggtgtcaaatgcgaacgtcctgtcctctaatgtcataagcgccagcttgacggtcgtatctgtgtactttcgtcgtttgccttcaggcatgcgacatattccgaccaacaactcggcgacggtgatggcggtggttgccagattgcttgtatcttggttcctcagccaattggcaacgtgttcgtctggctgtttcttgatgatttcgctgatgacgttggtgtccagaataatcatggccgattcctattcaaaagatactggcggtcgggaatcggcggaatttcgctcggatagtgggagttcccccttgtcgagtccctcaaaatccatgttcttcatgaattcgcggatctcgtcgtagaaattggtctttcgtgtgatttcatgcgccaccgtgccggccagccattcttcaagaatggatcgcacctgagattccatggagcggttgtttttctcagccacttctttgagctgttgaatctgctcatcgggtatttttcggatggtcaatgttgccatgatgcacctccttgttgctgtcataatgctagcataaggtgctgtcattttgcttgcagcacgggtgatgaggtatgcacgcatgaaaaaggcggatatgcatcatgcacatccgccctttgagcttggactgggtctccccgcagtcgccgaatcagcgcccggtaacctcggaaccgacgaccttttcgctcagggcgcgcgggccgcgggtcacggccacggcaccggagcgcaccagctcaatcacaccgtaatgctccaaaagccccagcagcgcatcgatcttaccttcggcaccggtggcctcaatggtcagcgattccggattcacgtccaccacacgcacgcggaagaggcgcacgatctccagcacgtcggaacggttggattcgtcggcggccaccttgatgagcaccagttcgcgttccacggtggagttcgggtcgagctccacgatcttcagcacgtgcagcagcttgttgagctgcttgatgatctgctccagtggcacggcctccacgtcggcggtcaccgtgacgcgtgagatgtccggacgctcggtgggggagacggacagtgagttgatgttgaacgcacgacgggcgaacaggccggcgatacgcgccagcacgcctgggcggttctccaccagcacggacagcgtatgacgctgggaaccaggctgggatgcaggatagttagccatgagtgttctcctctcctcagtgctcgctcgcagcggcagcggcggtctcgtgctcgaacacgccggtcgcatgctcgtccggaccggttcccggagccggggtgccgccggtcagcggcttgatgccgggcttgtacgtcacctcgtcgttggaagcgccggcggctaccatcggccacaccatcgcatccttccacacgcggaaatcaatcagtaccgggcggtcgttgatctggttcgccttttcgatggcggcaatcgcctcttcctcggtgaacgcgcggatacccacgcagccgtatgcctcggccaacttgatgaaatcaggcacttcgagcggcgcatcgccgtcgaccagtgccgccgcaccatcggcaccgtgcgcctcgccatcgagcaggttggtctgcgagtagtggtgctcgtagaacagcgtctgccactgacggaccatgccgtacacggagttgttcagaatcgcgatcttcaccggagcgtggtccaggaacgcggcggccagctcctcagaggtcatctggaaggaaccgtcaccatcgatcagccacaccggcttcttgccctcgaactcgcgggccgagcccacggatgcgccgatggcggctggcagaccgtagcccatcgtgccgaggcctccggaggagatccaagcgtgctggttctcgaaatcgatgaactgcgaagcccacatctggtgctgtcccacaccggtcacccagatggtggacggatcggccatctcagagagctttttgatgacccactgcggggccattgatccgtcggtcggctcatcccacgtcatcgggtattcctcgcgccagccgtcgatcgccttccaccagggggccagattcggcttgccctgaatggcctgcgtgcgctggatttcgggaatcaagtcgtcgagcacggtagccgcatcgcccacgatcggcacgtcgggctgacggttcttgccgatttcagccgggtcgatgtcaatatgaatcacgcgggcggtcggtgcgaaggcgtcgagcttgccggtcacgcggtcgtcgaaacgtgcaccgatggccacaagcaggtcagcgcgctgcacggcaccggttgcggcaatcgtaccgtgcatgcccagcatgccgaggttcttcgggtcggagtcgggaatgatgccgcgtgcgggcagggtcgtgaccacgggggcgccggtcaggtcggccagagccttgacctgtgcgccggcgttggagcgggcggcgccgccacccacatacagcaccgggcggtacgactgagagaacagcttcgccgcgtcggacagcacacggccgtgcgccttggtggtggggttgtagccgggcagaatcatgcgctgcggccatgagtagtacatgtcgccggtctgtgcggtcttggtcagatccacgaccaccgggccggggcggccggtgttggcgatgtagtacgcctcggaaagcacgcgaggaatgtcctgcgcgcgggtcacgaggaaggagtgcttggacaccgggtaggtgatgcccacgatatccgcctcctggaaggcgtcagtgccgatggcctgcacgcccacctgaccggtaatcacgaccatgggcacggagtccatattcgcgtccgcaatggccgtgaccacgttcgtggcacccgggccggaagtcacgatgcacacgcccaccttgccagtggccagtgcgtagccttcggcggcgtggccggcggcctgctcgtggcgcataagcacgaagcggaacttcgtgttgtctttgatctcgtggtagacgggcagaatcgcgccgccaggaatgccgaagacgtcctcgacgccgagatcctccagcgaacgcaccagcgcttgggcgccagtcatcttctcgccatcgacgatggtctgcttatcgggggccgcgttgattttcggcacgccgctgaatgcctgcaaaggcgtgggtaaagccatgattcctctcacctcatagattttgccgcgaacctgcccgaccttgggatggggccgggtgcccgcgtgtctgattccagtcgcttctccgagacttgtggccccggcacgactcgtcgctcatgttggtatcagtctattcgcaaatctgacagcgggcttacttagtccgcgtcttgagcgagtccagtgacttccagcccgcttcggcggccgccagctgcgccttacgcttgctggagcccttaccgatgccgatgatgtcgccgttctcgcccaatgagacgcgcgcggtgaagatctgcgcgtactccgggccggagacctccatatggtagaccggctcatccttgccgaggccgtgcgccttgacggtcagcgaggtcttccagtcaagtgccgggccctcggtggccacttcggcgagcgtgtcgtcaataagtcggtgaatcaccttgcgtgcctcgtcgatgccgtgttccaggaaggtcgcgccgatgagcgattccacgatgtcgcacagaatggagttcttctccgcgccgccctgctcggtttccccgtgacccagcagaatgtaggggcccaccttgagcttggttttggcgatggcgctcagcgcgtcttcggagacggccttggcgcgcatcttggccagttgcccctcggtcatatccgggtgaatggtgaacagcgtttcagtggagaccagttcgagcaccgcgtctcccaggaattcgaggcgttcgtaattggccacgccggggtgctcatgcgagaaggagcggtgggtgagtgcctgcacgagcagatccgggctgagagtggtgcccaacgcttcaagaagctcgttggccggcgtcggctgctgtggggtttcattgctcatgattgttgtatggtccttcacgcgatggtgatgtgttgtgtgttgtgttgtgttgtttgcgatgcgatggtgtacgtaatggtgcacttatgcgaagaccccgccacccgtcgatggcagggccttcattcaagccgttatcgcaggactcacttggtgtgagccggctggatggcggagcggtaggtgcggccgcggtagttaccgcagctcgggcaagccatgtgcggcagggccggagcgccacagttcgggcagttcacggtcgcagcagcggtggccttccagttcgcgcgacgcgagtgcgtgttggcgcgcgaggtcttgtacttaggcagtgccatttgagtatcctctatttcgttcgaacaattgagcttaagcgtccgttatcttaacgcacggctcgtacaaactccgttcaggcgcgcgtcactcggcctgctcgccgttctgctcggcctcgagctgggctttgagccccgccaatccggcaaaacggatatccgtcacatcgtgatgatggtcgggatcctcgttcagatcggcaccgcactgcgagcacaggcccttgcaatccggtcggcacagtggctgcaacggcagcgattcgaccagcgtgtcgcggatcatcgcctcgatgtccgcgaatgcgccgttctccagcagcggatacgtgtcttccgactcgtcctcgccggcgatgatgtcgatctcgtcgtccttcttgttcttgccgcccttgccgttggccttgtcctgacccgactcatacgggaagaacaccgtcacatcaaccggccagtcctcgtcaatcggcttcaggcagcgcgtgcactcgctgacgaatggcgcgaccaggcggccggtgaagatcaggccgtccacaatcgaatcgaactgcccgctcacatgtacgggctcaccatccttgatgccgacgatgctgtcgccaatgccggaaggggccgggaaatcggcgtcaatcggcttggattgaccggcgcgcgaagcaatctgcgctaccggaatggcccacggggaatcttcaactcgtgccatggtatgttcttggtgcctttcgtatgttggctggagttattcgttactggcgttattcgcgttactgatgttgctggtgctgctggcgttactgggcttcgggatagtcgttcagcgtcaggtgcggcatctgttcgccggccgcacgctggcgctcttccagcacgttaagaccggcctgcacatcccgactgagtttgccgagctgctgggacagcccttccatcaccgtagtgcagtactggtccgcgccttgggtcagatggtcggctctggtctgtgcctggtcaagaatcgcgcgcgctttctgccgtgcaagctcggtgacgttctcttggccggccaggaactgtgcctgttcgttggcgtccttgatcatgtcggctgcgcggctttgtgcggaggcgacgatggcgttggactgggtctgtgccgattccagacggcgctcggcctcgcgcatgagggcggaggcgcgctccaactgcaccggcagcattttcttcaactcggaaagctggtcggtgaattcgtcgcggtcaaccttcaccatgccgggggcgaatatgctggacttcgcttcgcccagtgccgcctcgagctggtcgatgatgtcatacaccgtggtgaattcctcgcggctcttgaccgtggccgggtcgtcgtccgtggtttctcgcaggtcgggcatttcgttcatgaacgaggggcgagtgccggcggcctgagcggtctgagcttgtgcccgggtctgctgagctgcttgggcctgcgctttggcctgcatctgtgccggagtaggggtaggcgcggcgggcggcgatccggcgagaacatcggcctcttcggtgggtgccggcgcggcttgcgtagacgcgggcggttccggggcggacggctccggagtggacgatgcggcgtccgcattcggtttggtcagatcgacgtatccagtggggtggtcatcgctcatagtcattagtgcatcagtccttccgctgacgttcctcggccagggcatcggccagcatcggcacgacacaatcgggcaccatgccggtcacgtcgcctccatggcgggccacgtccttgacgatggaactggagatgtgttcaagaatcggatcggccggcaaaaacagggtttcgatgccggcgagcttgcgattgaccagcgccatgccgagctcggcttcatagtcgccgttctggcgcagacccttgacgataacggtggcgccgaccttcttgcagtagtcggtgatcaggccgtcggtggaagaaacagtgacgttcttgcaaccggctttgtcaagggcacggcggatcacgtcgactctggtggcttcggaaaacatcggtgttttcgcggcgttgacggccaccaccacatgcacctcgtcgaaaaaccgcgccgagcgctcgattacatccaagtgtccggcggtaacggggtcatacgagccggggcatactgcgatagtcatgccttatagcctaccgcgaatggtgtgcttcgtgctgccgagcgtgcattgttgtcgcgtcggcgtatgaggcagtgtgtgcggtgccgtatgtggcgtcggtgcggcgttgtgtgcggcattgttatgtggcattgtatgtggcggggtggcgtgatgcgcgacatgggtgtgtggaggtgtgcggattacgcgccaatgggtttcgcgggtaacgacgggaatctatgatggagtgcagtcgaatcgttgaatacgaggaaagaagtgcaccatgacttttgccgagatgttcgttgatgatgccgaaccgctgcgcaacccggaccaaggtgccggcacgtcggtgctggaacgcccggaaaccaaggagtctccggttcgtgacgatggcggcgacgcggatcgattcgcacattatgtttctaaggaccgtatcgccgaatcacgcgcgaccggtcgcccggtggtcgccctgtgcggcaaggtctgggtgcccaagcacgatccgtccaagtacccggtttgccccgattgcaagcgcatctacgaagaaatgacgcgctaaaggtggtacttggctcccctcagcgagggaagccaaaatggtcaccgagccgaaatctcgtcgatcagcttgagctcctcgtcgctgaagtgggtgttcttcagagcgccgatgttgtcgagaatctgctgaggcttggaggctccggtcagcacggaggtcaccttaccatcgtgcagcagccatgccaggctcatctcggccagcgtctggccgcgttcggcggccagattgttcaggtccacgacctgcttgtgcagtttctcggtcagggcggaatcgttgaggaatcgcggatcgtgagccatgcggctgtcggccggaatgccgttgagatagcggttggtcagcaggccctgtgccagcgggcagaaggtgatgaggcccttgcccagcttgaaggcggtctccttcagaccgttctcctcgacggtgcggtcgaggatgttgtatttgttctggttgatgatgaacggcacgtgcaggtcggcgagaatcgcggcggccttctccatcgtcggaccatcgtagttggacagacccacgtacagggccttgccggagttcacggcctgagccagcgcgcccatcgtctcctcaagcggggtttccgggtccgggtggtgatggtagaagatgtccacataatccaggcccaggcgttcgagcgactggtcgaggctggcgagcaggtacttgcggctgccgaggtcgccataggggccggcccacatttcgtagccggccttggtggagatgacgagttcgtcgcggtggtgcctgaagtacttggcgagcagcaggccgcagttcttctcggcctggccgggttcggggccatagttgttggccagatcgaagtgggtgatgccgttgtcgaaggcggtgaagaccagggacttcatctggtcgaatggcgtgatgtcgccgaagttgtgccagaagccgagtgagacggccggcagcttgaggccggaggtgccggcacggttgtaggtcatcgtgtcgtaacggtgcgggttgggagcgtaggtggtggttggctcgaacattgagtctccttacaatgtcatttttgttcttacgaatgctggtctgcgatgggcaaaccgacgccgattgagtggcattcgtaagtgttcttggatactatggttccagttcaagtgaacttgaatgcaaacggctgcgacgcttcggcgtgtcgccgcagtaaggagtcatggtgtcctacaccattcgtcaggtggccacgcagttccatatgcagccctctacgccggtgaagactggccggattggcgcgagtacaaaaaccgcgcctattccattgaatgctgaggccatcgagtgctgagctggatgccggctgggcactaagaccgatgtgcgtcgatcgtgggcgcgtctatccgagtaaggccttgctcggcagtgcgcggtcgagcagccagacaacgagcgatatcacgaagaacgctatggccagcttgccgcagctaatgccgaacccttgccagccgagtgcgtcgaggttgatgaagtcgtacggatacggactgccgccggccgccggtccggaccccggccaaatcgtcgcacgggccagcacgaagaccaagtatgcagggaagtacgccagccacgagaacatgtaatgccagcggaaacgccggtgcgggtcgaatagcacgaaatcgataaccgccataatcggggcgattttgtgcagcatcgtattggtcatgatgccaataacctgtggcacgtatgccgggtcgtccggaggcatcaggaagaacgccaccagtgcggtgactatggcgtacacagtcaggcatcccttaggccatgcaggcggctgaatacctttgagcagtgtggccgcgccggcccacagcatcacgatgcccagcacgaaaccggtctggaacgtgaaatacacccagaactgcggtttggaccatgcctcatatgtgcccacgaagcagaaaccggcgatcgcaaagcgccacaacgccacgatgaatctcatgcatcgagtctaccgcttcgccagtgggctgtatggctttgcccggactacacttaggtgcaacttcaccacttatgtaggaaaggccttgcaatggtcgattattcgccggctctgatgaccgacatgtatgaatacacgatgctcgacgccgctctgaaagacggtaccgccgaccgcaaatgcgtgttcgaggtgttcacgcgtcgcctgcccgaaggccgtcgctatggcgtggtggccggcaccggccgcattctggatgcgctggaacatttccacttggacgaagcggacctgaagttcctggccgaccgtcacgtggtaagccccgagaccatcaagtggctggagaacttccacttctccggtacgattcgcggttaccgcgaaggtgagatgttcttcccgaactccccgattttgcaggtcgaaggcacgttcggcgaatgcacgctactggagacgttgattctatccgtgctgaactacgattccgcagtggcctccgccgcctcacgtatggcgtcggcagccaaggatcgtccttgcatggatatgggcggacgccgcactaacgagtgggccgccgtggccgccgctcgagccgccgtagtgggcggattcaagggtaccgccaatctgctggccgcccagctgtatggtctgaaggccattggcaccgccgcgcattgcttcacgttggtgcatgattccgagcgtgacgccttcgaatcgcagatcgaggcattgggcaagaacaccacgctgctggtggacacctacaacatcgaggaagccgtgaaaaccgccgtcgaggtggccggtcccgaactgggtggcgtgcgcatcgactccggcgacctagccgccatggcccagcgtgtgcgcaaccagctggacgccctgggcgccacgaacaccaccattaccgtgaccaacgatttggatgagtacgcgctcgccgcattgcagaccgcgccggtcgactcctatggtgtgggcaccatgctggtcaccggctccggcgctcccacttgtgcgatggtgtacaagctcaccgaacgtgaaggcgctgacggcacgatggttccggtcatgaagaaatccaaggacaaggccacagtgcccggtcgcaaactggcattccgctcctacgaatacgcgttagccgaagccgaacacgtgatttccggctcggaggagaagctggccggtttcacgcctgaaccgacgtggaagaacctgctggtcgactttgtggatcatgggcagatcgacgctcagtggcagggccatgacgccatcatggccgcccacgactaccacgccaaggcgttgtccgaactgcccatcaccgcgcagagcctcatgaagggcgagccagtgattcctacggagactcaggttctctgacgagaactttcgtctccataggaatccgtcgcagcatagctgctccccttacctacggacagcccactgggctgtccgcttaacggttcgaccacagagaccaaagtcctctgaccgtatctcactggccgcatccctttggttacattggctactcttccctctgtctgtgttggccgcactcctgtggtcgccgtcgaggcggggagaatccaaccccggtcgcacccccgtgtttgcaccccctgtggctgtgtcccggggctgtattggccgcgtcccctcgggctgaactgcgtcccggttcgccggacgtggttccagctgagggtggccccccttgtttttttttgggggggggtactgttcaccggggaaatatgtatatgtgcatgctgttgcaatgtacattttgttgtcagttgacaacgtcttgattcagatgaattggcgggaaatggccatttgtcttatccaattgatttgaagaacgttgtcagttgacaacgttttgtacatggtgcggaacgacacatattcctatcctggtcaggatgccgacgaggtggagtgaaaaaccaaaccatttcagaggatattgcaccgagacgttgtgggattgccgtgttgtcggtgatgttacagagatggcgcagtgttgcgtgaggggtgttgcgtgaggggtgttgcgtgtgatgttgcgtgtgatgttgcgttgggctgattgggaggaatagtgtgccgatagaatgccgtgatgcgtgcagagcaatcgtttgcggagcaatcgttgaagaatcgtgtgaactgatgcgatacgaatcataccgtctctgaattgtgggatatgacgaatcgtatcgtcatgggattgtgggatatgatgattgcggtttgatgaaatgaccgggaaatcggccgaggcaaggtgacttcgatgagtgaaactctcaatgatgagaacgcggcgggcaacgatgacgtatcagagcggcgcgctgtagagcatcgagcgttagaacagtgcgatgtcgtgcatcacggtgtggtatctggttgccctgttaattcgtgtgcggctgtgctgaatgaagtgatgtcgcagactggttggaatgcctatgagcttgcacagcgtactggtttggatcggtctgcaattggtcgcgtattgcgtgggcaaagaggtatgttgtttgatgttttggccgaggggcttgagcgggctggttttggtcttcacctagaagccgtggccccctcgcaaacgattccggaagacgaattgcacatgttgttggcgcaactgcgtaggcctcctgatttcgatgcaatagaaagcggagcgacctggtctacgttgaagatgctctgcgtcaatctgattcatgctcggaatgttcaacatcaacgtatatcgttcgtccgagcggttgcacgggtgaacgatgcgtgctggattgcgtttctcgctggtttataccgttttctgcgttgggatatcaacccaaggaacagacgcttgacattggttcctccgtaccggtatggcttggatggatggtggtccccactgccgagcgcggcaattatgcacgtgcttcatcgatatgaagagccgttgcatgacatggactatacatatttgccgttaatcgattacgaactcaacgctatgcagcgcaagcaattcaaccaagatttcatggaatatggcattcttattccagcggacgatctttcccaatcctcatcaggtacgcaggcattgactctgtaagcgagtggtgcataagaaaatagtggcgtgcagccaagtgtcatggaatggatatgtaagcagggaatgacattgcgctggggtttgatgatggttgacgagttgctatccaggcatagagcggatggcgtatgctggggcgcatggttgaaatcaaagacatgcttggcaatcaccaaataattcgtgccgacggccgcaaggtcgacgagctgcgccccgtgcgcatcacccgccacttcaccgacgcccccgaaggctccgtgctcatcgaatgcggtaacacgcgcgtgatgtgcaccgccacttttacccctggtgtgccgcgttggcgcaaggactccggcctcggctgggtcaccgccgaatactcgatgctgccgcgtgccaccgccgaacgcaccgaccgtgaatccgtacgtggcaaaatcggtggccgtacccacgaaatcagccgactgattggccgctgcttgcgtggcgtcatcgatatgaaggcgctcggcgaaaatcagattcagcttgactgcgatgtgcttcaggccgatggcggcactcgcacggcttccgtaaccggtgcgtacgtggctttggtcgacgcagtcaattgggcggagaagcaccgccatatcaagtccgccagccgcgtgcttaaggactatgtgtccgccgtatcggtgggcgtgatcaacggcactccgatgcttgacctgccatacattgaagacagtcaggccatgaccgacatgaacgtggccatgaccggttccggcaccttcatcgagattcagggcaccgcagaacaccgtccgttcaaccgtgccgaactcggcaccctgcttgacttggccgaaaagggcaacaaggaactgcaagccgcccagcgtgccgctttgtccctagactaagccagctccccttcctttaggggaggttgtcggctggaagccgtacggtctgcaatgtccagctcccctgacaaggggagccttcttaaaggagaacccatgcaaatcgtcgtcgcaacccataacgaaggcaagcttgtggaaatccgccgcattctcgaagaggatcttggcgcggatgccgaaaacatcgaactggtgtccgctggcagccttcacctgccggacccggtggaaaccggcgtcaccttccaggagaacgcgctgctcaaggcccgcgccgtggccatccgtaccggtctgcccgctgtagcggatgattcaggtctcatcgtcgatgtgatgggtaacgctccgggcattctgtctgctcgctgggcgggtgctcacggccacgacaaggccaataatgcgctgctgctcgcccaaatcgaagatattccggatgacaagcgtaccgcgcgcttccgctgcgccgccgcgctggtggtcccggacaccgaggccagtgccgacgtgaccggtggagtggctgccgacggcatcaccgtttacaccacggctgcagatgggagccctgccccggtgcatgcccggtacgccatcaagtcggagacagtggaactcggcgacatgccaggtcgtatcatccgcgaggctcgtggcgaacacggtttcggttacgatccgctgttcgtcccggacgaccagcctgccggtcgcgtcagcactgagcctgaccatgaaggcgagccgctgaccagcgccgaaatgactccggccgagaagaatgcgatttcccaccgaggcaaggcgctgaaagccttggtccccgctatcgaggcgctgctgcactaagtcgtctaggctgtctaactgcactgagccgcgactaagccacagttgagtcgcggctcagcaactcagcccctcccgaatcgggcaagtgtctagcaagcgcctatgacctagcaagggcgatacgaaagaaggccggcgcttagtgcgtcggccttcttgatgaacaagagccacccgatagaatcgaactaccgaccttcccacgaacgagggggatgctctaccactgagctaaggtggcgtggctccaagagccaagtagagaatatagcactgcgtttgattcaacgcaagccggacgttcagcatcttcgggccattgttctttgagccattgtggaggcaatagtgcgaacgatgtgcacacctcatctgctcggaccccattcgtcgtgtgcgcgttatgctagcatggtgagcctgattgactcggaggcagagggaagcatgcgtgattttgtgctggtgaagttgacagacgaagagttcgatgatttctccgccaggcatccacaaggcaatttccaacagacctcggcgatgggacgccttcgcgccgcgcaggggatcgacgtcgaatatctggccctcaaggagggcgagaagatcgtcgcggcggcgctgttcgaaactcaccgctctcgattctctacatttgcggccatccatgatggcccgatgtgcgactatcacgacaccgaagcattgaccttcttcatggatgcgctgaaacgccatgccaaggcaaagggtgcttcacagctggaaatcacccctgaatccccgtatcggcttcgcgacaccaatggagcttctttgccggatgaccagaacggcgctcccgacaataagctgatagaacggctcgaggcgatcggcttcactcatggcggtttcaccgtgggctacacggcggttccacgttggcgctacctcaaggatctgaccggcattaccgatgagaaaagtctgctgaagtcctatgacaagcgcacccagtggagcgtgaagcgtgcccaatcgatgggtgtgcatgtgcgtgagctgtcggacgacgagttgggggtattcgcacgaatcgagcagcaaaccgccgaacgtcgtagcttcgaataccgtggcgaagcatatttccaccgtttcaaggaagcgtttggcaacaaggcgcattttatggttgccgagatccacatcgacgaatatgtagcggacatgacggccaagcgtgaagcactttcggccaaggtggcggcattgaccgccaaaaacgccgaacaccccaccaccaaaaccgaacgtcagctgggggaggagacccgcaatctggcggcagccgaaaagcgcctgaacgaggcggccgagttcgccaaagac

SEQ ID NO: 3461 - DNA, 4298 bp, Unknown
  R85_18m  MAG No. k141_526
gcagatctccgccatgggcgctaagtggctgacccgcgaggacgttccggccgatgtggtcgagtccgagcgtcgcgtggccaccgagaagtccctggccgagggcaagccggagaagatcgttccgaagatcgtcgaaggccgtctcaacgcctacttcaaggaggtcgtcctcctcgagcagccgttcgtcaaggacccgtccaagaccgtcggcgacctgttcaaggaagtcgggggcaacgccaccgcattcgcccgtgtcgaggtcggcaagggcgaagaggagtgagcctaaggcttactccacgcgcttagcgtaatttcaacgaaacgccatccggttattcaataatcggatggcgtttcgctattccaagggtgtcgttgctagggggtgtcgtcgtaaaccgatacgcttgtctacggataatttcgcactttcggttttgagaaaggcacaatatgactgatagcgacaagccgcgcagagttctgctcaagttgtccggcgaagcattcggtggtggcaaggtcggcatagatacccatgtgattcgtcgcattgccgaggaaatcgttccggccgtacaacagggtgtgcaggtggccatcgtggtcggcggcggcaacttcttccgcggtgccgaactgcagcaggccggtatcgatcgttcccgtggcgactacatgggtatgctcggcacggtgatgaactgcctcgctctacaggacttcctggagcaggagggtcaggccacccgcgtgcagaccgccatcaccatgggacaggtcgccgagccgtatattccgctcaaggccatccgtcaccttgaaaagggtcgcgtggtgattttcggcgccggtgccggcatgccgtacttctccaccgacacggtttccatccagcgttccctcgaaatccactgcgacgaagtgcttatgggtaagaacggcgtcgacggcgtctacaccgccgacccgcgcagggacgagaacgccaagcgttttgaaaccctgagctacaatcgcgccctcgtggacaatctggcagtcatggacgcctccgcactgtccatggcccgcgacaacaagaagcgcatccgcgtcttcggcctcgaagagccgggcaacgtgacccgcgccctcgtcggcgatgaaatcggtacgctggtctccaccgccgaatcgcgcgtggccgagtaagccgcaaacgcctacaatcgaatcaaacgttcatagacgaacaacacagacgaacaccaacacacaaggagtgaatatgtctcttatcgaccaggccaaggaacagatggccaggaccgtggaaaacaccaaggaaaacttctccggcatccgcaccggtcgcgcaaacccggccctgctcaacggcatcaccgtggactactatggtgcccccaccccgattaaggccgtcgcctccatcggcgttcccgaaccgcgcaccctgtccgtcaccccgtttgacgcttcccaggccggtgccgtcgaaaaggccctgcgcaactccgacctcggcatcagcccgaaccgtgatggcaacgtcatccgcctgaccatgccggaactcaccgaggaccgtcgtaaggagtacgtcaagctcgccaagggcaaggccgaggacggcaaggtcgccgtgcgcaacattcgccgtaagaccaaggaaaccatcgacaaggccgtcaaggacggcgagatgggtgaggacgaaggcgatcgcctgctgaaggatcttgacaaggtcaccaagtccgttaccgacgagatcgatactctgctggagaccaagcagaaggagatcatggaggtctgattcagaccaggtccggagaattatggaacgcaacgaacaactccatgaagaggccgaggagacgctcgaccggatcaacaagaagaccggccgcaacatgccgcaggccatcgccacaggcgcggcactggtcatccttattgtcgcgtgcctgctgctcagcgtcgacctcttcgtgctgctggtagtcgtgttcatgattctggcgctgtgggagctcagggtggacttcgccaccgtaggcctgcacatcccggtgttcatgctgtggctgtgcgcgtccttcaccctcatcgccacctattattccccgtaccatctcatcacgatgtcgctgagtatcatcgtgtcgattattctggtcgccatcgcggccagcgcaaaaatcagcgtcggcaaccgcctatctctggcggttgccggcaaactgtccaacacggatgccagcgcgcgcctcgaatcctcgttcaatcatgagggcggggaacagcatcattcccggctcagccatgtggctgtgtccgtgcttaccgtgttgtacattccgttgctggccagctgcatcatcatctcgctgactttcaatgggcatccgattgcacacgccatcatgctggtgttcctgcccgccctctccgatacgggtggtttgtttgccggtgcctggctcggcaagcacaagctcagcccgcgtatctcgccgaagaagtccgttgagggcctgatcggctcgatgctcttcgccatggctggcgcattcgccgtattcgcatgcacgtatgatgcctcgaaatgggccactcgttggtgggtgccgatcgtggcgggtattctcatcggcgccgtgggcacgttcggtgatttgtgtgcttccatgctcaagcgcgatatcggcatcaaagacatgggccacctgctcaagggacacggcggtgtgatggatcgtgtggattccattttgatgagtgcaccgttcacctgcgccttgctgtgggtcaccggactgtgattcgcatgcctcgtgcatgaacaatgtggcatcgtgtgtatatcgcacggtgccacatgccatatatggggggaatcatcgttcaatatgcgttcgccatgggctaagacatgggccatctgattcgtatgcggcacgccgtatggtggattctgatatttctattgcatgtttgactattttctgatattgagagcgaagcgaacccatcatgaccacacagcatcctgacactccggaaaccggcattactcccggcggcacatcaggtgccttccgtgacgtgctatccaaggaccatgcccgccgtggtaagccgccgctgcactttgtggatatgacgcccgagcagcgcatcgagaaagcggccgaactcggattgccgaagttccgagtcaagcagctcgccaaccattactttggccatttcgatgtgaatgccgccgaattcactgattttccggcagccaagcgcagcgaggccgccgccgcgttcttcccgcagctcatcaccgaggtgacccgccaagtggcggacgaaggcaccaccatcaagaccttgtggaagctgttcgacggctccctcatcgaatcggtgcttatgcgatacccgacccgcaccacgctgtgcatttcctcgcaggtcggctgcggcatgggctgcccgttctgcgccaccggcaagcttggcctgacccgtaacatgtccaccggtgaaataatcgaacaggtgcgtgtggccgccaaaatgatgcgtgacggcgaagtggccgggggagagggccgcctgagcaacatcgtgttcatgggcatgggcgagccgatgggcaactacaactccgtgctgtccgccgtacgacagatttccgccatgcctcccgaaggcttcggcatttccgcgcgcaacatcaccgtatccacggtgggcgtggtgcccggcatcaagaagctcactgccgaaggcattcccgtgcgtctggccgtttccctgcatgcccccagcgacgaactgcgtgacgagctggtgccgatgaacaagcgtttcaacaccacgcaggtgttggatgccgcgcacgattattggctggcctccaagcgccgcgtcagtatcgaatacgcgctgatgcgcggcatcaacgaccaggccgagcatgcgcagttgctggccaagaggcttaaccattacggcgacaactgggcccacgtcaacccgattccgctcaaccccatcgagggctcgaagtggaccgcctccaagccgggagacgaacagcggttcctggagatcctgcaccgcgcgggcatcaccgccacactgcgtgacacccgcggccaggacattgacggtgcctgcgggcagttggccgctaaggagcggtagttacttcagcgcatccttgattgcgtccacgaagtagtccaaatcagcgggcttgcgggacgtgatgagcttga

SEQ ID NO: 3462 - DNA, 2552 bp, Unknown
  R85_18m  MAG No. k141_ 564
gcttttggtgatggtagtcttgcccgcctgccgttggacggtgagcacgagttcgtcgtaccagtaggtgccggtggacgggtcgatctcgctgatgacatcgatgacctggcgttgccacgggatgagtggcttacccagcagttcgctgaacctggccacgagagcgccgtcggtggcgcgttcctggttacgcgcggtcgcgtgacgcggttgcaaggatggcggctggtcgtggttcatcgcgccgccttgcccagcagttcggtgatttcggggtcttcgtccatcgtgtcgtacatgccctcgagctgttggatatagcacagaagactggtcatgttgcggcttatctcgcggccgcgcgcgttctgcacgtcgatgttgcgggcgatgctcagcatcgatgaatagatgaagtcggccatcgcgttctcggccttgccgtcccggtactccttgatgaactcccgtgtcgccttttcctgcggtccttcgatcagtcccgcgttctccaagccctcgaaacctgccatgagaaattgctccaatcacagtaatggtgtatattccctgtttgaagcattttcatagcctgattttggggtgtcgtccctattttcgggctttttttattgttttgtggggaaccaaaaacggtgggcgcggggtgttcctttgcttcgcttctcaaaaaaacgacggttaccatgccggccgcgccggttgcgagccgatcgggccggcatcgggtccgttggcgagcccgagggccgcgagccttgacctgcgagccttgagcctcgcatcgatgccggtctgagtgatgccctgccggtaccactggagcacgccggcctgcaaccgtttgccaacgtccatgcctcgcgccctgagtctgtccatcacctcctgcttgccggggtcgcagaccgtgatgtcatagtccagggctatccactcgtccagcagccgagggcttcgcggcgtggaaggcagtgttttcaccagccacagctccaccggttccgtgacgcgcaccatgtgccggtaggccccgtaccatgcccccgatgccatacgcctcacccattccacggtgacgtgcccggcgtccgagcccggcatcatggccttggccagtgcgtcgaagtccagcaccacggcccccggttgccggtgcatgtcaacgtacgttgacttaccgccagccggagggccgatgaccgcgtggataagcgcgccatacccgttaagcgtccggtcgccccgaagcgagttgcagtgcttgcacgcgcggcgaaggttcgccggcacggtgggcccgcccgcgatatgcggcacgatgtggtccgtggtgtcgctgtgcttcgtgcagccgggcatccccagccagcagtcgttgccccaccgctcgatgacctcggccgagacgactggcggcacacgttgcctatcccttctgcccggcatgacgccacctttccacctcggcgctctcgtaccggaccagcctcgtgcccggccagcgcgtccaacgcggccccttgcccacttcctgccgccacttgcgcaccgtatccggcttcacgttcaacagttcggccacctcgaccgtcgtcaaataccccatcatccctcctagatcaaactcatgcgagactgcatctgcacggtcggctgagccgcctcggccctgcgcctgaatacgcttatctgcccctgcgcccacaggtcgaactggcgtgcgtccagcgtccacgcgccgccgacgcgccgcactcccattgccggccagtcgcctcccaacgcggccagttcggtgcccttgcgcagacgcagggcgttcagtacgcgcatcgaatccggcaacccggtgtgctgttccttggccaacgcaacgatggagagccggaagccctccaacaggtcggccgcgtcatgcggagcgctccacgggctcaacgcctcggcaaggctcggtttcgtgcgtgccatcagtccatcacccaggcccacgagccggtccacgtcgccaaagcctgcaaagcctcgcgcgcatcccagcagcgcatcccgtacttgcgggtcttcgagacggggcattgcgccaactgcatcatatggaacgcctggttgtcgtcgatgcgcccgttacgcctggtcaatccggcccaacgcgcgatctgctcgatggtcaccagaaacgattccgtggtcttcctcgactggatgaactcgttgagcttcggaagcaaccggatacccgcgtccttcagattcatctcgaacgttgctctgctcataatccgtaatccccttacgttggtttctcatgtcccttttgggagggagtgctggagaggtcaagacccgaagattctcggccgagacgcgcaacgcgaaatctcggccgagaatcctcaaatgggtctcgctttcggtcggtcggccgtcgattgcaagagcaggccgaagcctgccgggaatggtccccaaatccagccccacacacaatcgcgtggtagtgctgcccgattccgcctttacca

SEQ ID NO: 3463 - DNA, 11789 bp, Unknown
  R85_18m  MAG No. k141_684
acagcggctcttcgcgatgcttgccatggcggcattcatcaggaatcgttattcagttgttatctcatggattgtgctggcagcgtatcagccgcgcgccttggcgtatgcctcgtacacggcttcggtgggctcgccggtctccacgccctcgatggtgagttgccaggtcagcggttcggcctcgccggacagcacccaggcggcctgacgggcggcgccgatggccacatattcgtcggtggccggacgggtcacgtccatgccgaggattgagggggccagcgtgcggatggccacggacttcgcgccaccgccaatgagcaggatgcggttgatctcggcacccagcgaacgaatcagctcgaggcagtcgcgctgggaacacagcaggccttcgacgaacgcacgagccagattctccttggtggtgttgtgcagggtcaggccagtcagcgaggcggtggcgtccggacggttcggcgtacgctcgccgtcgaagtacggcaccagggtgatgccgccggcacccggctcggccttaaaggccagttcggccagctcgtcgtagtccacgccaagggcggcgcgaccggcgtccagaatgcgcgaaccgttgatggtgcaggcaagcggcagataatgaccggtgcagtcggcaaagccagaaatcgctccggtcaggtcgtacaccgggttttcagcgatggccgcggccacgccggaggtgccgagcgatacggacacatcgcccacggccatgccgaggcccagcgaggccatggcattgtctccgccgccggggccgatgatgcagccgccttcaacgtccttgccggcaatggcggggtcggccttgacggcggctgcctcacgcgggcccagcacggtgggcagcacaatggcgtcggcgtgggccttggcggcttcctcgccctcggcgggggtcagcaccatggcgatgagatcgcggcggtactcgtcatgcgcggcatcgtagtaaatggtgccggaagcgtcggaacggtcggtgaacagggcttcgagatgagcgtcctcgccctcggccaccgggccatagccggcgatacgccagctcagccaatcgtgcggcagacagacggcggcaatcttcttggcgttctcaggctcgttctcggccacccacgccaccttggtcagcgtgtaggaagcgacgggggaggatccgacggccttgacccagcgctgcttgccgcgggcggtcacgtcgtccggttcgtcgccctcggccggagttgcaccgagcttgtcgatcagggcggcggcctgcggggcggaactggtgtcattccagagcatcgcatcgcgaatcacgttgccctgcttgtcgagaatgaccatgccatgctgctggccgccaaccgcgagggccgcgacatcgtcaagcccgccggcctgctcggcggccttggtgaaggcctcccaccagaattccgggttgaccgaggtgccatccgggtgcttggcctgcccgaaccgaacctgttcgccggtggcggcgtccgtaatgcggacctttgttgattgagttgacgtatctacgccggcaaccagtactctcgtcatgcattcctcctcgatgagggtcgcgcttgcaagtttcggcgcgccacaaccaataagttagacgattaaactatactgtattgcagtgtatgattgcaaacggaaacacgcgagggtgcgtatctggttcaatcgtttgacgcacaatatcattgtgcgatagacggatgtgagcgcctgtgcggcgttcgagactaggggtgcaaggaggtaggagcctatggcaagtctacgcaggatcaatcaggaggatctgcgcaaccataatttgtcggtggttctcgacactttgttgcgcgcggagaaacccatgagcagggccgacttggccaaggaaacgggcctgaccaaggccacgctttcgctgttggcctcgatgctgatcgatagtggcgtggtgcaggaaggcgagccggtcgtctccaccacatatgggcggcccagcacgccgctggagattcatggcgggtccatcgccggcatcggcctgcagatcaacaccgatggctacggttgcctggcactcgatctgaacggcgacactctcggtcaggagtgggtgagtgaggatatgaccggcactgacccgtacgagatcttcgccaagctcgatgcgatgaccttcccgttggaaagccgactcaaacgacgtggctgcaaagtggtgggagccgggcttgcgctgccgggcatcgtcaccgacgacatgtggctgttggtggcccgcaatctgggttgggaaaacgtcaacctcacccggttcaacgtggtacgccggctggatgtggtggccggtaacgaagcgaagatggccgccatcgctcagattccggggtatgccaccgaacgtgcgtccttcctgaatgtggtggatcgcacggattcctttatttacctgtctaccgatatcggcatcggcggcgcggtggtgcgtgacggcgaagtggtgatgggctcgcacggattcgccggcgagatcggccatctgtccgtggcgatggatgggccgttgtgcagctgcgggcgccacgggtgccttgaggcgtttgcgggccgtcgcgccttggtcgaggctgccggcattgccgaagatggggatgccaccagcagcgaggccatcgatacattcctccagcgttggcgtgcgggggatccagacgtggccaaagtggtcgatcaggccgctgatgcgctggtttccgccatcgcttccgccgtgaatctggtggatgtcgatacggtgctgttgggcggactgtggacgcacttcggcgacgagctggccaccgtgcttgaaggccggctgcgttcggaaattctgggatacccgaatgtgaagatccgcgtgttcgtgccgccggtggcgctgcatccctcgctatatggcgcggccgaaatgggcttgcgacggttcatcgagaacccgttggggtacatgggggagaagtagcgccgggagatgctgcttgttgtgctggcgggtgcatggcatgggtgcatggcgcgtgtgccggcgttggtgggttcatgctacactttgcaagttggctgttttacgcagcgaacgtggggccgtagctcagtcggttagagcatgcgactcataatcgcccggtccagggttcaagcccctgcggccccactcttttgcgtcgcctcctgcggcggcacagcgcgtcttcacgtccagataggcgcgtacaatcccttaggttccggttcacgtcctgccataggggcatgacgacccgggtcccccgaatccataggagacgtaaaatgcagcagggtatccatcctgattaccaccccgttgaggtgacgtgctcgtgcggcaacaccttcgtgacccgcaccgctggcaaggaagatcacatgttcgttgacgtgtgctctcagtgccacccgttctacaccggcaagcagaagattcttgacaccggtggccgcgttgctcgcttcgagaagcgctacggcaagaagagcaagtagcatacttcacgccagtccgattcgattcggcatgctccggcatacccgatcgaggactggcgtttttgtattctttgacatttttttttgacctgcacaaccgaatagacaccaccgtacgaaagaaagcgtgttatggcagacgaacagttcccggcggcggcaaccgcgcttgaggagtaccagtccatcgaagaacagatggcgagccccgaagtcgtgtccaacccggacaagctgcgcaagctgggccgtcgtcacgccgaactgggtgccatcgtgggcgcctacaaaacctggttgcaggtgaaggacgatctggcagccgctcaggagatggccggcgaggacgccgacttcgccgaggaagccaagcgtcttgaagccgaactgcccgacgccgaggagaagttgcgtaccgcgctgatcccgcgtgacccggatgatgcacgcgacaccatcatggaaatcaaggctggcaccggcggcgaagaagccgcactgttcgccggcgacctgctgcgcatgtacacccgttacgccgagaagcgtggctggagcgtgaacgtacagtccgagaacaccaccgagctcggcggcgtcaaggacgtgcagattgccatccgcgccaagggcacgcccgctcccgaagacggcgtgtgggcttcgatgaaatacgagggcggcgtacaccgtgtgcagcgcatccccgtcaccgaatcgcagggccgtatccagacttccgccgccggcgtcatcgtgttccccgaagccgacgaggatgacgacgagatcgagatcgatccgaaagacctgaaaatcgacatcttcatgagctccggccccggcggccagtccgtgaacaccacgtattccgccgtgcgcatgacccacctgcccaccggcatcacagtgaacatgcaggatgagaagtcgcagatccagaaccgcgccgccgcgctgcgtgtgctgaagtctcgcctgctggccatgaaacatgagcaagaggccgccgaagccgccgacatgcgtcactcgcaggtgcgttcgcttgaccgctccgaacgtattcgcacgtacaacttcccggaaaaccgtatcgtcgatcatcgcacgaattacaaggcctacaaccttgacgccgtgctcgatggcgacctgcaggccgtcatcgattccgacatccaagccgacgaagccgaccgtctggccaaccagcagtgatagccgacctgattcgtcaagccgccgcgcagttgcgcgaagccggcatcgagacgcccgaacatgatgccaaactgttgctggccgaggccgtggacgctgagctacgcgatatcgacaaggccatgctgatgggggagggcctcgattcgctggcccccgccggcgggggctgtcgcgcagcgactgggggtggtcaggccgaccccgtcaccaatatccttgccgccttccacgccatgctttcccgacgcgccaaacgcgagccgctccaatacatcaccggccacacgcctttccgctacctcgacctgcaggtgggccccggcgtctttatcccgcgcccggaaaccgaaaccgtagtccaggccggtcttgactggctgacccggcacagcatgatccacccgcgcatggtcgacctgtgcgccggttccggtgccatcggcctgtcgatagtcagcgaagtgcccggcagccaagtatgggccgtcgaattatccccgcgtaccgccgaatggacccggcgcaatctggcggtaaccgcgaaacgatacccctccatcgcctccaattaccaactggaagtcgccgacgccacgtcactggccacgctggcgcaactcgacggcaccatcgacatcgtcatcaccaacccgccctacgtgccacaaaccgacatccccgaacaaccagaagtacgcgactgggacccggaactggcgctatacggcggttcggcagacggcacgctcatccctgaacgcattattgagcgcgcctggcgcctgctcaagcccggcggcgtattggttatggagcatgatctcacccaaggcgagcgattagtggcctatgccaaggccacaggtttcgccaccgcctccaccggcaaagattggaccggccgagaccgctatctcttcgccgagaagtagccacaggcgcggggccgccgctgctactgcgcgtaatactgcagggcggaggcgtccgcgtccgtgatttcgcgaatcggacgggccggattgcccacggccacggtgtgcggcggaatatcgcgcgtcaccaccgagccggcaccgatcacgcaaccctcgccaatcgtcaccgggcaacaatccagcacagtgaagttgaagttggcgaacacgcgctcgctggcgcgcggcatacgcagttcgacgggaggcatggtggtggattcagcattgattccgctcattgaacactcctgtaatttcgcgaaagagcatggacgaactcattgtatctacggtctgtgcgtatggggcgaatcggaaaacagcagtacggcaaacgagcgatgatgaactatgcaagtcggggcgcaatggtgcaatggtagattgtgaatacacaggcgaacggaggtgtcgtgagcgtggagggcggaacaacgctgaaagtcacggatgaatcgctggcacaagcggcgcgtgtcatccgggatggtggattggtcgtcattccaacggatacggtatatggagtggcgtgcgatccgcgtaataaggccgccatcgaccgtatctaccggctcaagcgtcgcccgcgctataaggcgttgcaggtactgctcgcatccaccgaccagcttgatgaactcggtctcgacctgccgtctccactgaatcgtttgtcggcggcgttcctgcccggcgcgttctcgccgattgccgtagcccggcccgactgcacgttggagactttggccgacaccgccgatggtcgccccggcacgcagggcatccgcatccccaattcggcgctgtgcctcgcgattctcaaggccactggtccgctggccgcgtccagcgccaaccgttccggcgacgaaagcgcacagactgtccaggaggcggttgacgcgttcggcaacgaagtcgacctgtatctggacggcggtcccacccaaggccatgtctccagcaccgtcgtcaaagccgatccgtacgcgcgcgacggcatcgagatcctgcgtgaaggcgtcatcgcccaaaacgtgattcgcaaggccctccacctcaacggcgggggactcggcgcatgagaatctacctactgattgccgccatcgccggtggcgtcacctggctggtgactccgctgattcgccacgtcgccatcgaaatcggtgcggttggcgaggtgcgtgcccgagacgtgcacaccattcccacgccgcgcatgggcggccttggcatgctgattggttttgccgtggctaccgtattcgccagtcggctgccttttctctcgggattgttcaacggcaattaccagatgtgggtgattcttgccggcggcatcatgatcagtctgctgggcatggccgacgacctgtgggatctcgattggatgctgaaactcgccggccagctgctgatttccgtattcgtggcttggggcggattgcagatcatctcactgcctttgggtggttcgctgattaccgcctcgccgagtctgtccatggcgatcaccgcattcctgatcgtcgcctcgatcaacgcggtcaatttcgttgatggcctcgatggtctggcggccggtatcgtggcgattggtggcatagcgttcgccgcctattcgtatatcatcgcccggtcttccccgagttatgcttcgttggccacgctgatcgacgtgatgatggtgggtatctgcgtgggcttcctgctgcataattggcatcccgccaaactgttcatgggtgattccggttcgatgctgcttggctatctcatcacctgcgcttcgattgtgatgaccggacgtcttgacccggcctcgattcatgccagcatctatctgccggtgttcatgccgattctgctgccggttctggtgttgttcctgcctgtgctcgacatgtgtctggcgattgtgcggcgtttggccaaaggccagtcgcccatgcatccggaccgtatgcacctgcaccatcgcatgctgaagatcgggcattcggtgcgtggcgccgtgctgatcctgtggggatgggccgcgttgatcgcattcggttcgctgacgattctgttcttcaaagcgcagcacgtggccgtgggcatggccatcgctgtggtggtgctgaccatagccacgatgtacccctatctgcggcatcgtattcccgagatccaagccgagaacctgacgttcgaatccgcacgtaaaaacgcgcagcatacagtgcctaaatcgcagtctgcagtaggggagagccgggattcgattggctctcaggcagcggattcgatgactgattcgcctgcaaattcgcgggactcgcaggtgggtgaggtgcaggacccggcagcggataagtgagcgctcacaagcgtgtgtcgtgaaggtcagcgcattttcatatagtgtttacatggctacaaaccttgatgaattaaacgcccagtcggcgtatgctccccttcccccgattttcgccaagctcggccttgcctatgacgatgtgttgctgttgccgaacgagacggatgtcattccctccgaagtggacaccagcactcatctgactcgcaagatcgtgatgaaggccccggtcctctccgctgccatggataccgtgaccgagtccgagatggccatcgccatggctcgtaacggtggcatcggtgtgttgcaccgcaatctgtccatcgacgaccaggccgctcaggtcgatgtggtcaagcgttccgagtccggtatgatcaccgacccgctgaccgtcaaccccgaggtcacgctggccgacctcgacaagctgtgcggcaagttccacatctccggtctgccggttgtggacaaggacaacaagctcgtcggcatcatcaccaaccgtgatatgcgcttcatcgcctccgaggattacgacaccctgaaggttaaggatgtcatgaccaaggagaacctggtcactggcccgtccaacatctccaaggacgacgctcaccgtctactcgctcagcacaaggttgagaagctgccgctcgttgacgaggaaggccacctgaccggcctgatcaccgtcaaggacttcgtcaagaccgagcagtacccggacgccaccaaggatgagcagggtcgtctgcgcgtggccgccggcgtcggcttcctcggcgacgcctggcagcgtgcctccgctctgatggaggctggcgtggacgtgctcgtggtcgacaccgccaacggtgaggctcgtctggcactcgacatgatttcccgcctgaagcacgactccgccttcgacggcgtgcagatcatcggcggcaacgtcggcacccgctccggtgctcaggccatgattgaggctggcgcggacgccgtcaaggtcggtattggccccggctccatctgcaccacccgtatcgttgccggtgtcggtgtcccgcagctcaccgccgtgtacgaggccgcccaggcctgccgtgccgctggcgtgccctgcatcgccgacggtggcatccactactccggtgacatcgccaaggccctcgtggccggcgcctcctccgtgatgctcggcggcacgctcgccggctgtgaggaagccccgggcgagaaggtgctcctgcacggcaagcagtacaagctgtaccgtggcatgggctccctcggcgccatggccccgcgcggcaagaagtcctactccaaggaccgctacttccaggccgacgtgacctccagcgacaaggtcgtgccggaaggcgtggaaggcgaagtgccgtaccgcggcccgctgaacgccgtgctctaccagatgctcggtggcctgcaccagtccatgttctacatcggcgcccacaacatcgccgagatgccggagcgtggcaagttcatccgcatcaccgatgccggtctgcgcgaatcgcacccgcacgatatcgtgatgaccgccgaagccccgaactactccggcttccacaacaactgatcggttgatgcccgctagcttgcgctagttaggggttgattccttgtgaaaagggtctgcttatgcaggcccttttcgcgtatgtggctcgagatagcttgtatgcgctggggtatagtctgaactgttctgcataagcgatgaccagcgaagaaaagaggcacaccatggtcgacagccatgacgcggaaacgtacagcgcgaaggactcgcgcctgatttggatcgattgcgagatgaccggacttgacatcttcggcggcgacgaactcgtcgaggtgtctgtggttcccaccgactttgacctgaatgtgctggacgagggcgtggattacgtcatcaagccgtccgagaaggctgtgaaccacatgaacgatttcgtgcgccagatgcacacccgttccggcctgatcaacgagtgggagaatggcctgagcctggccgaggccgagcagaaggtcaccgaatacgtgctgcgcttcacgccggaaggcgtgcgcccgctgctggccggcaacaccatcggctccgacaagaagttcctcgaccactacatgccgggcctcatgagccacctgcattaccgcagcgtggacgtgagcaccttgaaggagctcgcccgccgctggtacccggccgtctacgagaaccgtccgccgaagaacggcggccaccgtgccctcgccgacatcatcgagtccttggacgagttgcgctactaccgtaaggccttcatggcccccgtccccggcccggatgatgccgcctccaaggccatcgccgccgacatcgtggccaccagcattctcaataagtagtccgccgtacttggctcccctccctgaggggagtctagagaggttgatatgcgccaaaccgaagccctagccattctgaacgccggcgcgaacgtgtttctgaccggtgcgcccggtgccggtaagacctatgtcttgaacgagttcatccgccaggctcgggccgacggcgccagcgtggcagtcaccgcgtccacaggcatcgcctccacgcatatcaacggccaaaccatccattcgtggagcggcgtcggcgtggccaccgccctgagcccgagtctgctcaaactcatcaaatcccggcgcaaacgcaagattcaggctacggacatcctcgtcatcgacgaggtctccatgctgcacgcatggctgttcgacatggtcgaccaagtctgccgcgaagtgcgtcgcgacccacgcccgttcggaggcatccaggtcgtgctgtccggcgacttcttccaactgccgccggtttcggtgtccgggcgcaaccgcgacctcatcgcccccacccccgaattcatcgccagtcgcgaacggtatgcccgtgccggcttgaaccccgaaggcttcatcaccgaatcgctggtatggcccgaactcaacccggtaatctgctatctgaccgaacagcaccgtcaggataccggcgaactgctgaccgtgctcaccgacattcgcgaaggcgacgtgacccagtccgaccgtgacgtgctcgtcacccgtctgggcaaactgcccgagcccggccaggtcgccgtccacctattcccggtgaaccggcaggccgacaatctcaacgacatgcgcctgaaccagatcatgcttgagccgcacgagttccacgccgaaaccgcgggtcccgccaatctggtcgaccggctcaagaagaacatgctggcccccgagcgactggtactcaaggaaggcgcggctgtcatggccctgcgcaacgacaccgatcgccagtacgtcaacggctcgctcggcaccgtgcgcggcttcgcgcaggagaacaagggcggctggccgatcgtggaattcgaaaacggcaacatcgtcaccatgaaacaggccacatgggaaatgatggacggcgacaccgtgctcgcctccgtctcgcaggtgccgttgcgttgcgcgtggggcatcaccatccacaagtcgcaaggcatgacgcttga

SEQ ID NO: 3464 - DNA, 3629 bp, Unknown
  R85_18m  MAG No. k141_892
cagactcaacgaaaggtgcgattctcccttaacggcacgccgaatcgcgccggcttcgggcgcataccgggatccgccgcaatccgggcattcgatggtcacgtccggcaggaactgcacatcgagcgagattgaaccggtgccgtcgcatgtggggcaacgcagtctgccagtgttgtacgagaaatcgccagccttccagccgcccgctttggcgtcgtccgcgcgggcgaaggcgcggcgcaattcgtcgtgaatatcggcataggtggccacggtggaacgcacatttgcgccaatcggcgtggcgtcgatgagattcgcgcgattgatgccctcggctttaagctcgagcacgtgttccggcaaccgctcccccgccgcctgcgctttgagtgcgggaatcagcgattcgagcaccatcgtggttttaccggagccggagacgcctgtcaccgccacgagccggccgcgcggaatatcaacgtccagcggcttgaccgtatgcaactggctggttgtcatgcggatgtggccaaggtcgaacacctgcggttccgccacgcgctcacgaatacgcgcgtttgcctgatctgacaggaacggtgcaatgcggctgcctggattcgccgccacctcgccgaccgtcccttgcgcgatcacatgccctccttcggcgccggcaaccggtcccatttcgataagatggtcggcggccttgagcacgcgcacgtcatggtccacgaccaccacggaattgccgtccgccaccaagtcatgcatcacgccgagcagcccatccacgttcgagggatgcaggccaatggacggctcgtcgagcacatacagcacgccggtggtgcggttgcgcacggcacgggcgagctgcacacgctggcgttcaccggttgaaagcgtggcaccggcgcggtcaagcgccagatagccgaggcccagatccaacagtcggcgggccacgtccaggaatgattcgcagatgttggtggccatcgtccgcatgtcggcaggcagggattccggcactccgcgcacccaatccaccgccgcatccaaggtcatcgcgctggcttcggcaaggttcagcccgcgcacgtgcggagcccgggcgacggcgctcagtcgggtacctccgcagtcggcgcatggtccctccttgagaaatcgggccacgcgcttcaggcctttctcgtccttggctttggcgagcgcgttctccaccgtgtatacggcgttgaagtaggtgaaatcgagttcggcgaaatcgtcgcctttcttcggcttgtaaagaatatgctttttgacggccggcccgttgaatacgatgtcacgctcttcgggcgtgagctcgctgaacggcacattggtgcgcacgcccatcgcgccgcacacctgcttcatgaggtcccacatgagcgaaccccatggcagcaccgcaccgtcgtcgatacttttcgactcatccggcaccagggccgcacggttcacttcgcgcacaatgccggttccggagcaggtcgggcaggcgccggccgagttgaaggcgagcgattcggcgccgggcgcgtggaattccttgccacagctgacgcaagtaatgggcagtccggccgccacgttcagcgtcggttcgttgcgcgccccgcaatgcgggcacacgtgcgaggcgacgcgggagaacaggagccgcagactgttgagcagttcggtcatcgtgccgaacgtcgagcggatgccaggcacggtgggccgctggtgcagggccagcgcggccggcacatgcagcacttcgtccacttgggcgcggctggcctgggtcaggcgacggcgcgtgtacgtggacagcgcttccaggtaacgccgcgaaccttccgcatacagcacgccgagcgccagcgagctcttgcccgaaccggagacgccggccacgcccaccagttcgcccagcggaatgtcgatgtcgatgttcttcaggttatgcacgcgcgccccgcgcacttcgatcgcctgcggccgttgatcgttgctcacgctcggcactgctccgccgccaccctactgtctgacctattatcaagcgtcacgccgttacctctttctcgacctcgccctagaccgccgccgcacgagcttcatggtctccagtatcatcacgaccaacgacggcagccgagaggctttcgctattgagcaccgcctctcgcatgctgttcgccgcgacattaccgagactatccgcgtttagcataatgagttcacggacggcgggcataatggcaatagaagtccgtccacaccgaaggagccccgaggatggaactgcgcgtcctgcgatattttctggcggttgccgaggaaggcaatatcacgtgggccgcgcagttgctgcgtatttcccagccgacgctctcccgtcagctcaaacagttggaagaggaactgggcgtcacgctgttcgaacgcggcagtcacaccatcacgctcaccgaggaaggccggatgctgcgcgagtgtgcgcagaccaagtcaatacgagttcctgcgcaccggcattacaaagcactggtcagcgatggttcccggaaaccacccgttggcggaacgcgaatcgttgaccccgcagaatctcaaggatgtgccgctgctgttcccggtgcgcacgcccgtacacaatctgctgctgaactggttcgggcaatacgccgatcaaggcggagctcaacgccgggtatcacacgccggaacgcacccatgagcttttcgaggaactggtgagccatcctgttgaccccacgttccggttgaacgcgccattccgcaccgacttcggccgcgacgaacacggcacgcagggagccgtcaagcgagggcgtgaaggtggcgaccacaccgaatacggccatgccgatcgcgccgccgcgtagaccggcagcttcgccaaggccggccatcgcctgcatatttccacaccggcggtggccaaacagatcaatacgttcgaaaaagaatacggtctgacgctgttcgaccgatcgcgcagtggagtgcaactcaccaaagccggcaaggagttcgtcgaggacgcgcagatgatcgtgcgccaatgcgaggagattctacgtcgtgcacaacggcgcagcaccgacggcatcgccaccgtccgccttggcgtttccatcctgcaccccggccgccgcatcctcgacctatggcagcgcgacgccggcaaacacaccgacatccgcctggaactggtgtcgatgcccgatgactccgaagcgatcaacgacatcgtcacccatctcggcgaagacgtcgatctgatatccacggccttcgacaccggctattgggacgacaccggcaacaccctcgccctcgattccgagccgctgtgcgtggcggtgccgcgcaatcacgcattggcgagacgcgcacggctcacattgaaagacctcgaaggcacacgcatccgcattctcaaacgtcatcgcggcgccaacgacacagcccgggacctgtcagaacaatgccccgccatcgatttgatcgacatcgaccactacgacctcgacacgttcaacgactgcgccgaatccggcgacctgctc

SEQ ID NO: 3465 - DNA, 12217 bp, Unknown
  R85_18m  MAG No. k141_915
cggcggcttgaagtccgggtcgtaggggagggacacgtccacgcgcacgccgtagtagttctgcacgcggcgctcggtgggcaggccgttgtcgtcccagcccatcgggtagaacacgtcgtagccgcgcatgcgcttgtaacgcgcaatcacatcggtatgcgtgtaggagaacacgtgacccacgtgcagcgaaccggagacggtgggcggcggggtgtcgatggagtagacggccttgcggtcgcgggtattgcggaatttgtaggtgccgtcttcatcccagacggcgcgccacttgtcctcaagtccgtccacaccgaccttgtcgggcagcggggtgaggttggcgttgatgatggatttgccttcagtcataaagccaaagtttatgcacgttgcatgacaagccgaactgtacagtaaacagcccagtaggctgttcgcaggcgagatacgaacgatcgaacgatagtgagccaaggactatcgggcgtagcccgtccgtgactgaaggttgcctacttcaccgtcaacccggccagcggcatgcgacgattgatcatcgaggtcgggtagccggagaccttggtggacgccacagtgaagcatttgcgggtatacagccaatcactggccgcatcctcgctgatcagccgggcgtacgccttcattcgtgcctcataatcggcgtcattagtggcggcgcgagcatccgcataggcctgttgcgcttcggtatggtcgtaatggaacatggaatcggggtcggcgaatatgccggcatcatccgtgtcgtccatgctcatcacggtcagttcccatttgccgtccttgattcgtttggcataatcctcatcggagagcacttcaaggttcaccgtggggcgcggctgccgctcgatctgctgcttgatggtttcggccaacgaccggtattcttcgggaaccaccagattcaccgtagtcagatattgcgcaccgaagtaggagaacatctgcccagcttggttttcgtcatgcggatacagtccggtcaaatcttcgtatccgggttccagcgggctgatggggccgcccaatgctccggctgcgtcgggttgggcggaggcgatgccggctgcgtcgatttgatagcggaaggctttacgcgcctgttcgtcggagagcagcgaatcgatgccgttgttgtaggccagcagcaccttatccgtagtggccccctccttgacggtcaggccatccttgccgttcaaaccggtggccgtcgaagccgaaaccggtgccgccatatcgagactgccgtcggtcagggccttgctgagcgcatcggcgtcggagtattgcataaattcaacgatattgctggccgcttcggtgccatggtaggtatcgctgcgcgccagcttcagggaatggccaggctgaaaatcggccacggtgaatggtccggaacctatggccttgcgttgataatcggcactggacgactcggaatcgtagacaatgccgagtttgccggacagcgctcgcagcagcgtcggattgggcttggcaagcgtaatgaccaccgtggtggcgttcggattggcgaccgacgtcagatcgcccaattcgtcgacgtccgccaccttgttggtcacgttctgttgcaacgaccacacggcgtccgaggcgtccaacgtatgaccgttcgagaaggtgacgcccgattgcagtgtcagggtgacggtcagtccgtcatcggaagtcttccagcttgtcgccagtcccggctgaatcttgttgtcttgatcgacggtcactaatgtctcatacacattgtcgacgagcaggcgctcggctgccgcagaggaatcggaccgaatatccaaggattgcggcatatcgtcgatgccaatggtcacatcggcatcgagggatgatcccggctggaaccggttttgcatgaacgtccatcccgcaaccacgagtgcgccgagtgccacggcgactccgagaaaaatcccccacttggaccatgtattgttccgcttgctgtgctgcatggttttcagtctagcggtggattcagcctagaatccgcaattcaccatgatgaggtatgagttagcgcttggacgtgctcttgccggcgggcggcgcatagctagggcaggtgtcggacagcgggcagttggcgcagtcgggggtacgtgcgtggcaggtggcccggccgaacaaaatcagtcggtggctgagattcgtccactcttcgggcggaaaacaggcggtgatttccttctcgattttcacgggatcagggtgtgcggaccgccaatccgaccgccaacgcagtcgtccggttacgcgcatcacatgcgtatcgaccgggaatccggggatatcgaacgcgttgccgagcacgacgttcgcggttttgcggccgacccccggcaagctggtcagttcatccatcgtgcgcggcaccacgccgccgaaccgttcgtccagtgccgtggccagtccgatgagatgctgggttttcgaacggtagaaccccagcggatgaatgatgtcttcgacttgggccgggttcgcggccgccaagtcacgggcggtggggtaggtggcgaacagttccggggtgaccgtgttgacacgcttgtcggtggtctgggcgctgagtacggtggcgatcagcaattcgagcggattcgagaaatgcagtgcgcaagcgggtgccggaatcacctggcgcagaatgtcgtattcgtcatgcatgcgcgtgagacgcgcggatttggtttctctcatcgtatggacctaagcggcgtaatgtcgatgattgatggtttgtagcgctgctggtctgtcaggcggcggtgttgagatcgggggtatcgtcatcggtgccgatggcggcagaggatgctttggcggcctgctgtgcggcggcagtttccttatccgtctccggcgggtcgaatcggtagcccacgttgcgcacggtgccgatgaggtgttcgtattcgccgccaagcttggcgcgcagacgacggatatgcacgtcgaccgtacgagtgccaccgtagtagtcgtagccccatacttcctgcagcaactgggcgcgcgtgaacacgcggccggggtgctggaccaagtacttgaggagttcgaactccttgtatgccagatcgatggggcgtccatgcagggaggcggtatagccgttggtgtccacaatgaggtcgccggagcgaatctggccatcttccaccgtggtggtggattcggcgggagaaccggctgctgcggctgcgggagcgttgccgcgctcggagaccaatcgcaatcggccctcgacttcagccggggaagcggtggcgaccaccacatccgcaatgccccactgggagttgaccacggtgaagccgccttcggtcagcaccagcacgattggcgtggacaggccggaagcgtggatgagacggcacaaggttttggcggtcgccagatcatcgcgtgcatccagaaacagaatggtgttctccggcatcttcaccaagctggctgcatccatcggcagcacgcggacgcgatgagaaagcagggcgagtgatggcaaaacggtggcggggtcgctggcgaaagtcatcaacgtaagatccgtcacgctaatccccctttatcctgcaatgtgttacgcaattgcttggtgtggctgtacgagtcgtcagcggcgttatgccgctttcgcgcggtttttcattattctacgcgcttgtagtggacacatgggttacaagtttgcggaatatggaacggcagacgtccatcaaccgatgacacggccgagcaccagtgcggttgcggcgatggtcacgcccatcagcattaccggcatcaggccggtaccgatccacggatagcggatatccgggtccggatcggcgtcacgcacccacaacgtggaggccacggccaaggccagtcccaaaacgatgaggatgatcagggcaacggttcccgcaacggtgcccttggcgagcatcgcgcccaaatcaggcaggaagcaccagccggccacggcgagagccgccacacctgaagtcacggcgtgagagagtgcgcggataagatgttcgcgcttctcacgagccatctggcgcccgaaggagaagaccaccagcaccaccagcagcaggcccatggccagtgcccatgaataccaaggaagtaccgagccatccgcagcggtctgatccggcggaaccttgccggtcgggaaaggtacgatgacgaaaatcagagaaatcgcgccaaacaccaaagtgacgatacgatccagcatgctgccgcggaacggccagaacacgacaaatgcggccaacgtcagagcggcgataatcaaagggatgatggggacggtgccaggggagggaatgaccgtggctgcgatgagcagtacataggacgtcagttgggccaacaacatgctcagggctttgttcttccaaccctcctgggtgatctcggtcatgatacgcctctcagataatcgaatttccatcccaatcctacgtcgggcattggaacggtgaaatcaaacaaaatagccctttctggtgaaggggcttatgacactaaatcagaacgcgataacgcccaaatgctccaacagcactttgacgccaagtagaatcagcaccacgccgccggcgatctgcgccggctcctgccagcgggagccgaacgcgcggccaatgtacaggcccgcagcggagaacagtccggtgaccacaccgatgctgaggatggcgaatgccatatgggctttggtgaacatgaaggtcaggctcacgcccacggcgaacgcatcgatgctgcaggccacggccaggggaagcatatgcttccaatcgaactgggcggtctccttggagttttcctcatcttcttcgaaggcttcgtgaaccatgttgccgccgatgaacaccaacagggcgaagatgatccaatgatcgaattgggttacgtatttgctgaatgtagatgccgcgaaatagccgagaatggggaacagcatctggaatccgccgagccagagggcgcttttcgcggcgtcttgcactcgtacgcgggatacggccagacctttgccaatggatacggcgaatgcatccatagctacggaaacagaaataagcaggatttgaatgattatcggaatcatggtgcgacagaaggttcatcgccggattaccgtgcgatgggcctcgaccagcgttcctacacgccgcctacgcctagctgaaaaatacaccagcactatatcacgcgatgcacgtcgaatcaaaaaggcgggaggcctccggagaggtctcccgccgacgattcggaatcgaatcacttgccttcgttggcgaggcgttcgcgtgccgcgatgatttccttttcggcggcgtccacaccagtccagtagtcgcccggcaggacttccttgcccggctccagagccttgtactgctcgaagaagtgcttgatttcggccttgtggtactcgttgacgtcgtcgatgtccttgatgtcatcgaaacgaacgtcggcgggcacgcacagcaccttgtcgtcgccgccggcctcgtcgaccatgtggtacaggcccacggcgcggcactcgaccacgcagcccgggaacacggagttcggaatcatcacgagagcgtccagcggatcgccgtcctcgcccaaggttccgtcgatgtagccgtagtcatccgggtaacccattgcggtgaacagggtacggtccaggaagacgcgaccggtctcgtgatcgacttcgtacttgttcttggagccgcgcggaatttccacaacgacgttgaaggtttctgccatgtcatttctccttgaaaatcgacagttacgttatcgtctcaccacaataccctgtttgcgcctgcaaaacaggtgcggaactcaagaaaccgtgctgagattatgccgacactatgtctaaacagacgaaatcctcccctcaaggggaggatttctagcggtttacgcacacgataaacccatgcacgtcaacggcatcactgttgcattaccgttgcactaccgcatcactgcacggacaggatgtgggccacatccgcccaaggcgccagagacacgtagttgtcccaaccccactggaattcgcggccggtcagctcgtcgcgcacgttgagcgggcggtcggtgggcagacccagctcgccgagttccaggtgaatcatcgactggtgtgcgttgtgtccatcgaggttcacgaccacaatcagcgtgtccgcttggccggtaccggtcagttcggccggcgtgtggcgtgcgaaagccagaatattctggtcggacgtaggcagcacggtgaggttgtggtagctcaacgcggccgggtgggcgcgacgaatcttgttgagcgcggtgagcatctcggccacgccgtactgcttggccttgctccaatcgcgaaccttgacctcgtacttctcgttgtcgatctgctcttcgaagccggggcgctgcttgttctcgatgagttcgtaaccgttgtagataccccaggacggcgagcccatggctgccagcaccgcacgcacgcagtggccggctacgccgttgtctcgcacgtaagcggtgagaatatccggcgtggtgggccagaaggtgttgtgctggtagtagccgtcgtcgccattggtgatcggcagatactcttccagttcgtccttggtgttgcgccacgggaagtagcagtgggactgggtgaagcccacgtagctcagggcacgcatcatgcccgggcgggtgaatgcctcagccaggaacaggatctccgggtgcttcttggtcacggcggcaatcacgtcctgccagaaacgcaccggcttggtgtgcgggttatcgatgcggaagatggtgacgcccgcctcgatccacagattcatgatgcgttcgacttctttttcgatgccgggcatgtcggcgttgaagtcgatcgggtagatgtcctgatacttcttcggcgggttctcggcgaaggcgatggagccgtctggcttgtgacggaaccagttcgggtgggccttgacccacgggtgatcgggcgagcactgcagtgcgaaatcaagcgcgatttccagacccagttcatgtgcacgctggcacagggccttgaaatcgtccatggtgccgagcagcggatccacggtgtcgtggccgcccagctcggagccgatgccgaacggcgagcccgggtcatcggggccggcgaccagcgtgttgttgcggcccttgcggttggtcacgccaatcgggaagaccggcggcagatagacgatgtcgaagccttcggcagcggcgcgttcgaggccggccatcgaggtcttcagcgtaccctgaatgatcttgccggtgttcggatcgatggtggcgccttcggaacgtgggaagaactggtaccaagccgcgaagctggacttcgggcgttccaccttgaaacgctggggctggctgggggagatgccatcgcgcagcgggtgagtctcgtgcagggcggcgatggtagggttgtcgccggcggcgaggcgatcctcggcgctcagcgtctgatcggccatggtctcagcggccttctccaaggtcttgcgatcgcgtgcggtcaggccggcgtccggggttgcggcccaacgggccagcagctcggcaccggaattgagcgcgttgtccacgtcgtccatcacacgcaccttgatacgggcgtcatgcagccaggagacgtacgtgtcttcccaaccttcgatggtcacggtccattcgccgagctgacgcttgacggccgcgtagccatcctcccaaggcttcagatcgctgtgttcgccgcacttgaccatcacggtccaacgatcgaggccgggatttacgcaggtcatggcccggcgcatggtttccttgccgcgcgggttgcgcacgatggcggtggcacccaccttggtacggccttcgatgaacacttgggcggtcatctcaaacggttcgccgagttccacacgggcggggaagatgccacgctcctcggtgggagtgatgtccatgacattgatgcggccgaactggccgggctcgtttgcttcgatggacggtgcgggggcttcgacagccaggcctttcagcgctgctgcggcgcgtgccgtttcggcgctgactctcttgcgcttggttgcggggctctttcgggcagaagtcgtctttgacttcgtcttcgtggtgttgttatcggtattactagtgcgcgtggtcgcgcgatgttgtactgctgccataaggccctattctaggggcttttgaacatatgttgcacattgtggataactttcaggtaaacgttcggtcaaccgcatgaggtggataactcggcggaagagttatccacaactcgccgacaaacggcaagctcggaccacataggccgaaaaatcggctgtagcgaatgaaaatctgccatgatcgtggcctacccgcacacagtgcagtatgcggggaacgtaccaggaaaggacgaatgatgataacgacatggcggcaacggggcatggccatcgtagcgatgctgaccggtctgataataatggtgggagtggtgttcggctcggcgaatacggcgtatgccgcgacgttgacgcccgccgacgaaagatatcacgtgatgtttccatacaacgatatggaatattacgtcggtgtcgcggggctggacgcttcgggcaacaaatactactgcatcgaagcggggaaactgagcgactatgtgataggccccaccacggtgcttgcctccgatgagaacgcccggcgtatggcatggatccttgaccggtaccgcgacacggatgccgccacccatgcggcgatcggcatcatcgtgcaggatcacttcgggcgcgatcgggacgagtgggcgagacagatggcggtcattcaaggccggtatcccgagatcgtggcgaaggcggcccggatatgggatcaatcggccggcaagacgcctgcgggcacgacggtggaacgcaccgatgccgaggctttgcgcagcggttccatctcggtgaaagtggtgaaccgcgacggtgacgcgatcgcgggagtgccgttcactgtcaccttgcaggggccggcgcggttcatccaaggcggcaacacgttctcgggggtgtcgacgagcgccggatcctcgatcgcgtgggaggcgaccggcgccggcgaggtgacggcgaacaccacatacgagtatgggcggatgcacgtcatggacagcactcaggacatgctggccttcgattcgatggcttccgccggcggttcgtcgtcgacgttccaggtgcgcaaggatttcgttccgtcggtgtccacgcaggtgtccgataaggtgcttgatgcggcttcgccggtgttcgatgatgtgaccagcggcgtgggggacgagggcagtcattgggtgcccggtctgaagctgcaggcgcgtggatactatttcgacgggctcggcaaggacgatctgggcaaggtcatcgcgccgaacgcacgggagagcgcggacgcttttctcgcccggctggcgtcctcgggtcataagccgagtgcttatggcaaggcgtccttcaccggtgtggggcagcgggttcgtgtgcgggccatggccaagccggacggtgacgccgcctatctgactccgaagaccggcggctttggcacctgggtgtgggtgttccggcggagcgagcaaagcaaacgggcgcaggaataccttaccggcgactgggtgagcccgttcatggaggcttcggaaagcaacgtggggcgcgggaaggtcgaagtcatgtcgacggttaccgaacattcggcggatatcggcgccgaactcagcgacaccatcaccgtatcggggttcccggcggaccacggccagttcatgggtgatgaaacctatggtttcgcggcggatcagccgtatgcgacggtgagcgtatggtggtccggcgatcccgacaacccctccaacgatgaggcgtacaagccatccgggggagaggtccccacggaagacgacaaccaccggttgctggccacctgggagattcccgcgatgaacggcacgttcaaaatcggcgccggggcgttggacgcgcatggcgctcccatgcatctgaccgccgaacggcatgggtggtacgtgttcgtttggcggttcgagggggatgaccgtgtttccccggcgtccagccggtatgacgatgcctgggagcgtgtgcgggtgttgcccccatgcgagtcggagaaaccgtgcgaaccggagaaacccgagacgccaccggcgccggcggaggcaaccacgcccaaccctcgcccgtcactgcccgtcacgggtggcgatgtgtcgcttgcctcggttctggccgtgtcagctctggcgataggcgccatactgtccatcgtcgttcggtggcgtcgttgctatgaccgatccaagcactggacgatgcgctggccgatacgttgacccgctgcggcatgatgccgatgatgtcggctggatggtgaaccgcactccgcttctgagcagaaggacgggagctgggcacgaagtcgattgtgacatacgacttgtgcccggcttccgcttcgttgagaaacttcacgcctgtcgcctcccgtggattagacaactgaaggtccgcgatgaaaacgacgagacgtttatgatcgccgacttccctgggcaccgtagctgcctgatcgcctttcatccatatcgccccggtcaggtcgtcacctacaacggcggcggcagcgtcgccaccggcagcaacgccccaccgtcccgtaccgtgaccgtccgtgcagaccctcggccccgtatggggctggacgtgggccgatccggccgcgacgaccatcagcgccgtcgccctgaccatcggcgtcgtcatcggcgccagcgccctcaaggccaaggcatccaaggccgaataacaagaagcccccgaacctgaaccgtatcacgcggcaggttcgggggcttttcgccgtatatgggtcaggccatcgcgggctgtgcctgattggcggtcaggtatgcggccagtgccttgcggatcagagcgctcttgccgatgtgctctcgttcggcctgtgcccgcacctgtgcgtccatgtcgggcgtgaggtatgccttgtagagcacgtcggccttccggcggggctggtcggcgagggggcggccggcgaagatgtcgtcgatgtcatccatcgtgatcgccctttgcgggcggatggtctcgccgatgatggcgggggtgtgctcggtgtattcgtccgagagctcgtcccagtctgtttcgttgctcatgatgtcctccttggtgttttttagtcgtcgaacttgtagagccattcgcggcggcagtccatcgcgtggaacaccttgcgggtgcgctgggataccagcagctccacggggcgttccctgaactcgtccgggtgtccgaggatcgccatgaccctgtcgccggcgtgtctcgactgcacctcgaacacggccaccggatgccggaatatgtagtcgatctgtggctgtgtgagccagtgcttgaaggctgacggctcgcattcgatcatgcttattgtggtaccataatttagtaccacaatcaatttagtaccacaatcaagtcggggaaacggaacatcgtgatcctcctaggcggcgaggcgcggggcttccacggcggcgcgcagctggtcgtcgggcatggcgatgtaccgttgcgtggtctcgaccgaggcgtggccgctccaccggccggggaacagatagccgttggcggatcggatcagcagggcgaggtcgtcgccctccacgtccctagatcgcccttaagcgccctcgacaatgcggacatctggcatcggcgcgtgccgatcgtgttgggggagtagcccgccgccttgagggagtcgagccatagattgattgattctgcccagagcgggcttggatgttgttttttcacaggacatcatcgccccgatcggatatgcggccccgtagggcacgacggcggataaacgaaaagccgtcacgaataatcgtgacggcctcgcccacagtagcggggcatggatttgaacc

SEQ ID NO: 3466 - DNA, 5212 bp, Unknown
  R85_18m  MAG No. k141_978
ctcgaaatccttcaggccctcaccgttggaggcgaacaggatcggcttgccggtcacggacgccacggacagcgcggcaccaccgcgggcgtcgccatcgagcttggagagctccacgccggtgaagtccacgccctcgtcaaaggccttggcggtcttgacggcgtcctggccgatcatcgcgtcgatgacgaacaggatttcgttggggtgcacggcattgcgaatgtcgcgggcctgcttcatcagctcctcgtccacgcccagacgaccggcggtatcgatgatcaccgtgtcgtagagcttctgcttggcgagttcgatggaatcgcgggccaccttcaccgggtcgccggaggtctggcccggagctgcgacggcctcgccgccatcggattggacgcccttttcgggagcatagacgggcacgccggcgcgttcgccgaccacctgcagctgcgtcaccgcgttcggacgctgcaaatcggccgccaccagcagcggcgtgtggccggaatccttgagccagtagccgagcttgccggccagcgtggtcttaccggcaccctgaaggccggcgagcatgatgatcgtcggcgggttcttcgcgaagttcagcggacgatcgacgccttggccgagcacgtcggtgagctcctcgttgacgatcttcaccacctgctgggcggggttgagtgcgtcggacacctcggttcccagtgcgcgctcacgcaccttgccggtgaaggaacgcaccacgtcgagcgccacgtcggcgtcgagcagcgcgcggcggatttcacggatcgtaccgtcgatatccgcctcggaaagcttgcccttgctcttcagatgcttgaacgcattcgagagtctgtctgtcaaagatgaaaaagctgccataatgggcaacagtctagccgccacgcgggaaattgcggtgttggggacgactctttccggggaatgcgtcgcgtagtagtcagggatgttgggcattcagacggcaaatgccgtgccgtccgctcgtggcgaagccaatcgagtgcttccgataccatggaaaccgtaaagaatcctgtgttttttggaatgcttacgctgttttgaaaatcgctggacaccgcttatacgcagactgccgtgcgctccgaaccatgacgttcgggccaacgcagacatgccgtgcaataaggaaggcccaccgatgcccacgcaaaaactactcgaacgcaaagcactgatcgttggcatagtcatcaacgtgctgcaggttctggccggcatggccgtgttcttcatgaccggcctcaaggccatgttcctcgacttctccttcaccgcgatttccgtcctgtccggaatggtggcggtgtatctctcgtcgcgcacggtgcgaaccaccgagcgcttccccaatggcatgttcgcactggaacccatctacgcgatctgcaaggccattttcaccatgtcgttgttggtgtattcgctgattgacgtgtgccgagtagcgtacgactacttcgtgttcgggtccggcgaacgcattgaaaccggcccggtggtcatctacgagatcctgaccgtaatcgtgtgcttcagcctatacacgtattaccggcgttccaaccgctccatcggcgattccagcaccatgctcaccgccgagtgcaagagcacgttggtcgacggatcgatgtcgttcggcatcggcgtggttgccatcttcctgatgctgctaccggccggcggtccgcttgacttcctgcactacaccggcgatttcttcatcaccgtggctttggtggcattgaccatcaaggagccgttcagcgtgctcaaagaggcgttcgtggaattggtcggcggcgtgcatgacgacgatgagaccaacgcctacgtggaggccgaggcacagcgccatctgcctgccaacaccgactacgagcagacgctgatcttcaagaccggcatgaactacaccgttgacgtgtatctgagcggcatcggcgaaaccattgatgtagctgacctcatcgaatgcaagcgctcgctggagaaggagctcatcaagcgcctgcacatcgtggacgtggacttcgtgtttgactgattgatgggtttgaagcggctacttcaggctccaagtggaaccctgcgggccgtcttcgatggcgatgccggcctcggtcagggcgtcgcgaatctggtcggccttggcgaagtccttggccttgcgggcctcggcgcgggcgttgagctgctcggcaatcagtgcctccagcgccgcatgttcgggcgactcggccgtgccatcagcggcaccgccagcagacacccacggctcggccagcgggtcgagacccaaggtgtcgagcatggcacgcacggcgagcagcgcctcacgcacctcggccttggcggtttcggaatcggcgcggtcagccagctgtgaaagcaacgtattgccggaacggatggcggtgaagatcgcggcggttgcaccagacacattgacgtcgtcattcatggcggccacgaaatcggcgggcaaatcgtcggcggagacggcagcaacctcctcgcgagaaggctgaccgcccagtgccacaccggctcgttcgatgaagttcgagacgcggtcgtatgcggcctgcgcctcgaccagcgcctgatcggaccattcgagcatcgaccggtactgcacggagcccaaagcgtaacgcaccacccaagcggaatgctcggccagcacgctcggcacggacaggccggtgcccagcgacttcgacatcttctcgcccttggcggtcacccatgccgaatgcatccagcgcgcagcagaggggtagccggccgcgcaggtctgcgccatctcgttttcgtggtgggggaagcgcagatccaaaccgccgccgtgaatgtcgaagccatcgcccaggtaacggtgggacatggcggagcattcgatgtgccagccagggcgacccacgccgaacggcgtcgaccaacgggcgtcctcgggatcggtgtccttgggggccttccacagggcgaaatcacgcgggtcgtgcttgtcgggggaggcgtcggccgggtcgaccggattgtacttgtcggcaccggtggcgtccacggacgggcccatgcggtcggccacggcagcggcctcatcgacttcggaagtctgcttctggtgggtgagttcgccgtaatgcggccaggatgccacatcgaagtacacgttgccggtgggcttgccatccgcatccgtgaccacatagccgtggccgttgtcgagaatgcgctgaatcaggtcgatcatgtccgacatgtggccggtggcgcgaggttccacggtgggcggcagcacgccgagcgtgttgtacgcctcggtgaattcgcgctcgtagtaataggcgcgggcccaccaacgctggccggcggccgcggccttatcgaggatcttgtcgtcgatatcggtcacattacgcacaaaagtgactttgtaaccgagcttcaaaaaccagcggcgcacgatgtcgaacgccacggcggcacggatatggccgatatgcggtgacgactgcacggtggcgccacacacataaatgccgacttcgcccggcttgagcggcacgaaatggctgacctggtgcgaggcggtgtcatacagattcaggccttctgcggccttggcaacatgcaccggcgtcaggcttgaaggcatgacggaaatgttgaaatcctgcggttcttggctgtttcccataacgctcaagcgtagggtccgaaccagacatgctgaatcgttactcgaagagtttgatgaacgcttcacaggcggggcccgaacgaggtgacagacggatgagaagcgggacaacagtctcgcgagaatacgtctttgaccgctgcggaaactgcgagattcatggatttgccctgctcgttacgcaaacggggaacgctcgtgccacaatagaagtcatggccacaccacaagtgctcattttgcaacatgtcccatgggaacgtccgggacgcatattgtcgaacctcgaagacatcggtcttgagacggtgacgatgaatatcgtcgacaaaaagaaaccggacttgcctgatttcggcgaactggctggcgtggtaatcatgggtgggcctatgggcgcgcttgattacgacaagtatccggggctgaaggcggaagccaagttggcgcgtgccgccgtggcttcaggcaagccgattctcggtgtatgcctggggcatcagattatcgccactgcgcttggtgcgcagctgcgcaagggcgatgcgccggagattgggttcgcgccgatcaagcgtgtggacaagcatgacttcttctccatgtgggataagcagctgacggtgctgcactggcataacgacgtggtgggcttgcccgagggaggccagctgctggcacgttcgtcttccaccaaggtgcaggcattccgactgggatccgcgctgggcatgcagttccatcttgaggtgtgcggctcgctgctggacgaatggctggatgagccgagcatggtcaaggatctcaaggccgcgggtgggtccaagtcccaattgcgcgagcagttcgcccaatacgatcagctactgcatccgctcgccgagcaagtgttctccggttttgcggcccgctgcaactcctacgctcagacgctgaacaaataacgtttgtgggccgccgctgggcaagcgtggcgctacattggtgagtcatgccgacttatgacattggactggaacacgtttcgctcgctttcgccaccaaaaccatcttcactgatgtgacgcagggtgttttcgagggcgaccgcatcggcatcgtcggcaagaacggcgacggcaaatccacgttgctgcacctgttccgcggcacccaggagccggattccggccgcgtgacgaagcgcggcggactcacgttcggcatgcttgaccagcgcgatccgctcgacgacaacgccaccatccgcgaagccgcacttgaggggcgcgccgactacgaatgggcgtccgacaacacctcccgtgaaatcgtcgaggcattgctcggcggcatgagtctggatgccaaggtcggctccttgtccggcggccagcgtcgccgcgccgatttggcccgacttctgctcaaggattgggatattctcgcgcttga

SEQ ID NO: 3467 - DNA, 2765 bp, Unknown
  R85_18m  MAG No. k141_1520
cgtcatcgacttcgacgccagcctcttcccatacttcatggaatggaagtcgatgggtgcgggcgactacgtggtcggcctcgaaccctcgaactccagcgtccacggccgcggctggcacgagcagcgcggcgacctgcacaccatcgccccgcagaccagcgaacgtaagtccctgaccttcaccgtcatcgaaggcgaggccgcgattgacgggctcatcgcccgccgcgacgccctgcttggctgaattgtgagataatatcggccgatatgtgaacggctgattagcgtggggagcatggttacccgggattcggaacagtatctgcgattcaaacgggagcacacgctgccctcgcatgaggcgattatggactggtatcgcggcaccggcatgcgtccgtatctgcaggcgcttgacgacgccggccgcaagaagttcgaggccgaagtgttctcccaagtccgcgaggaataccccacacagtcggacggcagcatcatcttccccttcccgcgtttcttcttcctcgcgactcggtagaagctcgccggattcgtgtactgggcggcgcgacctgtttcccgcgccgccagctgtgggttgacctcgctactgggcttgcggtgatgccgctggctgctgcgctgcttccgattgcgatggcatttgcatatgcggtgcgatgctggggagtgtgccgtcatgcatgcactgcttcaatatgaggtctcgctgggcgatgaggtcgtcttcgatctggtcacgcacgtcgcgcacggacgagaaatacaggtagaacgtggcgtgattgtagccggcgagttcggtgatctgacgcaccgagatcttctcgatcggcttggtttcatacagcttccagaacgcctccttaaggcgattgaccgtctgctgcgtaagttgcgggttcttcttgattgcgattcgcggtatggtgatttcgcataagacgcacaaccccatcgattcgtcggtcaaattcgtgaccttctcgatgcgatgctgtcgctggtggtcacgcaggacgtgctgttggaatcccagggaaccgcgcacgcggcgcaatcctcgggactgttcggcatcgggctcggcgtggtggctgtgatcatcggcctgtggatgttgctgagacgtaagtggacggcaacggaataggaatagtgacagcggaatagcgcgcgtgatattggtacgcgacgtatcgtaaaagcggctacaatacttacggcaaaagtctttgcaacgagaaggaagacatgactgagcggcgtcgagcacggatgaggattcgtcgtcaacgaatttacgttgtacggcgcattgtggttgcggtatgcgcattgttgtgctgcgttcttgccgtcttctcgacgattgacgcccaacgggtgtggccccgcggtgagtcggtcgcacaggggcaggcagaggttcaggggcaggcgcagaaggtgagtcaatccgcgcaacagtcggcatcgcgagtgtctgcatcggcctcatccttggaccgccagcaggtaccggtctttaaccaggcgattcaggagcagcgtgacaaggaagcgcaacgtgcgcgatggacgaatcccaccggcaagcagcctgatttgtcgcaatactccgatctcagcgtgaaagtcagtatcgccaagcaggaagtgtatgtgcaatccggcggtgagaccatctacacgatgatcgccagcaccgggctcaacgatacgaccccgcgcggcaactatgttatcgggatgagaggcgatcacttctacaatcccgcagaaggcatgggtgctgattattgggtgcgattcaacggcccgttcctcttccactcggtgccgaccggggcgaactccggcgagtatatggaagaggaaggcaacaagctcggtcagccggcctcacatggttgcgtgcgactcactgtggccgatgccgaatggttctacaaccaaattccggaaggcacgccggtcaccatcgcctgaggcttggcctgagatcgatactgaggctatcgtgctttaggcgtctgatattggtcgtcggtagtgaagcaggtgcgatagaccatggccatgatcagaccgtcggccagcaaggtcagcgcggcgatggcaccgaagaccacgaactggtatttggcggcgttcagcggatctccgccggctatcacctggcccgccatcatgcccgggatggtcacaatgccgctggaggccagcgaagcggtggtgggcaacagtcccagccgaatcgacgagatgacggatggacgggcggactcccatgccgtcgcccccaaggccagcatcatatccacctcgtcgcggcgttcctccatgctttcatagaatcggctcagcccgacagcgagcgcggaaacggtgttgcccagcagcatgccggtcaggggcaccaccagctggggcgcataccatgggtgcgggcgcacgatgagttcggtgaccaacgccagcatgagcagcatcgtgatgaccaggctcaggaagatcggtccggcaaggcccttggggatgccgcgcgcgcgggatatcacgatctgcaccgccgcgaccagcatgaccgccatcagagcgaacaccatccacacgctgttcgaacgaatcacgtagctgatgatgaatcccatggcgcacagctgcacgagggcgcggcatgccgaccacatcagggtcctgccgatgcccatgtgcatgagttcgctgac

SEQ ID NO: 3468 - DNA, 5477 bp, Unknown
  R85_18m  MAG No. k141_1520
agcgtgtggaggcgcgggcgatgacctgggattcggtggtgagcagttcggacttggtgatgctgccgtcgatgcgtccgaggatgcgattcactgccgtgggagccgtccagtcaaggcgggaatccatggtggtcagcggaatctgcaggtagggggcttcctcgttgttatcgaagccgatgacctgcacctgcacgggcacctcataaccagcggtgcgcagagcggtcaatgcgccgatggccaactgatcgttcagggcgatcacaccgtcgaacggcacgccggaatcaatgagccgctgggtcacacgggcaccggctccgatggtccaatcctgatcggtgttgccaatcagctgcggatccaaggagagcccacgcctacgggtctcttcgatgatgccgcgcagacgcagctgcgcgttgccttctacggtattcagcaatgcatcttcgtcgtaaacgtcacgggcaccgatcactgcaagtctggtggaaccgcggtcatacaggtagcctgcggccatggcggctgcggatacatcgtctggggtcacgtgatccacaatgccccacgtggtacgcgcgccaacgatgaccagcggaaaatcaaccttcagatcatcgggcgaaatgttttccacctcgctcatggaaaggatcatgccatcggacaccgtggagttgaacttcttcagcagatcgcgcgcgcctttcgcggagccttccgcatacgtggtgacgtatacggaatagtcgcgctgacgggcggcctcgatggtgcggttggcgagctcggccagatatggcggaatcagcgaaggcacggcgagggtgatgaagccggtgtgatcgcggttgaggttgcgggcggccacgttgactcggtagtcgaggtccttaatgaccgactcgaccttggcacgggtctcatctgtcatacgcccggagccattgatcacgttcgacgcagttttgagcgatacaccggcggcctgagcgacatcgcgtagcgtcactcgacgcttggctgttttctcgtcgctcatgccgcactcctctatccggacaacattgccattctagcgcggtttagcaggacgttttagcgataagaatggcgttgcggttcagcgtatatccaacggcgtcagtctcgcaacggtgggcgatgatgggatcaccttccacaccgttgatggcgacgggctggtttgagcggttgaggtagaaatcgaagcgggtggagccgtctgcggatcggcggatggtgtgcaggatgcggggatctgtggtgggataggttggagtttgaccactctcagtcggctgcgccgacaactcctgccatcgggagccaagtgctttgagcaactgggcaatgtcgtgacggttgaggtcgcagcccacgtagatggcggtaccgttgccataggggcggctggtgatggcgggggtgcgctccagctcccagtcggcggcggactcacctgcgtaagaggcaagcactgtggtgtccgcggctacggaagtcacgtcgttctgccacaggcgggtcgtcagaccattggacaggctgatttcgctgggctcgccttcggcttcttcaccgaggatgttgaattcttcggagcggatgccgagcatgtcgcgtaggagcccgttgccggcgccggggtagccgccgaggccgatgtggaagtgctcgtcgatcaggccggcggcatagccgacgatgacggttccgccggccttcgcgaagtcggcgatacggagaacgtcttcgtcggacaggctgagcacggtgggcagcacgatggttttgtagccggtccagtcgtaggcgagcggcaccacgtccgcgcgcagcccggcatccaggaagccgcggtaccagtcgcgcacgtcgtgccagtggttgagtttcatgctgggcagggtttcggagcgtgtggcccattcggattccgcgctgaacaggatcgccgcgccggcacgctcgagctcagtgccctgcagcccggcgtcggagagggtcttcagcgccttaccgagctcgcatacgccgcggaagaccttggaatcggcgcccgcgtggggcagcatggcggagtggaacgcctcggcgcccgacttggattgccgccattggaaaaagcagatggcgtcggcgcccatggccacgtgggccagggagtcgcgcatgagttcgccggcccgtttgcgtgtgttcagcggcttccactgcacggctgaggtggagtgctccatcacgtaccacggcttgcccagcgcgagggagtccatgagcgcgtccgagcaggcgagttcgtccaggtgggattcgccctcatggaagtagtgatcgttggacacgaagtccacctcatccgcccatttggcgtagttcatgacgcactggtcggtggagaccatgaagttcgtggtgaacggcttgtcggggcagatctgctcgatggcgtcgcgttcggctttgtagaagtcgagcagcatgtcgttgccgaaccgctcgtaatccaactgctgcgacgggttaaccatggcgtcgccgcccatgtgacgtggcagcagcacctcgtcgaaactgttcacgtgctgcgaccagaaggccgtgccccacgcctcgttcaacgcgtcgatggtaccgtacttggcctcgcaccacgtgcggaacgcggccaaggcgttgtcggagtagtcgtagcggttgttccagccgtattcgttgcccatgtgccaggcggtcacatacgggttgtccttgtagtgttcggcaagtttgcggcacaggcgcagcgcgtattccttgaacaccgggcttgtgggctgccacgactggcgtgagcccgcgttgacggtatgaccataccggtctaccggcagcacctctggatgggattcgtacagccacagcggcgcggcggctgtggcggaggccaagtccacggcgatgccggctctgccgagcctgtcgatcacatggtcgagccactcgaacgtgaacgcgccctcgaccggctcgatcttgtcccagctgaaaattgccagcgatacgacgttcacgccggcctcacccatgagacggatatcctcgtccagcgtctcctcgggccactggtccgggttgtagtcgccgccgaacgcgatgccgcggccggattccgtcagcagggacggccacctaaatgctctatgagtagtcatattaatcaaatcctttattgtatcggctcatggccggtgctgtgtttgccggttttgggctttggctcccctcagtctcactgcgttcgacagcgtcatcggcgctttgatcaaggcgtgaatgctgcgttgcgttactgcattgccatgttgccatgttaccgcgttattgcatcgctacgttgccacgttgccacatcacattgcattgccgcattgctgcgttgccgcatcacatatcgcaacacaaacgcagcaacgcaatgacgaccggagatggcatcgccgccacccgcgaggaaccgcaatgcaacgcggtaacgtaacgcaatgcgatgtgattcccgcgtagttacaggcagttacagattgagtaccgcatcagcaatgcgcatggcggattcgcggtgggagaccagcaccacagccgcgccgcgctccttgtctgcatgctgctcacccacggccatagcgtgaatggaacgtagaataatagcctcgttcaaagcatccaaacggctggtcggctcgtcgaaaagcaccagatcagcattgcgcaggaacacacgagccaaaccgatacgctggcgttcaccttcggatagacggtcgcccaactcgcctacctgagtatcaaggccatcgggcagggaatcaatgagatcaagcacggaggccttggcgagagcctgacgcaaacgagcatcgagaccgtcagctgctgccacctgaacggcatcgccctctgccgattgcgccgccaactgctgctgtcgggaatcaacggtcttggcacccacttccccattgcctgcaacatttgcagcttcaacctcggactcaggcaaagcaatcagcagattgtctcggatagagccatcaaacaggtgggtttcctggctcatcatggcctgaatacgtcggcgagcatgcacatcgacctcgggcaacggcgtgccggacaacgtcacctgaccgcgctgcggatcccagtagcgcagcagcagcttgagcatggtggacttgcctcggccggacggcccctggatacccagcacgccatgctgcggcacgtcaagcgagaagtcggacaggacttcatgctcccccgcatatgcaaaggtgacgtcatcaagacgcatgcccatatactcctgcggcacaacagtgccgttctcggtcacagcgggcacctcgtccatcagtccgaacagtcggctagcggacgcgaaggtctgagtcaggttagcgggcaaggcggcgagcgccaaagtcggttcgaacgagctggcgaacagcacgaaggcggcaatcagagccggaatgctctgcgggttcgcgccggcacaggcaatagccacggcgaccgaagccgctgtgagcacagccaccaagagtccgctgattccggtgaaacggccgttgaccttgctgagtttggcgtgatccttccacaacgcatgggtacggtcctcgatggcctgcgcacgttcctcgccgcggccaaatcggatgatttcgtccaggccgcgcatgtcatcgagtatcacatcgtcgagttctccggcagcgccacggatggcagggccaaggttacgtacgccggtggcaaagaatcgcggcacaaggatgccgataaccaggtgggcggcaatcaacgccagcgccatccatgggcttagggtggcggccacaatcgtgtagatgatggtggaggttaccgcgatggccaccggactgatggtgtgggcaaagaagatctcaagcagttccacatcggtggtcagcatggcgataaggttgcccttacctttgcccgcgagcttggccggcgccagtctgcgcaacgcggcgaacgccttggaacggaagagtgcgagcagatggaatgccacattgtggttcagatattgttcaatgtatcgggtgatgccacgcagaagagcacagataatcatcatgatgacggcgggcgcaacacccatgccccacaccggattaccggtaagtgcaaatgccgcgataatgccgaacacgggcaggaaagtggccgaaagatggccgatggtgccggcggtggaggccgctgccatcagtcctgccagaggtcgggcttccttaagcagtcgcctgatcacttggaatgtgctcattttggaagacgaatcgctatttgcagcaccagccggagtctcagccgaggcctgctcactcccgccaacggaagccgtcggcaaagctgactgc

SEQ ID NO: 3469 - DNA, 15851 bp, Unknown
  R85_18m  MAG No. k141_1714
aactggctgtcttccagcggaatacgttcaatgaggcgttcgccagagcttcgggatcagacaacggggtcatctcgacggccaagtccagtatctggccgatctccacctcgcgctgcatggtaagaaacgcctcgttcagggcatcggtgttgggaagacggctggcggaccggcgtgtgatttcaatgcaggcggtggccagaatgtcgccgagcatcaggcccaagccacggcctatggcaccgctgtgtacagcctgttccaaggcacgatgtgcggaaggcctgccccggcgcagatcggattcgtcaatgatgtcgtcatgcaccagtgcggccgtctgaaacacttcaatggcgcaggccaggtcgatcatggcgtcacgccgatcaggcgtcacgtcgccggcaagaatatcgaaggcgtccaatgcgagcagtgcacgcagtcgtttgcctccttggctggaggaggcggcttggcccacaacctgttccatcaccggtttcagggcgtcggcaacctcgtcggtggcgggggcggcagtcagttcccgcaccaactgaatgatgcgtggctcgatgatttcgcggttgttagcagttgtgcacatgcctaataacttatccacagggtttgaagaacacaagaacgttgggaatcaagggttttgaagctagaaccacaatggtcgttttttcctgcgtcatacggcgttttcagccatagtgggcacacaccccctcggcgcatgagctatccggctcggcgcgcaccacaacaccaatagattgcacaccattagtcaaggaggacatgatgaacaacaacacgccgcacaagccgcgtaagagccgacacgccaaacggcacgccgccgagcagacggagccctttggctttgatgagttggagacgagatcacaggaatttcgcaatgatcgccgacttcgaggcgcgcaacaggctaatgccgactgggtggccgaaccattggatgaatggctgtcttgtctcgatgccgggaacaccgacctaggccgagagacgatggccgcgtttgcggtgggcatgcgcgagaccttatcgattcgtgatgcgctgattctctcgttggttattgatgaaagccgttgccccaagtcatggctcatggaattcgcggcgcgaccgcatctggcacgtacgagaacacgaatgggcgagctgctgacctgcgcattcgaggatgaaggcatgatgccggataaggagcgttgccatgccggcatcggtatgttgctcgatatcgcggaagcctcaccggtgccgtactgcatacagccattggccgtgatcgcttacaccttatggtggctgggcgatccgcgagcaatggtgttcgccttgcgatgcctgctgctcgatgaggattgttcgctggcggcgatgatattctcagccgccgatcgaggcgtggcaccggcatggtgctcgggctgaatgaacagaaacggcggatttccgaggttttatgcgcgatgcgcggaaggaaagcgtgtggtgatcggcaacacgtcgggcaacgatgtgggaataatcgtccgtggagggtggtttactcacatagttgacgatttgcccttgccagaagtgggcccgtgtggtatatgcacttcacggcgagagatcagaaggagcagttttggccacgaaggaaacgacggcaaccaagcagacagccgagtccagcgaggagaccgagaccaagaagaaggccagctctacgaccaccgcgcgcaagacttctgccaagaagtccaagtccgcagagccctcgaaaaagaccacgcgcaagtccgccgcgaagaaaaccgcgaagaaggccaaggacgatgagctcgtcaaagacgaggacactcaggtcgatgacgagcttgatgacgatgccgaggtcaacgacgacgatttggacgttgacgacctcggcgaggatcttgacgacgttgacgaaggcgatgccgacgacgaagacctcgatgaggacgatgccgacgacgacgatgtggaagacgacgaggacgaggaagaagccaagtccaaggcacccgagcagcccaaggaaaagggtgcctacgtggtctccgacacggatgatgaggaagagaacatcatcccttcgggcaatccgaagcgtcgtgtaatcgcggccggcgcaaccgccgacccggtcaaggactacctgaagcagatcggccgtgtgagcctgctgaacgccgaacaggaagttgacctgtccgagcgcatcgaggccggcctgtacgcccagcacctgctcgacaccgaaagtgaaggcatggagttcaagcgcaagcgtgaactcaagtgggccgccgccgacggcaagaaggctaaggaccatctgctggaagccaacctgcgacttgtggtttcgctcgccaagcgttacacgggtcgtggcatgctcttccttgatttgatccaggaaggcaaccttggtctgattcgtgccgtcgagaagttcgattggaagaagggcttcaagttctccacctacgccacgtggtggattcgtcaggccattacccgtgctatggccgatcaggcccgtaccattcgtgtgcccgtgcacatggtcgaagtgatcaacaagctgagccgtgtgcagcgccagatgctgcaggatctggggcgtgaacctacgccggacgagctggcccgcgagctggacatgccggttgagaaggtgcaggaagtgcagaagtacggccgcgaaccgatttccctgcacaccccgcttggcgaggatggcgattctgagttcggcgaccttattgaggataccgacgccatcgctccgtccgacgccgtggccttctccctgctgcaggaacagttcaagcaggtgctggaaaccctgtctccgcgtgaggccggcgtcatcaagatgcgctatggccttgaagacggccagccgaagacgctggacgacatcggccgtgtgtatggcgtgacccgtgaacgcatccgtcagatcgagtccaagaccatgtccaagctgcgccacccgtcccgttcgcagaccctgcgcgacttcctggatcaatgacggtcggcccgcttagtaggccgaccgcgcgaggagtttgacagcccagtgggctgtcagacgacggagccatccgttgaaggctcccctgaagaggggagccaaattattagaaaataggactgtatgcccaaagaagaatacggcgccaaggacctagctgttcttgagggcttggatgcggtgcgcaagcgtccgggcatgtacatcggcaccaccgactcgcagggtcttatgcactgcctgtgggagatcatcgataactccgtggatgaggccttggccggcttctgcaacgatatcgtggtcaccctgcacaccgacggttccgtggaagtcgcggacaatggccgaggcattccggtggataaggaaccgaaaaccggcctgtccggcgtggaggtcgtactgaccaaactgcatgccggtgccaagttcggcaactcgtcttataacgccgtcggtggcctgcacggcgtgggctcctccgtggtcaatgccctgagctcccgactggacgtcgaagtggatcgtgacggcaagacgcaccacatgaccttccaccaaggtcaccctggcgtatacacggatgccgacccggccaatccgtctcccgattccccgttcaagcgcactcgcaagaaccgacccaccgagctggaaatcatcggcaaggtatctcccaaaaccactggtacccgtattcgctactggtatgatccggagattttcaacaaaaccgccgaattctcatacgaacagctcatcgaccgcgtgcgccagaccagcttcctggtgcccggactcaaaatcaccattgttgacgaaaacgtaccggaaacggcgactgacaccgccgaagccattgatgccgacgcagtcgaacctgcgcaagaccaggccccggctttggacgtctcgttcaacgatgccgaactcttcgacgactccaccgaggctcaagccgacagtaccgagagcctgtccgaggaggacttctcgctgacggccggcgaccaggtcgtcgatggcgcgttcggcgagcagcccgcgcacccgcgcgtcgtggaattcctgcacaccggcggcgtcaaggacttcgtcgacttcctatccaaaggcgagccgatctccgacatctggcgcatccaaggcgagggcacctataaggaggagacccagaccgtgggcgaaggcggtgaactgcacgcccaggaaatcgaacgcacctgcggcgtggacatcgccctgcgatgggtcaacggctacgacaccacaatcatgagcttcgtgaacatcgtggagacgcccggcggcggtactcacgtggacggtttcatgaacgccatcaccaagcagattcgcaaggcggtggaagacaacgcccgcaagctcaaggtgaacatgaaggactccgccatgaaggtggagcgcgacgacatccaagccggactcgtggccgtggtcaccgcacgcgtggccgaacctcagttccaaggccagaccaaggacgtgcttggcaccgcgcaggtcaagccgatcgtcacccggctcaccgacaagcaattcggcgagatgatcaccggctccaaacgcggatacaaggaacaatccggccgcgtgctggagaagatcgtcggcgaaatgcacgcacgcatccagtcgcgcaaggccaaggaggtcacgcgccgcaagaacgcgctcgaatccgcctcgatgccggccaaactctccgactgccagccgggcaatgacgacgtggccgaactgttcatcgtcgagggtgattccgcactcggtaccgccaaggccgcccgcaacgccggtttccaagcgctgctgccgattcgaggcaagattctgaacgtgcagaaggcgtcgattacgcagatgctctccaacaaggaatgcgcggccatcatccaggtggtgggcgccggctccggccagagctttgacatcgaacagtcgcgctaccgcaagatcatcatgatgaccgatgccgatgtggacggcgcgcacatccgtatcctgttgctgacgctgttctaccggtacatgcggccgcttatcgaacacggctacgtgtatgccgcagtaccgccgctgcaccgcatcgcgttgaccggctcgcacaagggcgaatacatctacacgtattccgatgacgagctggccggcaaactggccgacctcgacaagaagcacatcggttacaacgacgacatccagcgatacaagggtctgggcgagatggacgccgaccagctggcggacaccaccatggacccgcgcacgcgcatgctgcgccgcatccgcatggaggacgccgcccaggcatccgagatcttcagcctgctgatgggcgacgacgtgccgccgcgcaagcagttcatcgtcgacaacgccgacgatttcgaccgctccaagatcgatacctgaccgtcctatctcaagctccctctgatgagggggctgtcggcgaagctgactggggggagaggcctcgggtggtagcgggctactcgtatttctctcccctcagtccgtctttgggggacagctatttcgtcagagggtgctgcggtatatcatcaggatttcatcgagtgcaccgccaccgattatctcaaggacaactacgacatcatcggctttgaccagcgcgacgtagccgattccacgccggtgtactgcgggcaggactccaaactgtgatgtttgcgtgttgctgaagcgctattcgatagactgatgacatcgttatcacaaccggtgccgtactgtgaatgggagatgtaacatggccagtctgttgcttgccgtcatctatgtggcgtttatcagtctggggttgccggattcgctactcgggtccgcatggcccaccatgagccaggatctgaacgtgccggtggcgtgggctggcggcatctccgcggtgatttccatgttcacgattgtctcggcgctgctttcggaccgaatgacattgaaattcggggcaggcaaggtcaccgccgtttcggtggcgttgactgcggcggccttggcaggtttctccgttgccccgaattactgggtgctgttggccatcgccataccgtacggccttggcgcgggtggcgtggatgcggcgctcaataactacgtagccattcactacgaaagccggcatatgagctggctgcactgcatgtggggcgtcggcgcatcggtcggcccctacatcatgggctatgcgctgtctcaaggccaaggctggccgtggggctatcggtacatcgcgatcctgcaggtgatgctgaccgtcatcctggtgctgagcctgccgctgtggaagaaacgtggcacgactgggggcggcgaatcgaccgatggcgccgcatcatctgacggcaatgccgagggatgtggtaatgctgaaggggcgtctgttgctgaacgcaaaccgctcggcgtggccggcgtgctcgccattcgcggtgccaaggaaatcctcgtgatgttcttctgctactgcgccatcgaatccacggcgggtctgtgggcctccagctacatggtgatgcacagcggcatcgacaagatcaccgccgccagctgggccagcctattctatgtaggcatcaccgtggggcgtgcgctttccggctttctgaccatgcgattcaaggacccggtcatgattcgcctcggtcaagtgctggtgctcgccggcatcctcaccatgttcgtgccattgcctcaccaccttggcgtggtcgttgggctggtggtcatcggcttcgggtgcgcgccgatttatccgtgcgtcatccactcgacgccggcctacttcggcgaagacaaatcgcaggccgtcgtcggcgtgcagatggcctgtgcctatgtgggctcactgctcatgccgccactgttcggcatcatcgcgcaatatgtgacaatcagtctctacccgtggtatttgctggtgctcttggtgctgatggtggccatgcacgagcgtcttcgtaagctgcgcggctgatcatgcgcgcatttgggcccgccgcctactatgcttggagcccatggtgataagtgaagaagaacataaacagatgcccgagcccgtacgggaacgattggaagcgctgaaggatgcgccgggctcggtaatcgtggtcggctcgatgaacgccgattacaccgtgaccaccaaacgactgcccaagccaggcgaaaccgtcaatggtggtgccatgaaagtgttgccgggcggcaaaggcgcgaatcaggcgtctgccgctgctcgcctcggtgtcaatgtccagttgctgggcgcggtgggcgaggactccaacgcggacttcctattaggcaagctggatgaggccggcgtcgacaccgccgatatcctgcacgttgaaggccccagcggcaccacggtaatcaccgtgagcgctgagggcgagaataccatcgtctattcgccgggttccaatgccaaggcaagtgccggctatgtgcaatcacatcgcacgaccatcgccgaatgcgcggtattgggactgtgtttggagagcccgatctccaccgttatcgccgccgcacagaccgcgcatgacgctggcgtgaccgtgctgctcaacgactcgccatttatggacgagctgcctcacgaactggtggaagccacggatattctgctggtcaaccagcatgaagtggctcagttactgggtctgccggacggcgatgtggaatcactcgactggtatgaggtcgccgaacgattcaccgattacggattcgaccgggcgatagtgacgcttggtgcgtcggggtcggtggtgatcgagaacggacgttggcatcgcgtatccgccgcgcaagtcaatgcggtggacaccaccggttgcggcgactcgttcatgggaactgtgctggctggcttggccgctggccatacgctgctgcaatccgcgcaaatcggctcctatgtctccgcctatgcggccaccaagcttggtgcccaaagcgcctacggcactgccgaagaagtcatcgcctacttcagctgacctataatcgtacatatgtacgaaaccctgagcctgttttccgaacccaccaaggtgtggttcgagcatgccttcggtcagccgaccgaggcacaggctcaggcatggccggcaatccattccggtcgtaatgtcttggtcatcgcacctaccggctccggcaaaacattggctgcgtttctctcggccattgaccggctgatgaccatgccacgcacgcggcgtgccggtgtgcgtgtgctgtatatctcgccgttaaaggcgctcgcggccgatgtggccaagaacctagaacagcctttggagggcattgccgcacaatgcgaggcgcaagggctgcccgtgccgaagatcgcggtcgccactcgttcaggcgacaccaccgcacaggagcggcggcgcatagcctcccatccaccggatatcctcgttaccacgccagaatcgttgtatctgttgctcacttcgaaggcagggcggattctcggcactgtcgatacggtgatcgtcgatgagattcatgcagtggcgggcaccaagcgcggcgcacatctggcggtaagtctggaacggctggagaaccttgtcgcggaatcgcgcaagcgagatgcaatcgatgcggatgctgatgagggcagtgataccgccatcgatgctggcctcagtgaccttcatatgcagcgcattggtctatccgctacggtgaatccgcctgaagaggcggcgcgattcctgggcggcggacaaccggttaccatcgtgaatcccggtgggcggcctgcaatggatctgcgcatgattgagccgttggaaaacatgcgtgatttgcagtccgtgaatgccaagcagcgtgtcggtggcgtggaggctgaacggtccgctccgcatatcagcggtgtcacgccggccatgcagcgacttgccgaacgcaggggcattgtgccggtggatgatagagatgtttcttccacttctggggacgattctgatgcgagtgatgcgttcgattcctccgcgttggttggagcggcgggcgaccgtacctccggttccatctggcccgtggtggaacgcggtattttggatgagattctcgcgcaccgcaccacattggtgttcgtcaattcgcgtggtgtggccgaaaagctcaccgcgcgcctcaatgatctctatgcacagacccggcatggcaccaatcccgacactgtgcgggatccgggctctccggaaggccgcgaagggttctccacacattacgatgctgtggtcggttccaccaccatgcttgtcggctcgcatgagggcgatgatgtcatcgccatggctcatcatgggtcggtctccaaagaccgtcgcaaaatgattgaggaacggctcaagcgtggtgaattgcgctgcgtggtggccacctccagtttggagctaggcattgatatgggctcggtcgacttgatgattcaagtcgatacaccgttgtcggtctcctccggattgcagcgtgtaggtcgtgccgatcatcaggtcggtggcgtctctcacgcattgttctacccgctcacccgtcagcaaatcgtcactggggccgcaagtctggaagccatgattgccggcgatatagaaccattggccgtgccgcgcaatccgctcgatattctcgcccagcagaccgtggccgctgcctcgatgcacgatttgaacgctgatgactggtatgccacggtgctccgtgctgcgccgtttgccgaactgccacgtgacatgttcgatgccgtaatcggcatgatgtccggcgaatacaacagcgaggaattctcggccttccggccgcgactggtatggaatcgggataatggcctgatttccgcccgtcccggttcgcagaaagtggccgttacctctggcggtacgattcccgatcgagggctgtacaccgtggtcctgcctgaggcggacgccggcaaaggccagcgtcgcgtcggcgagttggatgaggagatggtctacgaatcgcgcgtgggcgatgtcattacgctcggcacctccacatggcagattcaggaaatcacccgtgatcgtgtggtcgtgactccggctccgggccgcaccgcccgtctgccgttctggcacggtgaaggcgctggccgtgactacggtttcagccgtaccatagcccgcttcacccgagaaatcgccgccggattagacgtgaagcggactggggggagttctgccgcagaaggcccagctgtcccaaccttcatcccaacaatcctcacccgtctccaccgagacggcctagaccccaacgctatcaccaacctggcccgcctactctccgagcaacaagccatcaccggcacagttcccagcgaccaaaccctcatcgtggaacggacccgcgatgaagacggcggctggcgcatcgtactgttaagccccttcggccgccgcgttcacgaaccgtggtccatggccatcagccgcagactgcgccaacgctacggtttcgatgggcaggtatatgccgccgatgacggtatcgtcattcagctaccggacggtgacggacatattcctgctcaagacctgttccttttcgacccagaagacctcaaagcagatgtagaacgtcaagtgggcgagtccgtgctattcgccgcacgattccgcgaatgcgccgcccgatcactgttcatgccgcgatccgacccgggccgtcgcgtgcccctatggcagcagcgactgcgcgccgcacagctcctgcaagccgcacgtatggtcaagaacttcccgctgctgctggaaaccgcgcgcgaatgtttgcaagacgtatacgacatgcccgccctgaacgaggtgatgaccggattgcaagccggcaccattaccgtgaaggacgtggagaccgagccgccatcgccttttgccgagaacattctctttggcttcgtcggcgtggtgatgtaccagtatgaccaacctcaggccgagcgcagcgcgcaactgttgtctctcgatccgcacatgctcgaacgcttgctcggcaccaccgacatggcacaagtgctcaacccggacgtgattcgcgaagtcgaacaggaactgggggagcgcactttctggaatgaacttgccgacgatgatgtgactggtcgcgtgacccgttacgccaaaacccatggtcctttcaccgccgatcagctcatggccgatctgcacctcgatgctacggatgccgtgcatactttggatgtactggctgccaaaggcgagttgctgcaaggccattttgtagatgatgacaagcaaggccaacagtggctccataaggacgtattccgccgcattcggtctcgctcattggccaaggcgcgtaaagcagtcaagccagtagaaccagaggcgttccagatgtttcttatcgaccgacaaggtatcgggccggtcggcggcgaacgatatgaaggtgccgacgggctcatgcgcgttatcgagcagctggagggcatagcactgcccactgcactctgggagtcggcggtattccccgcacgagtacgagactaccaacctgcattgctggatgagttgctgaccagcggcgatgtggtctgggtcggctcaaaaaccgggggaaccagtgcgatggaccccggtgaggttgctttctatccggcggattcaatattgctcagcggtgtggaacatggtacgacatcgaacgcttcagacgccaccatgccggaagcgattctgaccgcactggactcagggggagcgttccatgcccgtcaactggtggatgccgccaaacgtgtgtggaatgaggccgcggagccggacatcaatccaaacaccggtgaaatcattccgcaagagtggagcgaacagcagttcaaggatgccttgtggagcttggtctggcaaggtaaggtcaccaattccagcttcgcgccggtacgtgcattaaccgcaggcgcagcaagcccgcgtaaatccactacatcacgtcgtcgtgggcgtgtcgctccgattcaccgagccactacggatatgacgttaggaggtttgtggtctgccgtaatcgggcaagctgaagccgaagacactgatcagaccgagcaggcgctcgcactggtcgagacgttgctggacaggtatggcgtcatcgcgcagccggtgatcgacaaggaaaatatcccgggtggctactcagcgttgtatccgatattgcagcgcatggaggagcatggtcgactggtacgaggcatgttcgtccgtggtttcggcgcggcccaatttgccgagcgcgacaccgtggatgcgttgcgtcatccgtcagagcatcgcggccagtccgtggtggcattgagtgtgctcgaccccgcaaatctcagtggctccgccatcgcgtggccggacgcgcctgccggtgcgggtaaaccggcacgccgtatcggagccacggtcgtgctcaatgcgcaaggtgcgctactatacgtggctgccaaagccaagcacttgacggcgttcgatcaatcggtcggccatgaacccgccgccaatgattccgacgaacaaatgcgcaaggccgccacagaactggcctacgctctcaaacgcaatggcaccggttccgtgacgttcagcgacatcaatggcgaacccctcaacgcgcgtcaccccttcgcccgcatcctccaccagtccggcttcacccccgttccccgaggcatgcggctgtactgattgagcccagctatcgaatgcggtagttggagccgcgttgggtcatgatgaggccggcgtgggtgagcttcttatccagtgtgtagagggcgttcctgaggagcccttgttgctcgaagaatgggccaccgacgagcttgaccaattcgctggtgttgacaaactggccatcagccttgaccagtgcttcaagcaaactgtattccagacgggacagtgaaattgcggtgtgtgtggatgcgtagtaggctttgcgattcgtggtatccaacgtgagattgccacgaatgatcatggtgggggagtcggtggcaagcgagccgacgtatgagagcagttcgccatcggagaatggtttgctcagtacggcatccgggtgtcgtacattagctcgtgcgctagcggcagcattgtccgtgcactgttcggcttcggcatctgagttgtttgcgtgtgaatccgcgctgaaggagctgtagggcgtctcttcgatcggggcgtactcgtcaggcagcgctcgccagcggctgccttcgccgatggttttgctgagtggcgtcgaagtcagcagcagaatcttgacggaggcacgggcattgtgaagggattcgatgagttgctcggtggagatgccgagcagggattcatcgagaatcactgcgtcaaatagctccttggtgaccgcggcgagcgcgatactgccggtgcttgccaaggacacctcatgacgacaggcaagcagcgcaccacgaatggcgcgggccaacggttcattggatacggcaaccagtagtctcatcgccacctccttgatgcttagtgtaggtcgggtttagggtctcttctctatgtgtttggctcactatcgttcgctcctcgcctacaaacaccccactgggggtgtttgctttacggctcggcccatcagagggagcttaattgaggttacgcaatgaaggcgatgggggaggcgaggtccactccggagccgtctcggcgcatatcgggcttgggaagctcgaccggggagcctgcggatgtggaggcatgcaacgggtagagaccaacccaggcaagaatcagcgtgttctggcccttgaggaagcgctgggagcgtacgccaccggtagcgcggcccttggtggggtacatttccagcggggtgaccttggcggcgccgttttcggtgccgggtagtgcatcggagtcgccggccacggtgagcaccaccgcgccggagccggaagtcaaaccgttctcgccctcctcataggtccatgccaccttgccggcgggaaccacgttgaatgccgccacacgggcgccctcggccagcttgatgccggccataccgcccgcggtgcgaccctgcgggcgcacgttcttcgcctcaaaggtcagtagcgaggaatcggaggagatgaacaccagacggtcgtcatcctcggccacggcggcgaataccacttcgtcgccatctttcagatcaatgacgggccaggaatccatggtggtgggtgcctcacggttccaacgcttgatgacaccgttacgggtaccgatagccagcgatggcaacggcttggcctcggcggcaccatcctcgctctcgtcctcggcactggccttgccggacgtcggctgctccatggcgatcgccgtaatcacgcgctcgccacgaatcggatcggtggattcggtcatgccgatcagttcgtcggcctgaactcctcccttcagcgacaatgtggcggcagcgggcaaggcaggcaaatcaaccacatgcgcgagcaccaggcggccggccgacgtgaccagcccgtacgtggcgcgcgtggaggtctcgaagattgtggtgatttgatcgtctcgcagacgttcatcggatgtggaccgtacattgaacacgtccatcgcgcttggcgtggtacgggcaatcaaaccggtggcgctcatcatcaccacgcacggctcgtcctcgatcttcaaggctccggtcagcgcggactgttcgccggtcttcttggctgctgctgctgcggcggccacatcggcttcggcggaggaaatcgtggtggcggccttcaccgcttcgagcgcggacttggacacacccgaagccccggcgccctgcgccacgaccggcgtcagcgtgccatccgggtcggcgtccagcagcacggtgcgacgcggcgagccccacttggcgaccgcctcgtccatctcgtcggtgaccacctggtcgagcgcttcggcggaggccagaatgcgggtcagctcctcgatgcgcttcttcaggtcatcgcgttcggcctcaagttcgatgcggttcatcttggtcagacggcgcagacgcaggtcgaggatgtactgggcctggacctcgtccaggtcgaacacaaccatcaaacggcttttcgcggcatccgcatcatctgaggtgcggattacctggatcacctcgtcgatgtccagcatggccagcagcaggccctcgaccaggtgcaggcgctccaacgccttcttcttgcgatattcgctgcgacggcggatcaccacacggcggtggtcaacccacacctgaagcatctccttcaggcccatcgtgtgcgggcggccctccaccagcgccacgttgttcatggcaaaattgtcctgcaacggcgtgtgcttgaacagctgcaccagcaccgcatgcgggtcgaaaccggtcttgatctcgatgacgatacgcgtgccgttatgacgatcggtcagatcgaacgcgccggaaatcccctccagcttgcggttcttcacaccgtcggaaatacgctcgatcaccttctccgggcccaccatgtacggcagctcggtgaccacgatggcctgcttgcgggccgtgacatgctcgatatgcgtggcggcgcgcgtggtgagcgtac

SEQ ID NO: 3470 - DNA, 5057 bp, Unknown
  R85_18m  MAG No. k141_1747
ccgaactgtgccgcacggacggcgaaggcccggccgagctcgcggagcgcatcgacaacatcagccacagcatgtgcacgctcgaaaacccactgtggtactcgcaccgccgcgccgcgctcgccaacaaaacacacgaaggccgcctccttgccctcatcgtgcgtgactaaacggagaatgcgggcacattccgtggagaagatgtgatgcagttcacggacggccagccctcaccctacggtggtgcctatgactgagagagatttcgatacccccgtcgagacgcctaccgtccagccggcccccgctcggggcgccaaaccggcacaaaccgtgccggtggtggccgtggtgctggccgccggcttcggtacgcgcttcgaccccgacaatcccaagcagcttgtctccgtgggcggcaagcccatcgtgtgctggagcattgatgcctttgaacattgcgatcgcgtcagcgacatcgtggtggtggtcaatcccaaggtgcgcggtgaagtggaaacgttggttggcgagatgggctacaccaaggtccgcgtcatcattgacggcggtgacgaacgtgtggacagtaccgccgccgcgctcgacatgctggctactgctggcattccggacgatgccaagattctgatccatgacgccgtccgtccgttcgtggaacagtccgccatcgacggttcgattgatgcgctcgaccagttcacggccgcgaccgtggcctacacctcaaccgacaccgtgctgttgaccgaggatctgggcgatttgaaagtggtcaagtcggtgccggaccgcccgaacaccttccgcgcgcagaccccgcaatccttccgcttcgcgacgattcgtcacgcttacgatctggctgccgccgacccggacttccatcccaccgacgacacgcgcgttgtggtcgattatctgcctgatgaacccgtcgccattgtctccggtgcggaaaccaacctgaagatcaccacgctggaggatattcccacagctgagcgtatcgccgaggagattctcggtcgtgatcccaaggaagaggcccgcgcccgcatgcacgccctgctggcccaagcggccggccagatgcatcgctagactggcattatgcgtgaactcaatgttgtgatctccggcttcgaccactatgacggcgtggaggtcaatcccgccgtcgaagtgcccaaggccatcgccgagcaggggttgggcgtctcctctgctccggacgatccgttggagcaggtcgccgtcaccgtccatgccgtcagcatcccggtgagcttcgccaaagcctggcccacgctgaaagagacgattgaggccaccaagcccaatatcgtcatcgccaccgggctcaagcacgcagcccgaggcgtgatgcttgaacgatgcgccaccaacctgatggacgcgatcaagccggacgcggacaacgtgaccccacgccgcgaacccatcgaccccaatggcccggccgcctattggacccgcctgccgttgcgctcgatcctgaatgatttcacggacgattcgattccggccaccctgagctcggacgcaggcacgttcgtatgtaattcgctgttctacaacttgctgaactggaccgccacccaggagcgggtgctgggcggattcgtcagcttcccgccggtcgtgccggcggattccagccagcatggtctgccactcgaccagcagatcgccgctggccgtgatgtggtgcgcgaagccgtgcgctactatctcaagccctccagctccggcatcctcatcgcctagcacgctgcgcgccacgccggaatagaacatggttcgcacgcattgtaacgattgcgcgtcactcaacgcccagcgctagtgcgatgcgctacagtgcttcaaggatgtgccaagagctttatgcgtgtgcgaaaggaataaacagcgatggtggatcgtttcccggtggtgctgcgaggatatgacaaggagaaggttgatgctgccttcgacgctactcaggagagtgtgaagcgtgcgcagcagacgttggccagcatgcgtgagcagattgcggcggatgacgaccgtattctgcaactgcaggcccagcttcaggaagagaagaacaagaagccggaaggcaacagcttcgcttccctgggagcgaacgcccagcagatgctcgcctccgccgaacagacgagtaccgaactgctggaacgcgccaagcaggacgcatcctccatccgtaccacggctcaggctcaggccgaaacgctgatcaacaacgccaagctggatgcccagcatattgttgacgacgccaatgccaaggccgcctcgattctgacgaacgccaacaatcaggccgaatcagtgaccgcctccgccaacgaggacgccgcacaactgcgctccgaaaccgccaagaccatcaccgaacagcgtcagaccgtcgagcttgagctcagcaacgcgcgcgaagagcacaccaagaagatggcttccgaacgctccacccaagagcgcgaaatcgccgatatgaaggcggaagctacccagcaggttgccgcaatgcgcaaaagcgccaatgaggagatcaccaagcttaagtccgattccaacgatcagattgaggcggcgctcgccgaggccaacaagaagctcgccgacgtgcgcgagcaagtgtccaagatgatgaccgaagcccagcgcaaggccagcgaaatcattgatgcggccaagaccaagggtcaggaaatcactgatgaggccgaggtcaagcgcaccagcacgatgagccaggtcaacgccgaagtcgagcagatccgtcacgacatcgccgctcagcaggatgaggccacgaagaaggtcaacgaactcctgcagcacctcgaagagcgtcgtgtggcggccaagcgggaagccgatgagttggtcggccaggccaagaacactcgcgaccaagccgattcatatgccgcgtccaagcgcgaggaggcggacatccaggccgccgcaatcgtgcataaggcgggcgaggaagccgatgcgcagatcgaggagcgtcgtgccgccgcccaaagcgagcttgacggtctgtccaagcgcatcgccgatctgcaggaacgcgagtccgtcatcacccagcgtgtttcggaactgcgttctatgttctcgcaggcgttctccggattcgctttcggtggtaatgcggcggcctctggtcagagtcaggaagccgctgccgtggcgtcattgccggtggtcgcgcccgtcccggaagtcaagcctgtacacaacgaggccgatgatcagccgggtgagttgagcggaaacgagtcggctgccgacgatcacaatgagacagatgcggcaccggctgattcggctgattcagctgcgcagaatgagcagtccgaatcgtctgagccgtccgagcaccagacacagggcgaaccggaggccccgactcaggagaatccagccgtatctgagcagaacggcgaatgacaggccttcgattagactactagcggtaagaattacggcacctgcgctttcgagccaggtgccgtattcgtttggatctgcgccacaagcgcaccatcacagaaggagtatgacatgagtgaattgacgcctctgaccggcgaagcattgaataccctgcgcggcgatttcgcacagagcggcaccaaccgtctggccatgaacgcggtgaccgccgccggcatcgacaaggtggctcgcaattatgaccgcgctcgtctgatgcagcgccgtttctccaccatcgttgacaatggcgaagccacccatcaggatcgctccggccgctgctggctgttcagctccctgaacgtggcccgtttcgtggccaagaagaacatgaacctgaaggagttcgagttctcccagaactacgcgatgtactacgacaagctggagcgcgtcaactacttccttaaggatgtggccgctctggtggctgccggagagccttccgactcccgcctgatgcagcacctgctcgccgacgtgatgggcgatggcggccagtggaccatggccatgaacgtgtacaagaagtacggcgctgtgcccaaggacctgttcccggagaccgaatcctccaagaacaccggtgaaatgaacacccagctgcgccacatgctgcacaccgccgtggcgcacatgtacgccgctgacggcgatgcctccaaggtcgaggcgattattgccgacgccactgctgccggccaccgtattctgaccatccacctgggcgagccgccggtctccttcgactgggaatggaccgacaaggatggcgaattccaccgcgacggcgagattacgccggttgagttctggaagaagtacgtgggtccggctggtcttgaggactacgtgtgcctggtggatgatccgcgcaccgagcacgccaagggcaagaagatcggcatcgagcacctcggcaatgtggctggcggcgacgccaccgagtacctcaacgtgccaaaccagttcatgaaggactgtgtcaagcagattctcgttgagcagggcatcccggtatggttcggtgccgactgccacccgttcatggaccgtgagaacggcgcttgggccaccgacctgttcgagtacggccgcgtgtacgacgtggacttcgatttggacaaggaagcccgcgtgcgcttcggtgactccgccatgaaccacgccatggctttcgccggcgttgacgtggccgacgacggcaccacccgccgctggcgagtggagaactcttggggcaccaagatcgccgacaagggctacttcaccatgtccgacgactggttcaccgaatacgtctacgaggtagccgtcccgaaggccctgttgccggaggaataccagaaggccctcgaagagccagccaccatgctccccgcatgggacccgatgggtgccttggcctgacttcgccagcctcccggaatcggcctgacggccgatgctgtgttttttcgcagcctgccggctgctag

SEQ ID NO: 3471 - DNA, 19746 bp, Unknown
  R85_18m  MAG No. k141_1905
aagacctgaccgacgccatccgtgcgcaaggcgccatcgacatccagcaccgcgggacggcctgcttcgccgatctcgcgcacttcgggttccagcggcagctgggccatcagcggcacgtcatagccaagcgccgcgcttaactgttcagacacgcgctgaccgccgccggcaccgaaaatctccagcttctcgcccttgtgctcgtagtagctcatgttctccaccacgccacgcaccttcatcggcacctgcagggccacgagtccggagcgcacggcgatgtcggaggcagagggctgcggggtggtgaccaccacgagttcggcgttgggcagcgcctgggccacggaaatcgccatgtcgccggtgccgggagccaagtcgagcaagaggacgtccggctcgccccaccatacgtcagacaggaactgttccaaggagcgctgcagtcgcggcccgcgccacagaatcgcccggtcggcaccggcgaacatgccgatggagatcagtttcacgccccacgcggtgaccggcataagcataccgttcagattggtaggctgcgtgtgcacgccgaacaggcgcggcagtgagaagccatagatgtccgcgtcgatggcggccgtgtcgaagccgagggccgcaaacgtggcggccaggttcgcggtaaccgaagacttgccgacgccgcccttgcccgaggcgatggcgaagatgcgggtcttgacgcccggcttgctgaaggggttccgcttgcgttcggccttgaggtcggcaaccagatcggccagcttgtcacgactcattgaaccgacttcgatatgaggcagcagctgtacgcccggataggagctgaccgcgccgttgatctggttggtgatggtctcgctcagtgggcatccgggaaccgtcagctcaacgtgcacggtgacgtcgtaagtgccggcgtccgacgatgcgggcgcggcttcgatagcggcaatcatgccgaggtcggtgaccgaacgaccgagctcggggtcgatgaccttgctcaggcgttcgtagatgtcggcttcgatctgacgtgcgtcgctcataaatccgtatcctcctttagggcctgttctaccctagcgtgtgatgcggcggcatgccagagggagtggagtaagtcacactggggcgggattcgctttttctctcccccagtcagcctaaaggctgacagccccctcatcagagggggttaatgaagcgtctgagggggctattttagatggtgccggtggctaggagctgggcgaattgggcttcgcccagcatggggatgccgagttcctcggccttggtggccttggagccggcgtttgcgccgatcaccacgtaatcggtcttcttgctcaccgaaccggccgccttgccgccgcgctcgataatcgcctctttggcggagtcgcgcgaatagccttccaacgaaccggtgaccaccacggttttgccggccagcgtctgcggcagcgaactggtctcggcctcgtcgacgcccacgccggcggcctgccaagcacgcaaagtcgcgccgcgccagtcgccgggctcgcgggcggcggcgaaccagttcaccaccgattcggcgatttccgggcccaccccgtcgatggccgtcagatcttcaatcgtggcgttttcgatggctgccagcgagcccatcgccgaggcgatcaggcgtgcggtaggcggaccgagccggcgaatcgacaacgcgaccagcacacgccacaggtcggcgtgacgggccttgtccatttcgtcgaacatcttgcgcgtgttttcgccgggccgaacgatcaccggcacatccgtgacgccggtgcgcgtggtcttgtggtccacgcgcacgatgaccgcgtcggccggcacgtcatactcgggataggaggctgcggcaaagcccggcatagtaccaagtggagcctcagccccggtaggtgcgccggtcgtctcgctggcggcacctccctgtgttccggcggattcgactgcggcctcttcttgcgcgcgttcggccaactgcttggccgtgagcttcttggccggcgtgggcgcggtccagaaggcaggcacctgatgccacaggccagagccgccgacacgcttacgcacctttttcttcttaccgttcgcatcgaccgtctcatgcacttcgacgattgcggcctcacgccacacacgcacgtcgcgcagatcggcggaggtcaggtcgaacaacccggattcgttggacaacaccggcttctgcgcggccggcaattccagcccctccaccggctcgtacggttcgggctcttcgccgggggcgaccagaacctcggtgatgttcggcgcgtaggtcgccaccgaatcaggccggttctcctccgggttggtcagagcgatggccgactgttcacccagatgctcgatgtcgaacgccttgcgtgaggccagcgaaatcacgcgctcggtcaactgggccgggcagctttccacattcgggcagcggatgtccttgtcaccctccttggcgggtgccagtttcgcgccgcatgaaggacagaactcgggcatgacgaattcgcgcagctggccctcacgccctttgcgccgttcaagcaccggaccgaccagttcgggaatcacatcgccggccttgcgcaccaccacggtgtcgccgatcaggatgcccttgcgtttgacttcaaatccgttgtgcagcgtggtacgagccacggtggagccggccacgtagacaggtttgagcacggcgaccggcgtcacacggccggtacgccccacctgcacggtgatgttgagcagttcggtgttgacctcttcgggcgggtatttgtaggcgatggcccagcgcggcgcgcgcgaggtggcaccgagggtgcgctgcaggcccaggtcatcgaccttgacgacaatgccgtcgagcgcgtgctcgatgtcgccgcgatgctcgccgtagtactcgatcatgtccaggatctcctggaatgaggtcaccgcacgattgtgcggggagaccggcacgccccacctggtgtatagatcgtaggcctgcgactggtcggcgaccacatcatgggtgccgcgcggatggtccgccccccaggtgagctgccccagaccatgcgcatagaagctcaggcgacgggtggcggtgatgcgagggtctttttgacgcagcgagccggcggcggcgttgcgcgggttggcaaagggcgctcgtccggcgtcctcctgctcgttgttcagggtgtggaagtcatcccagcgcatgaacacttcgcctcggatttccacgaagtccggaacgtcttccttggggccgccgaggttggcgggaatggagccgatggttcgcacattcagggtgatgtcttcgccggtaacgccgtcgccgcgcgtcaagccctgttcaagcacgccgttgcgatagatgaggttcagggcgaggccgtcgattttgacctcgcagctcatgggcaggggcttggattcgggccaatcgaggtcgcgaatcaccgaatcgtaccaatccttgagctcttcgatggagaagacgtcgtcaaggctcatcatgcggctggggtggcgcacggaggcgaagtcgttggagaaggagccgccgacgcgatgggtgggcgactgtggattgtccaatgaggggaacgccgcttcgagtcgttcgaggcaacgcatgcgcgcgtcgtaggcggcgtcggagctgacgggtgagtcgtcgatgtagtaggcgatctgatcggattccacccatgcggccacgcgagcccacaggcgggcggcggcctcagcggtcatcgtgttcacgtcgaaacggtcgaggcgtatcgcgtcgtcgtcagtgggctgcagtgcggctatccattgttcggagccaggggcaaaacgtgcaataccggtatcaggccggacctcggccacatccccatcgtcgaaatcccatgccagttgttcgttcgtgctcatggttgtctatcctagcgggctcggctcccctcggccggctataccgtcaactcccctcaggcggctacgcggatagcgagcgcaggaactgggcttggatgatgtcgatgttgtcgccttcaccgtcattcatgcgggccacggccaccgagagcgtgcgggccggcacgaacatgccttcatccacgcacacgcgggcggcgtcacgcacgatgtcagccacttcgttatgcggccagaccggcagatcatgcgtggcaagcacatgggcggccgtctccaccgattcaggcaccggcatgcactgcgagtccgcacgggaaaccagttcctgcagttcgctttccaacgaaccaatggccccgggagcgatgtgatcgctcataatgtaggctgcggcggctgtgtcgaaccggtcaagcatccattcggcgtacgcgaaccggtagtaggcgaacgcggcatcgtcgcggtccaaggccacgcgcagagcattcaggcaggcggcgcgtgccgaatcccaatcctcattgcgggccagttggatggcgagcttcagatgtgagagcgggtaggcgggcgcgtacgccaccatacggttgaggtgcgggatggccgcctcggcacccttgatctggctcaacacgtcagccagctccatgtgtgcgtagaacagattgtccgggatgagcaccgtacgctcgtccaatgtggcgaacagccggttgtagaccacgcgctcggcataggagttgaagtatcgaggtacgccatggcctgccgcatacacctgatccaaatgggccacagccgcttcggccgcttcgatggcctgatcggcttggcccgagaacagcatgtctcgggcgcgcagacgctccttgtcaagatcgtcggcaagcgtgaacgtgaagtccggggtgtccttgccatcgatcaacgcactggtgacctgagaggccaaaccggtcagttcgggatcgcatatcgattcgatgatctgcatggctcgctgggccttttccacggagccgagcgacgtgttcctggcgatatcgtggaattcgttgacgccatgctgcagtaagtccactcgctggatagccagtccggcactattctgtgcgcccagcacgtgagcggtcgccgggctgaattgacggtcggccagttcgggctcctcctgggatccggtgggagagaaccggctgtccgccaagtcgaagtcggcgctgatgggtttcaggccgccttcgccgtccacgtccatcacggcaccgaacatgcggtaggtttcctcgggattgtcaagcccatcggtgtccagtcgcttgaggaaggcatcacgggtgaaggtgacggtgaccatattgcgcacggtgggattgcggcgcagcacgctcatcggatcatcgtccatgccggcggccccatcagcatcgtcagtgccgacgccctcgccgccgataccgcccaggtcgtcgcctgcgccggtatcgtccggcatgccgaacgccatttcgtcgatatcgacgcccttcatcaggtcttcgaactgcgaatcgatggacgcggcgccatcggcgtcagcggattcggccgcggcctgatccgtagcatccgcagacggtccggtaccgttgcctgttcccccggccgtgccgcgttcgtcaccggacgccgcctgcccgaacgtctcctcatgggtgatggggcgggtcgggtcgccatggaaatcaccatctttggggtcggctttggaacccacacgccccaaatcgccactgcgcagatgttcgaaggcgcttagggcctcgctcatcatcgcctcgatggcggaatcctgttcggcaatcgcctcttcaagaccaatggaatcgatgtgcaacgacacctggcgcacggattcgctggtgccgaaactcagcgctgccatcatcaggccgacacgcaggttgtaggcggcgctcatcgacgcgcgttcggcgctactcagcgcacgccacgtacggcgagtggtgtcataccggctatcgggcatcatcgaggtgccggcagtggtgaagccaatggccacttcacccgaatccaagcgcgaccggaactccacatcaaaccgatacggcaaccgtaaccggcgcaacagtgaggagagggtctgacgatacacccattcgtcgctcctcgccggcgaatacgaaggccgagcggcttgagtgttggtgtcgctcttattggtccgctctacagcgccctcaacactctcagtactttcagcgcccgcagcattcgtcacacccgaatccggcacgttctgctgggtcagcacatctcgaggatcagggaattcactgtgaatctgcccagccgtgcgtgcggcgatatcgaccaggctcagcacggcccgacgctcctgctcgccatcatacgggtcaagcgccataatcgcagggttctcaatgagtttcatgtcgatttgcgcggcctcggcacgggtcaccgtatcttccgtagggttgcgccccaaggaagcgttgcgctccagccaagcgctcaccgcagcgaatcggttgaggttgccttcgatcttcaaggatttcagcgcctgcccgaatgccaaggacttatcccacgtaaagaaatagccgctcgaatacgtcgaggtgtacaggtgcaacggttcggcgccatgcaccgcttccagtcccggcgtggtgtcgagggcgccggcttcgcgcatcagatcggcgaagtgatcctccagaccggaggcccgcatgccgtgggctcgtgccgccaaagtgtcacgcaccgaacggcgaatcgcaccgattggcgcctcacggttgagacggcggaagatattgccggaaccgaatccgatgagcagaccattgatctgcggcaacatatacgtggcgaagaacgcgatggtaatggcatcgcggtattccaaatcatgacgcatcacaggcggcagattggcacgcatctgctcaagcgtgtaccggttgccggccttgagccatgaggcgagccacgtcatgcgtccggtgtcgtcacgccccaccacgccaccggtaatggccttcacgccgtcagcaccatgaccaaggccacgccccaaaccacgcccatgatgcagcgcacttcccaggccatggcctgcacgggagaaaccggaacgtgaacgcggctcgtcgctttcgcccagccgctcaccgtccggcagagtcacttccttttccttgccgaacatgaatcgcgcctgcatatcctgcacgtccatgttggggtcggtgcccacgaatacgcggccatgcgtatcggcgaacgccacctgcgcaaaatgatcgcggtcggggaaaatgccaagcgaaaagccacggcctctggtggagggcagctgcgcccatccaagcaccagcccttccggcacgttctccaattcggggaaggtgcgtcgcttgattacaggactcagcgccactgcatggcgagtcagttcgtcgataatgccgcctttacgctcactggtctcccgcaaggcatcgccgaacggattcgtatcgtgcttcttcggcttggacagtcccagatcggccgcgagcgcgttcatcgaatccttcagcccgcccagcagtggcgtgcggttgtgcttcccatggtccgatgtacgttttggcatgattcacattgtctcttgtttgcccgacatcaagcccgaataaagcctatagaataaatgcgtgcattccatagaccacactcgcgcagaccgtccgatgccgtcgaatcatgaacggcacctgcccagccgcccggatacccggcaccggctgcgtttggtgcgcctgctgatcgccttgctggccgccgtcgccgccatcgccgccatggagtgcatcgtgttcaacctgccgttctggcgtacgctcggagcgagcacggatacgaacgccgtgcataacacgctgggttcgggtctcacgcgccggaatgatggcatgttgaccgtcaccgatccgaccaaggcctatcttgaactgaccgcggacggcacgtcggattacctacgcatcgataccgagagcagcaaggtcatcgataaggcccgcgagcaggccgaggccgaatccaaagcgaacgacgataaggaagtcttcaaaccgctggcgaccattcatgtgcgcgcggatgtcgatggcatcaccggcaaggcccagtcgatgaatcccgacgctattcgcagccattatgtcaaggcgccgggtgccggcatcgtgcgtatttggattcaggaagagcgcggcgcgatcgtaccggtcaccgacgcccgcgccaacgtgcgcgtaccgttcgtcatcaattggatgcgcgtgctcgccatggccttggtgttgctgatgattgccgtctggaggccgggatcgcgcctgtggcgtatcacgcttgacccgtccagcactcggcaacgacttgctttcgtggggcttctggcgattcctaccctgcttatcggcgtatccatcatccacgaactgtggtacgcgtcttcgctcgtcttccacgtttccggcgattacacctatgatttcgaccagtatgggcatgtggccgatgcgctggtcgccggccggccctggctcgacttgccggttcccgaacaactggccgccaccgagcacccctatgacgtagccacacgtgcccagctactcgccaatggagccagtccgctctactgggattacgcgtattatgacggtcactggtattcctattttggcgtgttgcccgcagtgctgctgttcgtcccctatcgtctgctggccggtcataatctgccgacatccgccgccgagtatattctcgtgctgctgttcatcatcttcttctccttgctggtgctgcgcgtcatccatcgtgtgatgccgaagacttcggtggcggccgcgtcgttagtagtggtctcatcgttggtgagcgcgcaagtggggtatttgctgtatcgcacgaacttctatcagataccgttcgccgcatcgctgacgttgacgtcgctgggactatggctatggctcggcgcggacacgtcccgccgtccgctgagaccatcggaccgatggcaggcgggcgatgccaagcctctctccctgccacgactggccttgggcgccttgtgcattgcggcgaatttcggatgccgaccgacgttcaccttggccgcattgcttgcgttccccctgttctggccgcagattcgcgcgctgggcaccggtctgcgcacacgccgcatcaagccgttgcaggcgttgcgcgcgccgctggcggtaatcattcccgccattctcgtcgtgacgcctctgatggcgtggaacatggttcggttcgattccccgttcaatttcggcaatgcgtatcagttctccatatccgatatgacccggtataccaccccgtccgcggatatgcccgccaacatctggtattacctgttcctgccgctgcgcttcatggatcgtttcccgtggctggcgggctctcccgccccgatgccgcaatggggttattacgaggtgatggtcggcgcgattttcacggccacgccactgaccttgatggctttggcgctgcccctgctgcgcagattggaaacacacggcatgcggccatggctgatgtcttgcttggccgtggcggcggtgctggtcgtattcgacagccgcgtcggcggtttgggatggcggtattccgccgatttcggctggctgatctcgctggcgtccataccggggctactgtggctggtcaatgggcgcgaaccgagccggtcattggcgggggccaacgacgccgcttcaggcgatggcatcgcccgcgtcactccgtggcgttggctgatgcgctgggtcgtggtgctggccgtattgtgggcgctgggcatagccatactgagctgcttcgtgcagtcgcgcagcgatgcgatgatcgacaacaatccgacgctctggcatcaggttcagtcttggttcacgatgctctagtctcgtatcggcggcgaatcagatcctcataaaacgccacagcctcagccggcgctccgtcaaacacgaccgcgtgctcgtccagcaccagtatgcggtcgatggcgtattcgggccggcggatcatatccgtgtcatgcgtggcgaaaatcacctgcttgttgtagctgaacaacgccttggccacatgcgcggtgccaatctcatccaatcccttgctcggctcatccgccacaatcgcactcggctcaaagctcagcgcggccgcaatagccagcaggtgccgtttctcggagtccaattcgccggccttggccttggagacctgcgccaaatcaaaatgcgcgaacagattaccgatgcgcgcatgacgttctgactcgggcaccttgtgctttttcaacgcttcggaaacagcctcggaaatattcgccgcttggtagaaactgttcggaatctcctcgcggcgaactttgccgaccagattatcgatgcgcttcgcgtccttcttcacagccgggtcaagacgttcctcaccgcccgcaatggtcaccgtgccggcgttggccttcaacgaaccgtccagcagacccagcaatgtggatttgcctgcgccgttcagtccgatcacggccacccggcgctcgctgatggtgatgtccgtgggagcaagtcccacgtgcccatcatcatacgtatgcccggcctgttccaaagtgaacgtcagcgatgccgggtgtggcagttctttcggtctaaacaagaatcccatgccgccattgtacgtggagtacaggtgtggtgccggcaaacaccggcctatcgcagcaaagcggcgacggtattgagcacggcgcggatgccacgctcgaattcgtccggttcgggcagcagggaaacggccaggtatccattggaggtcatgtcgaagaagtagccgggctgtccggtgagttggtgctcgtcaatcagccgcaacaccagttcgttctcatcgatgacggaaggcactcgtaacagcacgttccagccgccttcggcccgtagcacgctgaccagcccgttgggatcggcgtcaagcaactcgtgcaacttggccaggttattgcgcacgcgctcccccacccgtctggtctgtgcgggcgcggcgttcaataatgcgggaatccgttcggcgatgatgtcgcccatcggcagataatcgtcggcgatgacgtccagtcgacgctgggcctcggcaacgtcctcggcaggtccggacacctgaatccacccgactttggcgtgcggcgcggccagcattttggagaatccgtctagggcgaaggtgagcacgccgcgctcccccgcgagccgtgcgtcgccggggaaaggttcgagagagtaatcgaagaacacttcatcggcgataagggcgatgccgtgctcacggcacaatgtcacgatacgtgcacgctcggttggttttacgtacgaaccggtcggattgttcgggttgatgagtaccaatgctctgacgcgttcgccaccgggctcgctgagtagccgctcgagttcggcgatgtcgatgaaccaggagccgtcgaattgcaactggtattcgaccgtatcgacgcattcaagccgtgcaatcgactcaatcagcggatagccgggtttgggtgccagcaccgcgtcgccggcatcgcaaagtaacttaatcagccacgaatacgcctcggacgtggagctcagcaggtacagggcgtccgggtcggcgccctcgatggcggtattcacattggtgaaagcggcatggcgctcgttcctgccctcgccggcggcgggcgaagccaactgagggctgcttgcgtctaccacgtttgccgtattgaggaatgcggccaatgattctcgtgccgcacgcggtccacgcgggtcggccgtatacacgctcggcaccaattcgggtgccaacccgtggcgggtcggattggaatcgttgagtttgctgagtgcgatgccgtttgccttggctgccgcctcggccgccgcaatgggattcggcgcagaaatatccacacgagaagagaaatgcacgctcataccctccacgataaaaccacccctgccgagccaggtatatcgaggcctcatatccaccagcatccagcactacgacaatcgtgcggcacggcagcggagtcgtcagacatactatgacttcaatccacatcgaataacggcctagctacattcattaggtcattttcgcgctcattaggtcactgctagtcgagcctcacaattgttgatgcttgaaacgccgccattccgagcccattgcaattcaggtttggaatgggagtgacctaatgaacacataatcgacctaatgaacgaattactcattaaaaaaggccgcccgaaatacttggacggccttacatatggtcaatacggctcctgcgccagcagaaataactcagctcactgctgcttggtgctggcgtagtaggcggcaccgacgatgccagcctggttacgcagcttggcgggcacaatcggggtcttgatatccacgtacggcaggaacttttcgctctgacggctcacgccgccgccgacggtgaacaggtccgggttgaagtacttttccataaggccgtagtacttggtcagacgcttggcccacttcttgtagcccagttcctcgttctcgcgaatcgcggaggaggcatacttctcggcgtccagatgcttggcgctcaggatgatgtgtccgagttcggtgttcgggatgagcacgccgttgtagatcaaggcggtgccgatgccggtgcccagtgtggtggcgatgaccagaccatcctggcccttggcggcaccgaactggacttcggccaggccggcggcgtcggcgtcgttcaccacgacgaccgggcggccgcaggcttcggagaacacttcagtaacgtccacgccaatccaagactggtcgaggttggccatgaagtcgagcttctggccgggcttgatcggcgcggggaaggcgatgccaacgggtgcggattcaggcacttcgaagtggtcgagctgctgcttgacgattttggccacggcctgaggcgtggagacctcgggagtgagaatcttcaatcgcggctcggcgaaatcgcccttggtcagatcgacaggtgcggccttgatgccggaaccgccaatgtcaacaccgaaagcctgtgcagtttcaatcatcgttgaccttcctttccatacgttttcatcagttcgtagggttgcgcccagtctaacgcgaccatcacgcggacgcgccggacgggccggggcatggccgtcattcaagcggcggcatgggcttccaggtggggtcgtgcatcagcttgcgcgagtcccaccagcccttggcaatctgcaccaaaccggtcttgaggtgctcgcgatccaccatcaccaggcgaatgacttccttggccgcggtgagcacggtgcccagtccaaacaccagcggacggaagtcgccgtaggtcatgaagtaccgggccatatagccgcggttgcgcatgatgtggtaccggttcatgtcggacgtggagttgagctggcgcatgccggcgatatcccaattgccgatttcgcgcgtacggcgcaggatcacgtcgggcaccacaatcgggttggtgaccttgctggcgcggtagccatacatcgtgtcatcccagtagatgaagaagcgcgggtccggcagaccgatttccgtgaccacacggcggttgaacaggccgccttcgaagcacagcgtgtccatcactcggtatccggccgggccgaatgcggcgggcgcgatcgggttcggaatgcccagcggcacaatgaagtcgtactgccagtagaacgggccgccatcgtaatcgaatcgggatccctgaatcacctcgtgcttgtcggtccacttggacagcttggcaatggcgtccggcagcacggccacatcgtcatccatcacccagaaccatgcggcgcccagatcatacgccttggccacgccggcggagaaaccgcccgcgccacccaggttctcggtctgcggcgcatagaccacgcgctcttcgttgccggactggtcggccacggtggtgccccactggccggtcaccttgccggcaaacgcagcgaccatgtccgccgtctgatcggactgctcattgtccacgatgacaatgcgccacggtgcctgctcaagcgccagaatcgaatcgaacagtacctcgagcagctgctgacgtttgtaggtggtgacgatcagggcaagcttgtcgatggtgttgttgggtttcttcacttcagccatggctcccattgttgcacttgaccggcacaagacgaatttctgcacagtgaaacgcgggttgcgtacgtccggcgcatggcgtatgaataagcctgtcagtttcagggaaggtgcaattccttactggcggtaacctgtaccccgggtttcataacggggatggcgggaagcccgcgacccgcgcaagcggctgatccggtgagattccggagccaacggtatagtccggatggaagaaacgagggctcattatgagcgtatcttcgcgtatccgcatgcaagttgttcgttctgtggcgcccgaggccgagggttcggccagcgcgtccaccgccagcaccagcgccaaactcggctcgcacaccactggtgtggccgattccggccgctggtccacgcgccgtatcgccatgtatgcactgttcgtggcgctggcgatggtcaccagcttcattgaattcccgattacgccggtcacttggctgaagtacgacccgtccggcatcgtctgcctgatcgccggctttgcgtacggtccggccgccgccgcaatcgtgtctgtgctcggctttgtgccgcacatgttcgccgacccgtggggttcgctgatggctgtgctggtggcgctgttcctgtctgtgccggccgcgttcatctaccgtaagatccgtacgcgcaagggtgccgccatcggcattctggtgggtgcggtgctggccatcgtggtggcgctggtgggcaacctcatcatcacgccgatttacgcgcacatgccctaccaggctgtggccgcgatgattctgccgattctgctgccgttcaacgtggctaagatggcgattcacgccgtgatcaccttcctgatctacaagccggtctccaacctgctgtccaagcagcagtgaccggcctgagacgggcctatgcccgccacgactaacgaccactcaacgaccactcaaagaacaagaacgcagaactccggcccttgccgggattctgcgttttcgcctatcagttacggattgctgtttcatgaccgttgcaccccattccttcgacgccgacgagttccacgattccgccgagcccgctccccccgccgccgtactcaaggacattcgtttcagctatgaccgcggcacttcatgggctttggatggcgtttcgctcacggtccatgccggcgagcgcctatgcttggtcggtccgaacgggtcgggcaagtccacgttggcccgtctgattgcgggattgaccgcgccggacgatggcgaagtgacgctactggaacagcgcgtgtacgcagccggcccgaatgccgacgcctatcgcgctgcccgccgcggcatcggtatggtgtttcagaatcccgaggatcagctggtcaccaccgtgttggaggatgacgtggcttttggcccggagaatctcgggctggagcgcgggctcatcggcgagcgcatcgttgattcattgcaggccgtggggttggcgaacttgcgtcagtccgacccgacccgtatgagcggcggacagcagcagcgcgccgccatcgccggcatgctggccatgaacccggcgatgctggtattggacgaaccgaccgccatgctggacgaatccgcacgcgccgaagttatgcgcattttggatgatttgcaggcgcgcggcaccactattgtgcatgtcacgcatcatccggatgagaccgttcatgccgatcgcatcgtgcacatggaggccgggcgaatcgttggtgtcactgcagccgccgataatcgacccccgctagcggaggctgtctcgcaaagcgagaccgagggtggtatcggcacagaagccgcccccagtcgtcctacgaacgacagcccccgccagcggaagcgcgaagacggctccgaactgccgctgctctccgacggcatcggtgatatgacgaaccccattattcgcgtctcgcatctgacctatcgctatccttcggccaaacgggcggttatcgatgacctgtcgttcaccatcgcgcgcggtgaaaccgtggcactgatgggcgtgaacggttcgggcaagtcgacgctggtgcgcatgctgtgcgcgctggccgcgccgaccgccggcagcatcgaggtggccggcgttccggtggcctcgaccggcaaacgcggtagcaacgcacggccgaagccggcgaatcgcaggcaattggcgcaattgcgccggcatgtgggttacgtgatgcagcatccggagcaccagttgttcgcggacacggtggccgaggacgtggcgtacggcccgcgcaaccaggggctcgccgaggccgaggtggccgaccgtgtgcgcgaatcactggacctgctgcatatcgggcatcttgccgaccgctcccctttcgacctgtccggcggacagcagcgattggtggccatcgccggcgtgctggcctgcaatcctgacgtgctcatcatggacgagccgaccgcgagcctggacgtccaggccaaggagcgcatccatgagctgttgcgcacgctcaaatcgcgcggcgtgaccgtgctcatcatcacccatgaccgagcggaggccaagcatatcgccgatcgcgtggtacgtatgccgattgccggcgcggctggtgctgagagcatctcggcaaccgagactgccttccccgccgagtccgtctcccctgacaaacccgcgcactcggtgatccaccgacttgacccgcgcgtgaagatggtgggcttcctggccgccatgttcacgatgttcgcggtgaacacacccctccagcttgcgctgggcatcgccatcaccctggccgttatcgcggcggcacgcctgaacccgttacgggtgctcgaatccattcatccgattctgatcctgctggggctgatgggcgtggtcaatctgtttgtggtacgcaccggcacgccggtggtggcgctgggcccgctgagcatcaccgatcagggcgtggccatagccgtgctgtacgcctgccgtttcgcattggtgatcattctgggcgcggtgttcctcaccaccaccacgcctaccgccatgaccgacgccttcgacaccctgatcagcccgctcaaccggctcggcatccacgcccaggagatcgcgttggtcatgagtctggcattgcgattcattccaacgctgaccgacgagacccgtgccatcgtcgacgcccaatccgcgcgtggcggttccatcgaaaccggttcgctggcccagcgtatcaaggcgatgagcgcgattatcgtgccgattttcgccggcacgttgcgtcacgcggacaacctgagcctcgcacttgacgcccgctgctacgaggagagcatccgccgcacccactggcgtgccctgaccatcgccgcgcaagatctcgtgttcgccgtcgccgtcatcgcctacatcgccgccatcatcgcgctgtagggcggcaaacagcacagacagcaccggttgctatgctggtgtggttatacgaaagatgtaaggaaattcccatggcattgaccaagaagcaaatcaagcagctgcgcgcgatggcaaactcgctgaagcccctgttctatgtgggcaagaacgatttgaccgagtcggccgtcaatcaggccgatgaaaccattgagaagcacgagctcatcaagtgcgccgtgcaggacggttctggcctgaccgccaaggaagccgccgccgagcttgccgagcagctgaacgccgaagtggtgcagtccatcggcaatcgtttcgtgctgttccgtcgctcccggcgcgacgatgtggagcatatccgcttggtgcgcgagtagcgttcgctctgctcgatcccgtagcttgatatgagtaatggcggttggaatcagtccgattccaaccgccattattcatattcgcccagcgagcaccgtcactgatccaagatggacccgacgattcccgcaacaatggtcagaaccaaggaccccagtaccgaccaccagaaaccgtgtacgaagacgcccacgccgaacagactgaccgccagccagctggcgagtcgcatgaacagccaattgataatcaaggtgaccagcccgagagacagaatcgcaaacggcagtgcgattagatgcacaatcggcttgattgacgcattaatcagcgccatgaacaaagcgaacgcggcgatgccgagaatcggaggctcccccaccggggtcatgccgggagtcaccgcgaccatgacggcggcggcgatagtcataatcaaccagctggtcaggaaacttttcatggcccaatcgtagcgcggcaggttttactattaggcaaaacgtgagatgatgttgtgcagaaacggtaagaaggtactgccgttcccgattgagaagggatagacccacatgactgataatcaacaacaaccgtacggttcggacagtgttccgcagccggcacaacctgcacagccggcacagccgtcgtacggccaagatgccgcacggcagccgcagggctatggcgccccacagcccgccgcatacgctcaacccgtcgccggaagctacggccagcagcagccgcaatacggccagcccgccggcgcatacgctcagtctcagtacgctcagccgcagtatggccagcccgcacagcccgcagcgggctacggccagcagcccggctatggacaggcctaccagcagccgaatgcctacgcacagccgcaatacaccgccgctccgtatgccgccgccccggtgtggcaatcatccaagtccaagttggctgccggcctgttgggcatcttcctcggcggacttggtgtgcacaacttctatctcggcaacaccggcaaggccgtggcccagctgctgctgacgcttgtcggctggattctgctcggacttggcccaatcgcagccgccatctggggctttgttgaaggcatcatcattctgtgcagcaagcccggctcgccgtggcataaagacgccaacggctacgaactatcagactgagactgacctcgggccacgttcattgggcctctgatcaaccacgcctctgcaggtatcatctcgatgccgcagcctccgtgggatgcgacacgccggccgtgtacatgagttcatgtacacccgatacaggcgaatcagtatcgcacgagattcaacagttcctgctgtttggcatagcgggaaacgttggtcagggcgatgcggatgatgtgttcggaagtcttttccaaatgattgccgccggccacatgcggggtgatcaggcaatgcggctcatcccacaacggactttccgccggca

SEQ ID NO: 3472 - DNA, 15275 bp, Unknown
  R85_18m  MAG No. k141_2052
cgccatcttccgcggcccgttctccccggtgccgctgggcgactacatgtccggctccaaccacgtgctgcccaccggcggcaccgcccgcttcgccgcaggccttggcgtacacacgttcatgaagccggtcgaagtcatcgaatacgacgaggagggtctgaaggccctggccgcccgtatcaatgcgttcgccgtttccgaggacctgcccgcccacggcgagtgcgtgctctcccgcttcgtcaaggatccgtatgacaaggccaccctgcgcgagcaggagaggggagccggtctgcgatgagctcgattcccgaaaacctgccgctgcgcaacgacctgatcggtgaggagccgtacggcgctccccagctggacgtgccggtgtgcctgaacgtcaacgagaacccgtatgcgccggacccggccgtatgcgacaccatcgccaagcgtgtgcgtgaaatcgcccccacactcaaccgatacccggaccgtgagcacattgaattgcgtcaggcattctccgattacctggcccgtgaatccggtacccgtctggacgtggacgagctgtggggcgcgaacggttccaacgagatcatgctccagctgttccaggctttcggcggcccgggccgcaccgcactcggtgccgacccgacgtactccatgtacccggagtacgctcgcgacaccttcaccggttggaagctcgcccaccgcaacgccgacttcacgttgaacgtcgacaaggtgcttgaggccatcgccgaggtcaagccctcgatggtgctgctcaccagtccgaacaacccgaccggcaccccgttgccgatggaggatatcgagcgtattctcgccgcctgcgaaaccgccgaagtggccggcgcgggtgagggcgtgcacccgattctcgtcatcgatgaagcgtacgtggaattccgcaagcccggcaccccgagcgccgtgagcctgatcaaggaccacccgaacctggccgtaagccgcaccatgagcaaggcctttgccttcgccggcgcgcgagtcggctacctagccgcatccaagggcatcatcgactgcgtgcgcatcgtacgtatgccgtaccacctgtccgccgtgacccaggccgccgcactggccgccttcgaacacaccgatgaacagctgagccgtgtcgagcatctgcgcgaaacccgcgaggccaccgccgcatggctcaaggaacagacctacaaggaccagccgcttgaagtggccgaatccggctcgaacttcctgctgttcggcgggcacttcgacaagcgcgaagccatcttcgacgagctcctgaagcgcggcgtactcatccgcgtggtcggaccggacggttggctgcgcgtgtgcatgggtaccgacgaggagatggaaaccttccgtaacgcccttgttgaagcgcttcgtatagtggaagcagcataagggacgtttctttccgattgcggcgagacccgaagcgattcgagtcccgccgcaatccaatatgacgaatcacacaggagacatgatggcaagaaccgcgcacatcgtccgcgaaaccagcgaatcacacatcgacctcgaactgaacctcgacggcaccggcaaaaccgatatcgatacatccgtgccgttctacaaccatatgatgaccgcgctcggcaagcattcgctgatcgacctgaccatccacgcccacggcgacaccgacatcgacgtgcaccacaccgtggaagatacggccatcgtgttcggcgaagctctgaagcgggccctcggcgacaagaaaggcatccgccgcttcgccgacgccaccgtgccgctcgacgaggcgctggccaaggccgtggtcgacatttccggccgcccgtactgcgtgtgcagcggcgagcccgaaggctacgaattctgcatgatcggcggccacttcaccggctctctggtccgccacgtcatggaatccatcgccttccacgccggcatctgcctgcacatgcaggtgctcgccggccgtgatccgcatcacatcgccgaagccgaattcaaggcgctggcccgtgcgctgcgcttcgccgtggaaatcgacccgcgtgtagacggcgtgcccagcaccaagggagccctgtgatggccgacgacaagttcgatccggacgaatcgcacttctccgacgaggagcttgaggccgcgctcgccggattcgagaaagaattcgcggacgattcggcatccggcgatgccagtgataccagtgatgccgataaaacggcggacgctgcttcagcgaagtccgattccgacgcgaatgatgatacggctgataaggcttccgctgattccggccagcctatgaccgacgacgtcaccgggtcggtcgctgatgcggtgaatgaggccatggccgacgtggtcgacccctcgctcggcttcgacaacgaactcgctggactgttgggtaacaaggcgaaggtggcgctgatcgtcacccgtcttgcctccgctgaactgttggccgcgttctgccagctgtcggacatctccgccgcatgcgtcggtgccaatcagggggccgtcgcggtgctgaagaatctggacggcgacggcccggaagccgcagccaaggacctgaccaccgtggtatccggcatggccgtgattcttgcagtcaatcgtgccgacaagctcgaagtggccatgtacgtgcagggagaggccggacagagtttcgcgccgcccgtgctgttcacctccacaccgcgcttcgtcgaggacctgatgctcggcatcgtaaccctgaaccaactcaagacccaagggttcgaagtggtggattccgctggactcgaccatgaccaggcgatgcagattctcgccaaccataccaagcgtgggcgtggcggacgcggctcccgcatcgaatagacgccaaccaaccagtaggggataggagagaatatgaccacagcggttgttttcgattacggtttcggcaatgtacgttccatggtgcgtgcgctcgccaatcttggcgtcgacaccaccctcacctccgactaccggcagtcgttggaggccgacggtctggtcgtgccgggcgtgggcgcgttcgccgcatgcatggaaggactgaagaaggtcgacggcgaccgtgtgatctatgatcgcatccgcgccggccgcccggtgcttggcgtgtgcgtgggcgagcagatcatgttcgaacacggtctggagcacggagcccatgccgcgggcatcgggctgatcggcggaacggtgaacctgctggacgccgacgtggtgcctcacatgggatgggacacgatcgaggccgcccccgattcggtgctgctcaacggcgtggagaatgaacggttttacttcgtgcactcctacgccgcgatggaagtgaagccggcggatacgtcccgcttcgacattgatctgagcggtgcgcccgaacgcgtgagctggtgctcgtacggccggtcgcgtttcgtggccgcctacgaacacggcccgctgtccgccacgcaattccacccggaaaagtccggggacgctggctcccagctcctcaagaactggatcgccacgctgtaaaaagcatgaagctcccctctgacgagagagctcaaattatgtataagtaactgaagaaaggctcttcttatgtcgttgactctgctgcccgccgtcgatgtacgcgatggcaaggccgtgcgcctgcgccaaggcgaatccggttccgaaaccgattacggttcgccgtttgaggccgcccgtacctgggttgaggccggtgccgaatggattcacctggtcgaccttgatgccgctttcggtacgggcaacaatcgcgatcagctgcgtgaaatcgttcatgagcttggcgaccgcgtgaacatcgaactgtccggcggcgtgcgcgatgacgcttcgttggacgcggcccttgaggccggtgccgcccgagtgaacatcggcaccgccgctttggagaacccggattggaccgcttcggtcatcaagaagtacggcgaccgtgtggctgttggtctggatgtgcgcggtcacacactggcggcgcgcggctggacgcgcgaaggcggcgacctgtttgagaccatgaagttccttgactccgtgggctgctcgcgttacgtggtcaccgacgtggccaaggacggcatgatgtccggcccgaacatccaactgctgcgtgaagtcgccgaacgcaccgacgccaaggtcacggcctccggtggtatctccaagctggacgatttgcgcgccatcaaggaactggccgagatcggcgtcgattccgccatcctcggcaagtcgttatacgcacgtgcgttcacgctccaggaagcgctcgcagtcgcgaagtaggcaaaggactcgccttagcgagactgttaagctacctttgctcagctatcgcttcactcaggcctcgcctacggacagcccactgggctgtccgcttaacggctcagcaaggaaggtcgccggatttgaggagctttttgaagacggtgtagtcttcatcattctgttcggcgtagctgacggcgaacgaggcaatggcctgatcgaattcgtcggtgccacccatgtaattggcgatcgcgatcgaatcgccggttcgctcatagtcactaccatagtgccgtgccggcatgggcccgaaccatgcctgacatgcggaccggggcatgttgatgaaatctcgcgactcgcaggtgacaaacagtgagatgttaacgcccctcgtaacacggttatggaacgataggcgactatggataaacagcaggagtttgcgctgcgcacggtcgaagaacgcgacgtgcgctttattcgtctgtggttcacggacgtgttgggaacactgaagtccgtggcgattgctccggccgaactggaagccgcgtttgaggagggtctcggcttcgacggttccgccatcgagggcatgacccgcgtgtccgaagacgacatgatcgttcaacccgatcccgcgacgttccagatcctgccgtggcgcggtggcccgcaaggtaccgcccgcatgttctgcgacattctgaccccagacggcgagccttcgctcggcgatccacgtcacgtgttgaagcgtacgctcgccaaggccaaggacaagggcttcacgttctacgtgcatccggaaatcgagttctacctgttcgaaagccaggacgactggtccaaggccccgaccccgatcgacgagggcggctacttcgaccatgtgccgcgcagcccaggcatggacttccgccgcgccaccgtgaacatgctcgagcaaatgggcatctcggtggaatactcgcaccatgaggcggggccaggccagaacgagatcgatctgcgatacgcggacgcgctcaccatggccgacaacatcatgacattccgtacggtggtcaaggagatttccttggagcgcggcattcacgccagcttcatgcccaagcccctggccgacgcgcctggttccggcatgcacacgcacctgagcctgttcgaaggcgattccaacgccttctacgaggccggtcaggagttcaacatgtccctgaccgcccgccagttcgccgccggcatcctgtaccatgcggccgaaatctgcgcggtcaccgaccagtacgtcaactcgtacaagcgcctgtggggcggcaatgaggcaccaagctacatctgctggggccacaacaaccgttccgcgctgctgcgcatcccgcagtacaagccgggcaagggcaactccgcgcgcatggagttccgtgcgctcgacccggtggccaacccataccttgcctactcggtgctgctggccgccggtctcgatggcatcgataagcagatgcagctgggcgaacccaccagtgatgacgtgtgggagctcaccgacggcgaacgtcaggctatgggcattcagccgctgccgcgctcgctggacgaggcgctgaagatcatggagaaatccgacttcgtggccgacgtgctcggcgaacacgccttcggctacttcctggacaacaagcaccaggaatgggaggagtacaaccagcaggtcacgccttacgagctgaagaagtatctgccgaagctgtaatcgcaagcgttgcacatgtgccgaaccccgtcgatgattggtcatcggcggggtttctatagcgtgtcgtggtggtgggtagcgggcagaggtgggaatagtgttgtcgctgagttgatacgaaaaacgattgacgtaaccgacgaatcagcttgtagtacgagcgagagcactcaagagagcacccatgacgaacacacctgcgaacaccgcgcgcaccgaccgcttcttcaatctgccggtcaccatcctgatcttcgccagcttcatgctgggcatgagcgaattcgtggtagtgggcatcctgccggacatcgcatccggacttaaggtctccgaagtgaccgtgggtaatctggtggccatcttcgcattcgtgtacgcgccctgcacgccgctcggatccgcattatccgcccgattcccgcgctttctcacctatctgacgttgatgggcgtgttcctcgtcggcaatatcctgtgcgccttcgcgccgaactatccggtgctgctcatcgcccgactgctcatcgcctcggtgtccggcacgctggtggccatctccatgaccttcgcgcccgacgtgaccaccgacaaataccgcaccaagttcattgcctgggtattctcgggtttctccatcgcctctgtggtcggcgtaccggccggcacttgggtggccaatactttcggctggcgtgtcacctttgccttggtttcggtgctcaccgccgtgctgatggcatcgatggcagtgtctctgccacgcaactcacatccggcgaagatcggtttcctgaggcaattccgtctgttcttcgaccgccgcatccagctcggcgtggcggatgtggtctttggcgcagccgcctcctacgtcttctacacgtatttctcgccgatcatgcgcgacgaaatcggtgtgcccgaacgctatatcagcgtcggcttggtggtctacggctgtgcctgcctgtggagcaacctgtacggaggcaagctggccgatcggggcaggggggtcgagccgctgacccacattcgaccgatctactgcgtgcaggccgtctgcctgtgcctgctggctttcgcctcgctggtgccggccggcggcgcactgctgctggtggcgcttggcatgctcatgtacctgcagaattccgcttcccaggtgctgtatatggatgtggcctaccaatcccatcccggttcggtgaatctggccgcctccctgaattccatgtcgttcaacatcggcatcgccatcggctccgcggtcggcggcctggtcaacgacctccttggcctgacctggctcggcccggtcggcgcgatttttgcgttgctggcagccggcaccacgacactgctgcgtccgtacgtcagcccggtcggggaatgacgggtggcgtgacgcgcgggaacgaagggtttttcccgcatgtccccgcggcatgccttatccgccgattgccgtccattgataacctgctatccaaataaccgataaggccacagcatgtcatcctgctgcgaaaccttaatgttaggacaccggctgcagggggacccggctcacgggcgcccacctgcgcggattgatgattatcggcatgttcagcgtgaaaatggggatgacaatatgacggatgcgactgcgaaagccgcgccgaaggcggaaagacggcggcgcgttctccgttccggcgctcgctcatcgatagtggtcggcggcgccatcgtgctgttcttcgtgctgctggcgccgctggccgggccgttgtcggccatcaccggcaacgacccgtacgccgagcatcccgaggccttgggtgccgggtcggtgccggccggattcggcggcggcatcagtgcccggcactggttcggcgtcaccccgctgcgcggcgtcgacctgttctccatcgtggcgtacggctcacggatctcgctgggcatcggcgtcgtctcgtcggtcatctcgctggtcatcggcgtggcgctcgggctgctggccggctatttccccgggttggtcgatgcgctgatctcgcgcacgatggacgtcttcttcggcttcccgttcctgatcttcgcgatcgcgctgtcggcggtggtgccgcagggcttcccgaggccggtgctgctgacgctagtgctcggattcttcggatggcccggcatcgcgcgtcttgtccgggggcagacgctgacgctgagcaagcgcaatttcgccgtcgcgtccaaggtgatgggcgcctcgcctgcccatgtgctgtggcatcagatcctgccgaacctcatgccgctgctcatcgtcaacatcacgctgtcgattcccgggcgcatcggcgccgaggcgggcctgtcgttcctcggcgtcggcatgaacccgccgacgccctcatggggccggtccatctccgacgccgtgcagtgggccctggtcgacccgatgtatctgatcttcccgggcgccgccctgttcctgctgaccttcggcttcaacctgcttggcgatggcctgagcgacgccatcgacccgcgcaagggggtgcgtgcatgagaatcctgcaatacatcggcaagcgcgtggcgagctcgatcgtcgtcatcctgctcatcacgctggcgctgttcctgattttcttcctgctgccgaccaatccggcgcagctgtcgtgcggcaagccgtgcacgcccgagcagctgcagcgggtctccgccttcatgggcaccgataagccgtggtacgagcagatgggcaattacgtggcgggcatcttcgtcgggcgcaccttcggcagcggcggcggcgccgtggtctgctcggcaccatgcctcgggtattcgttccgtctcaacgaatcggtgagccagctgatcctcgaccgcttcccgatcaccgcgtcgatcgcggtcggcgcggccgtgctgtggctggtcatcggcgtggcgaccggcgtgtgggcggccctcaagcgcgatacgctgatcgaccgcacgctgctcgggctgtcgatcgtgggcgtttcggcaccgtcatacctgatcggcctgctgacggtgatcgccttttcgctggtgctgcagatattccccagcggcgggtacgtgaacttccacgacgaccctgtcggctggttcacgcatctgctgctgccgtggctggtgctggccgtgctcagcgccgccggctacaccagggtcacccgcacgcagatgattggcgagctgagccaggactacatccgcaccgcccgctccaagggcgtgcccgaatcggtgatcatcttcaagcacgcgctgcgcaacgcgctgctgcccgtgatgaccatgttcggcctcgatctgggcgggctgctcggcggcgcggtgctcaccgagaaggtgttctcgatgcaggggctcggctcgctgctgctcgattccgtgtcgaacctcgacctgcaggtgctggtcggcgcgacgatgttcgccgccgtgctggtcatcgtcgccaacctgatcgtggacatctgctacagcctgctcgaccccagggtcgcgctcggcacgaagtagtgcggctgcggccgcaacacgcgatacttgccggtctgctccacggaccggcaccgatagagaggaaaaccatcatgaagaacaacgcatggcgcgtattcgcggcgggggcttgtgccgcggtactggcgctgtccggctgcggcgcgtccaacgacaacgccgccaccggctcggcgagcggcaccaccgtcaagggcggcacgctgaacgtgctgctgtccagcacggagatggatctggacccggccaagagccagggtctgccgaccaccacgaacggcaacatcttccgccgcctgaccgcgtggaagatcaccgacaagggcgagacgaaggtcgtgcccgatctggccaccgacaccggcaagtcgagcgacgacggcaagacgtggacgtacacgctcaagaacgggctcaagttctccgacggcacgcccatcacctccaaggacgtcaagtacgggctggagcgttccttcgccgactcgctgaccggcggcctgagctaccacaagacgctgctcgagggcgcgcaggactaccacggcccgttcgacggccaggagctcagctccatcgagacgccgaacgacaagaccatcatcttccacctcaacgcgccgttcggcgactggccgtgggtcgtctcgctcgccgcgttcacccccgtgcccgacggcaagggcccggcgtccggctacggcaagctgccggtggcctccggcccgtacaaggtcgagtcgaacgaggccggcaagcaggccgtcttcgtgcgcaacacctactgggacaagaagaccgatccggtgcgcaccgcgggccccgacaagatcgtgttcaagatgggacaggacacctcggtggccgcccagtcgatcatgcagggcaccggtgaaggcaagaactcgttcctgtccggattcgtgccggccgcgcagctcgcgcaggcgcaggccaacccgaactacaagaagctgctgaccaccagcggcgacggcgcgctggaatacctcgccatcaacacccaacacgtgaagaacgcgaagattcgccaagcgctgcagtacgcggtcgacaagaaggcctaccagacggcttccggcggcgagatcgccggcaacttcgccaccacgctcattacgcccggcatcgagggccgcgaggactacgacctgtacaaggccgatccgaccggcgacgtggacaaggccaagcagctgatcaaggagtcgggcgagcaggccccgaccctcaagctcatcgccacctccgctcaggccgaaaccgcctcctcgatccagacgagcctcaagcgggccggcgtcaaggtggacatccagacactcaacgacgatgtgtattccgatacgctgaccaacgacaagggcgactacgatctggccatcagctcgtggcagcccgacttcccgtcgccctacgccaacatctccccgctgttcgactcctcgcagatcggccacggcaactacaacctggcccgttacgcgaacccgaaggtcgacgagctgatcaagaaggccaccgagaccatcgatcagaccgaggccggcaagatctgggccgaggccgacaagacgatcatggccgacgcgccggtcgtgccgctgatctattcgaagaacacgttcatccacggatcgaacgtgaccaacttcgtcatcggcaacttcccggcgtacccggactacacgcaggtctcgctcgccagcgcgaactgagccggcatccgcatccggcgcgcgccggcggcatggtccgctggcgcgcgcgccggacgcattccaacgcttgtgcatccaaggagcttccaatgagtgaaccacgcgcgatcgtgaccgtggacggtctggccgtcagcttcgacgagcgggaggtgacccacggcgtcagcctcaggctgttcccggggcgcatcaccgctctggtcggcgaatccggctccggcaagtcggtgacggcgatggcgctgccccgtctcgatccgtcggtggccagcgtgaagggccacgcgtacctcgacgacgcccttgtggatgacgggccggactccggtccgggcggcgacggcaaggacgccgccggccgcggcatcgatctgctggccgccgacgcgccgctgcaacgcatccgcggcgaatacatcggcacggtgttccaggaaccgtccaccgcgttcaatccggtgttcacgctcggcgtacaggtcgcggaatcgctcaaataccaccagaagcagctcagcgccgccgagcgcaaggccaaggtgctcgaacagctgcgcgaggtcgggctcgacgacgccgaacgcgtgtggtcgtcgtacccgcatgagctgtcgggcggccagctgcagcgcgtgatgatcgccatggcgatcatcaaccgacccaaggtactcatcgccgacgagccgaccaccgcgctcgacgtgaccacgcagaaggcgattctcgccctgatctcctcgctggcggtcgacctcgatctggccgtgctgctcatcacccacgacatgggcgtggtgtggcaggccgcgcaggacgtgtacgtgatgcacaacggcgtgatcgtcgagcaggggagcgtcgcgcaggtcttccgccacccgtccgacgactacacgcggatgctgctcgacgccgtgccgcgcctgcgcatcgacgagcatgcggcagacggcgaacatgcggccggcggcgaacgcatcacggaaagtgacgcgcccggcggcggcaggcgcatcacgcaggtgaacgacgtggccgtgtcgtacaaggccggcagcttcgccgtcaaggacatctcgttcgatctggtggccggcaggacccgcgcgctggtgggcgaatcgggagccggcaagaccacgatcgccaaggtgatctccggccagctcgcgccaacctcgggcacggtgctcatcgagggggaggatctcgccaaggcgcatggcaggcgcaagcgcgagatcctgaagcatatgggctatgtgttccaggacagcggatcggcgctcaacccgcgcaagtccgtggcatggagcatcggcgagccgatgctcgtgcagggcgggctcagcgagacggaccggcgcaagcgcgtccttgaattgcttgatcaggtggagctgcccgccgatgtggccggccggttcccgcaccagctgtcgggcggccaacgccagcgcgtcggcatcgcgcgcgccttggcgctcaacccgtcgctgctcatcgccgacgagccgacgtcgtcgctggacgtgaccgtgcagcgcaaggtgctcgacctgctgcgccggctgcagcgcgagcacggtttcgcatgcctgttcatcacccatgacctgggcatcgtgcaggagatgtccgacgtgatcacggtgctgcgccacgggcgcgtcgtggagagcggggagaccggccgcgtgctcaaccatcccaaggccgagtacacgcgtaccctgctcgacgcctccccgaagatcgacctgtgagccgtgccgcccgtcatccggccggttctccggccgtgcggcggggcggcgacggcgcggatgacacctagccttaccgtggtttcggttttttgccgttcccgcccctatcggcgcgcggcaccgaaccagttggtgtatatgagggcgaagttgcggttgccgtagctggagcatgagtcgccctcgccgaacccggccgccagcgaggcgtcgttcggctggtagggcgtgtagatgtagagcagcgcggtcgccttgttctcgatgtacacgttggtgccgccgcacccggcatccgggtggtactggatgtagttcagcgcgttggcgtgatagccgtaggcgctttcatgcgccacgtagtattggtagcggtgcgccgccccgtacacctgtctgaagaagccggcataggccggatcgcagttcgcgttgtccgggcagctcagccccatggcggccttgtactggaagtccgtcggatcgacggccgtgaccaggtgctgctccttctgcatcacggtgagcagcaccttctggctgatgccgcacgcgcgcgccgacttgtcgacgatcgcggccgcggtctcctttctcgcgccctcgtacgccgcgcaatactcgttcgccgcctggtcctcggtgtcgaaggtcatggttttcaggcaccgggaaccgctgcacgccgcgccctgcttgtcgaggaacgactggacctcggcctcgctcatcgcattggcgttgaagaactggccgtccgagatgatgtcgccgggattgaagtcgtattgctgcgtcagctgcagctggcgggcctcggcctcctgcacgtcgcgacgccactggacgacccgcacagtgcccacgaccagcgcgaccacgcatgcggccgccaccacggtgaccagcacagccgcgacgcgctgcgccaacccggcccgcttccaccagcgcgccgggctgagcggatacctgcgattgcgcgggcgtttgcccgggcgacgtttgcgattgccgcctgacacgccccgccccgcgacaatcacgttcgccctgccgcgcggattggccggcttgcgccgttgcgtcgtcgccatcgctacgccagtgccttcttgatgcgctgcaggctcaccggcttggcggtgccaagctcctgcgcccacagggacacgtagaattcctcgagcatccagcgggcggcggtcgcctgcttcatcagcgtctcgtggcgggggccggccggctccgccttggccttggccatcgccttgtcgaccagcgtgcgggcctcgtcggcctcccacgcccaacgcacgtcgcggttcttgtcggtcttcgccttggccaggcgcatgagatcggcctgcaggtatcgggagatgttcgccagcgcgtccgggggagcggcgccgacgaatccggggaacaccagcgtggcgatgtgctcgcgcaccgactgcaacaccgaaagcatcggcagatcagccttgccgccagtggccttgtcgacttcggcataagccttgagcacggcgatcacgtcatgcgccacctgatagacggtgtcctcgtacacttcgcgcacatcgagcaccgcattggccaacgcctcatcgtccgagagcctgtcgacattcggcatcagccgtttgactgtggccagctgcaggtcttcgaccagatccttggtgaacttgtacggagcggaagccagcatcaacgcctcggtacccagccagcgcgacgaaatgcgttcggccggcaaccgcagcgcatccaatgcgccacgccagagcatcgtggcccgggactcggtggtggcacccgccttatgcaacaggttcgcctgactgaccagcttgccctgttctccagcctgatcggcctgcttcttgaccatttgacgggccgacgcctccgcctgcgcggcgaacttgcgttgcagcgccttcagatccttggacacacccagcaccttgacggggccgcgcgcatgccggcgtccacgagggtgcttgc

SEQ ID NO: 3473 - DNA, 8092 bp, Unknown
  R85_18m  MAG No. k141_2512
atcttgacgtccgggctaatgcggccttcgaagttgcggttgccggagagcacggcggtgacggtcaggtcgttggtgttgatcgcctcggaaatctcgggcagcagtggtccggagttgccgatgcaggtggcgcaaccaaagccgaccaactggtagccgagtgcatcgaggtcgtcctggaggcctgcggccttcaggtagtcggccacgacctgggagccgggagccagcgaggtcttgacccacggcttcggcttcaagcccttggcgtgcgcgttgcgggcgatcaggccggcggcgatcatcacggacgggttggaggtgttggtgcatgaggtgatcgaggcgatgtccacgtcgccgttttcgatgtcgaaatcgccacggaagtcggtggacacggccaccggatccttgacggtcttctcggtctcgtaggcgggggcggtcttctcgaacatgctcttggcttcggacagcagaatgcggtcctgcgggcgcttcgggccagcgatggacggcaccacggtaccgaggtcgagttcctcgtattcggagtactgcggttccacgtaatccgggtcggaagcgtcgccccacagcttgttggccttggcgtaggcttcgaccaacgcgacctgctcttcggagcggccggtcaggcgcaggtagtcgagcgtgacattgtcaatcgggaagatgccgcaggtggagccgaactcggggcccatgttgccgatggtggcgcggttggccagcggcacggaggcgatgccttcgccgtagaattccacgaacttaccgaccacgccgtgcttgcggagcatgtcggtgatggtcaggaccacatcggtggcggtaacgccctccgggatggagccggtgagcttgaagccgaccacgcgcggcacgagcatggagatcggctggccgagcatggcggcctcggcttcaatgccgccgacgccccagccgagcacgcccagaccgttttcggtggtggtgtgcgagtcggtgcccacgcaggagtcgaggtaggcgagcgcgttgccgttgacctcggccttgctcatgaccaccttggccaagtattcgatgttgacctggtggataatgccggttcccggcggcaccacgcggaagttcttgaatgcctgctgaccccagcgcaggaactggtagcgttcgccgttgcgctggtattcgatgtccatgttttgctggaccgcgtcggcgatgccgtacttgtcgatctgcacagagtggtcgatgaccatatcggactggacctgcgggttgatgacctccgggtcgccgccgaggtccttgaccgcgccacgcatggtggcgaggtccacgatgcagggcacgccggtgaagtcctgcatgatcacgcgggacggcgtgaactggatttcgtggctgggttcggcgttcggatcccagtcgagcagggtcttgacgtgctcgtcggtgatgttggcaccgtcgatgttgcgcaccagattctcgaccagtaccttcagcgagtacggcagatgatcgatgccgtcgagattggcgatgttgtagtaatcgaagtccttgccggctaccttgagggtagccagctggtcgtcgcgtaaggacatgcttcctccgaaatcatgaatcggcttatgatgccgctgattatccgctacacatggtacgggcacgttaccgaggctctggcgtgtcggcttgaagtatgagacaatcgcgccgccgtctcaatgccgacgcgagagcttgcccgtcagtccgcgcacgagcggcgccagccacaggcacagcgcgaagatcagcgcggaaccggccaacgcgatcagcgtggccaccatcgtggcgccggtcggcagaatcagggcgaagaagttcgccacgaacgggacgaacgcgccgatcacgcccgccgccgcgaacaccgccaccagcacgccacgccaaccgttgagtggtctggccacgcgggccagcacgaacacgcccatcgcgaacaggatgatggcgctggtggcgcgcagggcggacaggtccgcggcatcgccggtcacgttccagcccatgaccggcggcagcacccaagcggccagcagcaccgacagcgcggtggcgatgccgcccggcagcgcgaacgtgaccacgcgcttgaggaatcccggaatatagcggcgcgtgttcggcgcgagcgccaggatgaacgcgggcatgccgatggtgagagcgccgatataggtgatatggcgcggcaggtatgggtatgggatttgcgtcagcactacgccgagcgagatcagcgcggagtacacggttttgacgaggaacaggctggccacgcgctccatattggccatgacctgacggccccgcgccacgacgtccggcaggtgcgagaacttggaatccaccagcaccacctgggccacggccttggtggcgggcgccgcgttgcccatggcgatgccgaggtccgcctccttgatggcgagcgcgtcgttgacgccgtcgccggtcatggcaaccacgtggttctgcgtgtgcaacgcctgcacgatggccttcttctggtcaggcagcacgcggccgagcacatcgacgttttcgagcacgcgggccagttcgttcacgtcctcgggcagttcgcgcgcgtccatcgccaccggctcatggtcgcctgtcagtttcactctgcgggcgatggcacccacggtcactggattgtcaccggaaatcacacgacagcgcacaccctgctcacggaaccaagcgagcgtccgctcggcgtcctcgcgaatcttctcagagcacaacaccaacgccaccggctcagcctgcacatccagttgcgggccgtccgagacattggctccctcaactgcgtccctcagtccgcttcgcggactgaggggagctgtagaccgcgcaacaagcaacacacggttgccgtcattggcatactcgttaacctgctgcaacaccgacgaatagtcaccctcaagcgcagaaataatcacctccggcgctcccatgtaccaggtctcgccggatttacgcaccgcactccatttgcgcgccgaagagaacgggacacgagactcaaccgcacctgccccatatccttgggccttgagcccggcgagtacggcttggccggtgccgttgggctgctcttcgttgcagcagtcgtagagggcctgcgtggctgcctgttccgcagccgcattggcggaatcgagcatcacgagccggttgaaggcgataccgccatcggtgatcgtgccggttttatcgaggttcagcgcgtccacgcgagccagtgtctccacggattcaagctcctgcaccagcgtattgtgacgggcgagacgcatggcggccaccgcgaagttcagcgaagtcagcagcaccaagccttcgggaatcatgcctactacgccggcgaccgcggaaaccacggcttgccgccattcgccggtggagagtgccgtaccccaaccgccgaccgtatgaatctgcgaaagaatcagcagaatgcacagcggtaccacgaggaaggtcatgaatttcagaatcgtgttgatgcccttgttcaggtcggacacggttttcttgtataccttggcctgcgcggtgagcgtggcggcgtaggaatggctgccgaccgcattgaccttgaccaatgccatgccggagaccgcggtggcaccggaatacacctgctcccccaccttgtggcgcacggtacgagattcgccggtgagcatggattcgtcaagttccagtccccaggtctggatgatctgcccgtcggccggcacctgttcgccggcacggatccacagcaggtcgtcgagcacgatctcgttgtggggcacctccacgtccctgccgtcacgatgcacgaggaattcggaggccacaaggatggaaagcttatccaacgtgcgcttggccctgagttcggtgacgatgccgatgcccgtgttgatgatgatgacgaaaccgaacaccgcgtccctccaggaaccggtgatcagcaccagtaccatcgcggcgaagatgatgccgttgaacagcgtgaacacgttggctcgcacgatatcttgaaccgaacgcgaggtggatgttttcaccgcattcgattggccactttcgatacgctgcaccacttctttgggggtaagaccggttactccgatttcaggcatttccacggctgttgttgcactcatattccccagcctaccgcgtcttgtttcgcaatccgctaaggctcagggatgattcagggtgctttctcagcttcaagggcctgattcggctcaggaaacggtgactttgatctcgcgttcgtggggttcgtcgcgcgtgatggtgagcacggcgtcagtaatagtcattggcttggtatcggcagtgtcgccagaatcggcactgttggtgttgaggtgaaggatgacggcgtacagcagttcatcttcgggcgcatgctttggatcaatgagagcgactggaataccggcttcacgcgcattggtcaacgtctggttccagctctcccggttggcgtcggtaacgtcgatgccgctgataaccacgattttgaccgcgcgagctacgaaatcggcaacaccctgctgtgcggtggccgcattcttgtcgacgccagtatgagcatccatactatcggcaccgttttcgctggtagtgccggcgtcagaagattcggtttcaccggatacaccatcagttgcgtttgccgagcttgcggatgtttcgagcgaggcatagtagacattgagtttgtcatcagacagcgcattgatgacgaactcgtctgcggcggtgtcagtcgaccccacaaagccgactgtgacatccgtgggatgtgtggaatcgtgggcgacttccggcatgctgtcttgggtatcgccgaccgccctaccggccggcgtgcaggcggccagggacaacacagccgccatgcaggccagcaatccgagaattcgtcgtgtcatatgctcacctgtcagcgggtaaacagggccaccgtctcaacatggtgggtcatcgggtagatatcgaaggcacggatgtctttgagctcgtagccttcgccgatgagtgtcgcggtgtcgcgtgcgaggctggtgggatcacaggcgatgtagaccacgctggatgcgccggccgcggcaatctggcggcagaccttggcacgagcaccggcacgcggcggatcaagcactacgacattcggcttggccagatgcgccggcacatggtccagcgtgcgcgagacgtcacccgcgcgggcgtccacgtcgttcaggttcatggcgcgcagattgcgctgggcgttcttgacggccacacgcgcgccttcaacgctgagcatgcgggtgcgttcaccggtcattgtggccagcggcagggtgaacaggccggaaccggaatacaaatcccagattacggcgtccgccgctgactgcagctgcccgttgaccaggttgatcacgtgcgtaccgagggcgatcggcgcttggcgatgcacttgccagaaaccgttggcgtcaacctgatagtcgaaggtcgtgccgttgatggtcacctgttcggtgagcagctgggagccggcgcgcagttcgccgtccacaagtacggcgtaattgtcgtctgctgccgcggtatcgacgatctcgccgcgcggttcgggcacggaaagacgaatctgggagccgggttcaaagccgccttcccacacgtgttcgcgcttggcgacgtccagcagcgtgcgcgtggcaagcggcatggtgtcgatggccacgcggttgtgtgtgccgcgccggcgcatggatggcatgccgttgtcgtcggcaatcatttcgatgcgggtacgccaattgaggccgccggctgccttgtcgccgggcatgcgctcgatgggaacggccacgtcgatatggccgagtcggctcatctgttcggagacggtgatggccttccacttgagctggccgggcaaagagacgtgcacgagatccgcgccgcccactcccccgcccatcgccaagggaccggcaagtggccatgccggggtgactcggtcttcggacggctcgagaacctcgacgacttcgccggtccagaaccggtcgtcccggtcgtggggctcgtcaagttcgactcgcacgagttcgtcgggcaaggcgaagcggacgaacaccacacgaccgtcgatatgggccacgcagcggccttggtcggcgtatcgttcgatacgaacttcagcttgcatcatcgtcctttccggttacgctcggttcaagttcggcatcaacagcgacttcagtctgtatcttcctagccgcgaccttatgccggtgcatcggcgtggcaataatgaggtaactcacccaaatcgccaatgcccagaacggaatgcccatgagcaggcgggtcacgccgagtgcagctacatggttggtcagatacagcggcacctgcaccaccagccgcagcaggaacagaccgacccacaggccggtgacaatcatataggcgcgtttcagggccttgtcgtccatccagtcatggaaccatgccttgaaatgctcggtgggcaggctacggatgaattcgacgaccaaacccagtccgggcacgcgcgcaatcagcgacacggcaagcaacgcggcatagccggcattggtaatgaatccgaagatgtagtaattgcgggcctcatgagtctgccatgcccaaatcaggcagatgcctaccgccaccagaccagagaccgcgcccattaccgactggcgctgaatcagtcgcacaataacctgcaataccgccaacacggccgaaaccgcaatggtgagattcagattgctcgtggccacgaacagtacgacgaacaccacgccaggcagcatggattcgatgacgccacgcgggccaccgatggcgtcgatgacggagaaatcctcgccttcattgccggcgtcggctagagcggacaggccggtgcgtttgttgtctgccaagtctcttcctataaatcagcgaacttcggagaacatcgggccgcgagacagcgtggtcttcacttcggtctgctggtcctggctcagcggacccttcggcttgttgtccggaatgtccttgaagtgttccttgccgttctcctcgccggcttcggccgcggccttggcggccttacgctcagcgggggcgaccggcggatgcatcgggatcagatcgcgcggcgccaaaggctcctcgccacgctcgacgacgatgtcggcgaagaacttgttcagcgcctcggtctccgggctgtccggatcgatagcagccttgccggagaagatgccacgcagcatccagcgcgggccgtccacaccaacgatgcgcgtgttcacggttttgccgcccttgacattgaccggcagcttcagttcggtgccgaacacaccgtccacttcagaagcggccttgttggcttcaagcaggtcaccgcgaacgtcatcccacagtcccagggtcttgggtgcggcaaaggcttcgatctccaggctggaggagccgaaggtgatggtggagccaagcacttgctgggtggcgcggttggccttgatgcgcagctggatgccctggaggaagggcaggtagtaggcgccgagatccagataatcgtcataatcgggcacgtcctcatcgttgacatcccacgggcctcgctcttcgccgcggccctggtattcgctggccggctcggcgagcacggtctccgcgctctcggcctttgcggcagcgttcgcttctgcggcggccaccttgtcctcatcgacaggctcaacggccggctcggcttccttcttgctcttcttcttgccgaatccgaacagtcccataattcctcgtttcatgtaacggttgcaaccttgctaacactagcactcaggcttagagaaagctgagcatcgcggccgccggtgtccggttcgattcgtagggaggccacaatagtatggccgcatgaccatcaccattaccacgtctaacg

SEQ ID NO: 3474 - DNA, 17848 bp, Unknown
  R85_18m  MAG No. k141_2763
cggggccaacaacagttgcgcccgcgttcgtcaccgtttcgacgatcttcttcgccgattggtcgatgacctcgtggtcataggacttaagcctgatgcggattttctgtcccgccattgccgtccgccctttctagcgatgttcgttgtactgtttaccaacctgcttctagggcaccggcgcgcatggcctcccttggacatacgtcctctggcggtcatccgacatcagtgcgcggtttccggctgtcacttcacttgaaatggctcccggcccgcgctcgcttttttaattccaatttgcgagcccaaatcaggcaacttgtttattcaagcattgaggtgggacagcgcggagcaattcgcgcgtgtcgcgctcatgccgttcgtattacctcgcggcatagccgctcggcgtcgcctaccaacatccttctgagacttacctatatatagtggcacagctcacgttggcgaatatggattgattaattgagttggacggtaacgcgaattactcttaaggctcgtgacacaatcactggcaaagaacatcaaacctattcgtgagcacggtgccaacgtgttatatcagcacggcactttggccttactcgtgccggggctgctggaaggcaccaccaccatcggcgaattgctcaagcatggcgacaccggcatcggcaccggcgagggcttggacggcgagctcatcatcctggatggcgtggcatacaagataggccaatccggtgtggccgaacgcgtgccggacgacttcaccatgccattcgctaatagccatcgcgcggccttccagtaccagtgcgagcgtcatgatatcggcctagaagagctcaacgaaaagatcgtcaaggcgaacggccgcgcgaacacgttcttttcggtaattgtgcgcggcacgttcagcttcatcaagacacgcgcggtcatcaagcagcaggcaccctaccccacgctggtagaggtggccgaccggcaggccgtgttcctgcgccacgacgtcaagggcaccatgctcgggtacttctcccccgtgatgtttcacggcgcggctgtggccggattccacgagcacttcctgtccgacgacaagacgttcggcggccatgtgctcgatgcggtgctcgagcgcggcaaaatctacagtcaggtgttcgataccttggtgcagcatctgccggtggacgaccctgattatcgcaaccacgacttcagccaagatccgatagccgaggccatttccagcgccgagggcgatactcaacgagattagtctcacataaacacaatgtgagccaaatgaacatttccgaacaatcgcacatgttgcataatggcggaagcactggcttctcgcacttcctatgttcgattgtcgcaatgcaggtctcacatctttcttattgagaaccattcgctgcgatatcatgacagatatggcttcccgccgcaagactcttaaacgcgattggttcgacaaccaacctggcgcatgggtaatggttatgctgcccgctgtggctggcttctttatcggcgggcctaatcttgatacgctttggctgttggcgacgtgggccgtgtgctattgcgtgcagttcagcgccgcgcactggttcaaagcacacttttcacgccgttatctgccgccgatgctcacttatgccgtagcgctcatcgtcatcggcttgccattcctgattacgcataccggcatactgcgttgggctcctttatatatagtgctggttgcgctgtcgatgctgtcctcgtggctgaggaaggagcgctcgctgtggggcaatgccgtgtcggtgattgccgcatcggccatggccacggtgatcgcgtcgtttggcaacgctgttgagacggcatgtgttattcccatcaacgcagcacatgcctcgtgcgcagccgctgatgtcaccgccgcacgcgccgcgattcggaatatgccggatttgagccagatattcgaccttcacgcctggtggcctgcgggttcattgcccgtgaacgggctgattgccaccgtgctgtttgcgctgacgcagtatgggtcggttttggtggtcaaaaccatgatccgggaacgcgggaagcgttcgtacgtggcggcttcgtgggtatggcatgtggcgctattgctgctagccgccgtgccggctggacgcagcccgtatctgattgcgatgactgtgctgctgttggcccgcgccgttgcgttgccggtggttacacggcgcacaaccttgaagcccgtggtgaccggcattaccgaggcgtttgccagctttattgcttttggctgcattattgcggtgatttagcgacgctcagcgattccatggggcggtaattccctcatggggcggtaattagcccatggggcggacggtaaaattttaccttccgcagaatagagccgttttcgtacaccgccccatggggttttcaccgccccatgggcaagttaccgccccatggggttttcaccgccccatgggcatgttaccgccccatgggcaagttaccgccccatgagtaggttaccgccccatggaggcacctgccggctgagggagcgccacatatgcaaaggagcccggcccctgtaatggggtcgggctccttgtgtccgctatgcagccactaagctgcaacaccgcggttggtggctactgctggtgccagcagccgccaaccgcctgcaatcagcgctcggaggcttcctcagtggcggcctcaccctcgcgctcgatgcgtagcttgtggccttccgcctgggagacgccgtagtaagcaccgacggcgatgtccttcatgtcgttgatcagcgggatgcgcgggttggccggggtgcactggtcctcgtaggcgcgcatgccgatctgatcgagcacggaccagaagtaatcctcgtccacgccgcaatcctggaagctcttgttcataccgagcttgttatcgcggtagtcctcgacagccttcgccaggttctccacggcttcggccggggtcttgccggtgtcgatgccgaggttgcgggcgatgtcctggtagcgctccggggcgatgtacttgttgtacttcggccaagaggtgggctcctcaggaatctggccgttgtagcgaatcacgtacggcagcaggatggagttggtacggccgtgggcgatgtggcacagggcaccgatggtgtgggccatgccgtggcacatgccgaggaacgcggagccgaatgccatgccggccatggtggcggcgttgtgcatcttctcctgagcgtcggtcttggccaggccgggctcgccgttgacggactcagccaggttgtcccagatgagcttggccgcgtgcagggccatgccgtcggtgaagtcgttcgcgtacacggacacgtatgcttccatcgagtgggtcagggcgtcgaagccggcgtcggaggccagcttgcgcggctgggtgcgggccagcaccgggtccacgatggccacggacggggtcagcgcgtagtcggtgatcgggtacttgtagccggtcttgtgatcggtgatcacggcgaacggggtgacctcggaaccggtgccggaggaggtcgggatgcacacgagcttggccttcttgcccagcggcgggatcttgaaggcgcgcttacggatatcgaagaacttctcgcgcacgtcggagaaggcgatttccgggtgctcgtagagcagccacatgatcttggaggcatccatcggggagccgccgccaaccgcgatgatcgtgtccggctcgaactcctcgcgcatcatctccgcgcccttttcgacggtctcgacggagggctccggctcgacgtagtcgatgatgcggaaggtcacacggttggagcgggcgcgcagctggtcgatgaccttgtcgacaatgccgagctgctccatgaccttatcgcacacgatgacggccttctcgatgccgtacatgtcgcgcaggtacttgatggcgttcggctcgaagtaggtcttggccgggatcttgaaccactgcatgttgttgttcctccgagcaatgcgcttgatgttgacgagattcacggcctgcacgttgccggacaccgagttgccgccgtaggagccgcagcccagggtcagcgacggggcgatggcattgtagatgtcgccgatgccgccaagggaggaaggctggttccagatgatgcggcaggcgtgcatacggacgccgtactcacgcacgagctcctggttgttggtgtggatggcggcggtgtggccggcacccagcttgagcatcttctcgcacatctcgaaggcctgctccttgttgtcggccttgaggacggcctgcaccggggcgagtttctcgtgggtcagcggctcatcgtcggagacttccttgcactcggcggccagaatggtggcgtcggccggaatctcgaagccagcagccttggcgatgaactgcggggacttgcccggcaccacggagttcagcacgggcttgacgccggaaccggcggtgcagccgaacatgtactgctccagcttggccttctcttcggcgttgacgaagtaggccttacggaccttgagctccttgatgagctggtcgtagacgtccttgtgggcgatgatggcctgctcggtggcgcagatcatgccgtaatcgaagtgcttggagagcaccagatcgttggcggcacggacgatgtccacatcggaatcaacataggccggggcgttgccggcacccacgccgagggcgggcttgccggaggagtaagcggccttgaccatgcccggaccgccggtggcgaggatcgtggccacgcccgggtgctgcatcagcgcgccggtggcctggatggacgggtgctcgatccactggatacagttctcgggagcaccggcctcgatggcggcgtcgcgcacgatcttggcggcctcgacggagcacttctgcgcgccggggtggaagccgaagacgatcgggcagcgtgtcttcagggcgatgagggacttgaagatggctgtggaggtcgggttggtaaccggagtgacaccggcgaccacgccgacgggctcggcgacctcatcgatgcccatcacgtcgtcttcgcggatgatgccgacggtcttctggccggccaggtagttggtgacgtgctcacaggcgaagatgttcttggtggccttgtcttccacgaggccacggccggtctcgtcgacggccatcttggcgagaacgaggtgcttgttcagagcggcgatggaggccttggcgacgatacgatcaacttgcttctggtcgaggttctcgaattcgtcgagagccttcttggcgcgggcaaccagcgcgtcaacttcggcctcagctgcggcctgcttctcttctggggtcggattggcagcttcgactttcttctttgcttctgccacttggggtcctcctcgatcttcttggggtattatggcaaagttctgggccatcgcctcgtcacctcagttgcaccagcgggataccgcctcagtaaccgaaaatgaccggtgatgcgttgtcacattgcatatgtgacttgagtcacaatataccgaacggtccggcgcgatgcatacgcacaaaatcgacggcgtttcacgtgcgatattgaacagtttttgttaagagttgtgcgaaatatcgaacaaatcctcactttattcggcgatttggtactttttgttcactttttaccgaaaatcacatgcttgcaaacaacgcaatccgacaactttcttaaatcaagtttccaaaagtactcattttccccacatttctagaaaattggtttaaaaaagtgcccaaaatcgcctacaaatatacgattgttgcctcataatctccgcgtcgaggcacatgaaagccactttcataaagtatacttacatatatctcatcgcacaaaggggtaaatatgagggcaatgccatcgaccgcagtgaaagcgcacaaccgcagtgccatgacccagtatctgtatggccatagccatgtcaccaagcaggaactggaacgcgaactcggcctcagcctgcccaccatcacccaaaatctgcgcgccctagaagatgacggactcatccgcaaaggcgaactgcaggattccaccggcgggcgcaaggcgcaaaattatgagttcaatcccgatcatcgcactgccatcggcgtagtgatgcggtccaacgaactgcgcctgtgcgcgattaacctgtacggcaacgtcatcgaaaaacgcaacgatgccctgccttaccgcaacaccaacgtttactaccagcgtatcggcggcatcatcaacaacttcgcctccgacgtcgaaaagaagcacggcaaagtgctcggcgtctcgttcgccatccaaggcatcctctcccccgacgccaccaccatcaccttcggcaccattatgggcaacacggggcttacgctcgaaaccatcagccagtcggtccattacccgtgcatgatgatccacgattccgatgcctccgccatggtcgagctatggttcgactccacgctcaccgatgcggtgtgcgtctatctggagcgacgcccgggcggcgcggtgatcgtgggcggcaagctgtatcagggtccgaatatgtgcaatggcgccatcgaacacatgacgctggtgccgggcggccgcgaatgctactgcggccagcgcggttgcatggacacctactgctcgccggagaccttgcccgaggattacgaaagtattcccggcttcttcagcgtgcttgagcagggtgaacggcatcatcgcgagcgcatggacgaatggctggattacgtggcgcaggccatcgtcaacgcgcgatccatcatcgcgggcgacgtgattgtcggcggtgaagcagcccagcatcttgaagacagtgacatcgaggatctgaaggcgcgcgtcatcgcacgcagtccgttcggcaccgaccatttcaatctgcgcaagagctactgcgccgaagaccagaacatcatcggtgccgcattgcgattcgccgagaattatctcgacgatatctgtggtgctgcggaacgcggcaggaaatcaagggcttccaccagaagtgacaacacgtctacaatggaggtatgaaaaacccaccgttgcatcgttacgccactcgcccagggctgtacttcactgacgacggtggggctgacgtcgttgttcgttccgaaactgccgatcaggtttggctgtgtgtgctggagcccattgacgagcccggcgccttcttccaagacgccatccgcctgttcgaagacccgaacgcctcgttcatccagcagatccatgagtttccggtgtgcacgcgcattatcgaacatttgtatctgcgcgagaccctgttccgcatgaccggaccgaactacggcctgtggtacgtgcacctgcccaaagcatgggacggcatgcgttatggctaccgcgtggacggcgcatgggacccgaaacacggcgtgcgcttcaatccatacaaattcctgcttgacccgtatggcaagggcatcgacggctccatggagctcacccccgccgccttctcctatgaatgcgatgtcgtggaccacaaggtaaccggctcggcatacggtgccatgagcaccgtagactcgctcggccatgtgccggtgtccgtggccatcgacgatcgcgatatccataagcatgagggcgacccgcagcacccgcatgtgccgtggcgcaaaaccgtcatctacgagatgcatgtcaaaggcttcaccgccaacgcgccgtggctgcccaaagcgttgcgtggcacctacgccggactcgcccaccccacaacgctcgcctatctgcagggattgggcatcacctccatcgaactgctgccgattatggccaagcaggacgagctcttcctgcaagaacacggccgcaagaactactggggctactccaccctcagctacttcgcccccgaaccctcctatgccaccaaagcagcccaagagaagggcgcggccgccgtgcgccaagaagtcatagacatggtgcgcgcgctgcacgaggccggcttcgaagtcatcatggacgtggtctacaaccacacatgcgaaggcggcgtcgaaggcccgacggtctgctggcgcggcctcgacgacctggcctactatcgccatcaaaaatccaataccggtcgactcgaagacaccaccggttgcggcaatacgctggacttcaccaacacgcatgtggtcacctttgccatcgactcattacgatactgggccaagcgtatcggcatagacggtttccgtttcgaccttggcgtcacgctggcccgcctggaaggcgaattcacccatcatcacccattcctctacgccctgcgttccgatctgctgctgggcaacctgaagctcattatggagccgtgggatctgggcaacctcggctggcgcaccggccaattctccgtgccgttcgccgaatggaatgaccgcttccgcgacacggcccgcaccttctggcttgaggatgtggatggcggctccgatttcggtcgtatcagtttgcaggagatggccacgcgactctgcggctcggccgatctgttcgccaccgaacccgggcgcggcgctccggcctccatcaatttcgtgtcctgccacgacggtttcacgctgacggacctcaccagataccgctccaagcacaatgaagccaacggcgagaacaataatgatggctcgtcggtgaaccattccgccaatttcggcgtcgaaggcgtcaccgatgatccagacgtcatcacggcacgcgaacaggcggccatgaacatgatcggcatgctgctgctctcgctgggtacgccgatgatgctcgccggcgacgaattccgcaacacacaggacggcaacaacaacgcctactgccaagacaacgacatcacgtggctgaagtgggattggatgtattccaccaacaagacacgcgaaatgcgtcgcctgaaaaccgtgtctcgactggtggcgctacgtaaatcactggacctgtatcaccacgaggacttcttcacccgactgacccaactcggcctactcaagccctcaagccgcgtgcagtggttcctgcccgacggcaccacgccgatggagcgtgactggttcgatctgggcgtacgtagcttcaccatgcgattgctgtccaacagtgaggtggacgtgtgcattgtggtcaacggcaccgctgacgaccgcacattccacctgccgccagacactcactggacgcctaaatggtgctcggccgaaatcaacggccgccgagccgggcatggcattcaggtcgaggaatgcgatttgaacgatgacaccaccgtttggacgcagcatgtaccggacgccagcgagacggtacgcacgctggtcgaagaagtggccatgcagcgcacggaatcctcgactgaggatgaagcggataccatcgaattcgcgatgccagcaacggatcacgccgcaaacggcacctcgtccgcgcctcgggatgaggtatcagctgatatgcctgatgcccctgtggatgatacgccggacactcccgtcgacgacaatgtctggaccatgccggcgctgagcatcacgctgatgaaacaggtgtgagtcacactcaaaacagcacgacacaaacacaaaggctctccgcggaattccacggagagcctttgtatgctcggtacaggacaagcgaaattaacgcttggagaactgcggggcgcgacgtgccttgtgcagaccagccttcttgcgctccacgacgcgagcgtcgcgggtcaggaagccagccttcttcagggcggcgcggttggcatcacgatcgatggcgttcagagcgcgggcaacgccgaggcggatagcgccggcctggccggtggtgccgccgccgtcaacgaggacgatagcgtcgaacttgccttcgagcttgagcagaacaatcggagagttgacctcacgctgcagcagcttggaggggaagtactcctccagggtgcggccgttgatggtccacttgccgtcacccggaaccagacggacacgggcgacagcctccttgcggcgaccggtgccgtagcccggctcgatcgcggaggtgccggtgccagcgccagcgttggtctcggtggtgtagttggtgagctcctcttcggtctcgacaacctgggagtcgttggtgttttcagccatgattcttatctcctctcaggtttcacttggcctgctgcgagacctgggcgatctcgaagacctggggcttctgcggggtgtgcgggtgctcggcgccgcggaagacacgcagacggtcgagctgcaccttggccagacggttcttcggcagcatgcccttgacagcgttcttgatgatgcgctcggggttcttctcgagcagctcggcgtaggagtcacgacgcagaccaccgggacgaccggagtgcgagtagagttccttgcccatcttgttgccagtcagagcaatcttgtcggcattgatgatgatcacgtggttgccggaatcggcgtgcggagcgtaggtcggcttgttcttgccgcgcagcaggattgcagcctgggtggcgagacggccgagcaccacgtcggtggcgtcgatgacataccagtcatgagtcagatcagctggcttcggagtgaaagttttcactggattaccttttctatattgtgttccgggtctcagctgcttggcgtggcttggtcagggccgcatccaagaggcatcgaacctcattatccgtgggctccctgaaagtcctcgatggcgagtgggatagcgctttgaaggaccccttagggaaacacaacaatccactagtatatcgccgggcttgacatagggcaactggggacactccattgggtttatggcttctcttcccctatttatggtttctcttccacccacttcggctaaccgactcgcctacggtgaggcaattccctgccttctctcagctatcgcttcgttcaggcctcgtctacggacagtccactggactgtccgcttaacgactcggctcgtcagagggaggtaaagtgggtcaggaattgaagatttgggcgaagcgttggacgccgggggtgtcgaagagggtttcgagcggtaccacgttgcccttggcgtcggccagcgggatgcgccagttcgggtattcgttgttggtgcccggctggttctgcgcgcgcttctcccccaccgcgtcggtgatcgaggcggcgagcagcttgcacggcgaacccttcagtgcgcggtacagcgcgtcgatgatatccgcctcgtgatcctcacgatgttcggcgaagtcggcatcaagatagccctgctcgaccagcatgaccagcatcgcatcctgctcggcctttgcggaggcttcgaattcctcagccgggccggtcagcaagcccagacgctcacgaatcttgacgtgctcgtattccaggtaaccggcggtcggcggcaaatcgtgcgtattcacggaagccaatgcgtacggacgccactgggagggggcgcggaacacgccgtcgcactgctcgaaccattcaacggcgcaaccgagaataccgtggctcgacagggaatcggccacatggtccggcaccacgccgaggtcctcacctacgaccacgccgccggcgcgagaggcctcgatggccagaacgcccagcatgatgtctgagtcgtagtacacataagcgccatccatagccgaccggttctcgggaatccaccacaggcggaacaggccgagaatgtggtcgatgcgcactgcaccggcacgggcgaacatgccatgcaccatattgcggtaggtctcgtagccggtggcctccagattgatcgggctcagcggcggctggctccagttctggccttgctggttgaacatgtccggcggtgcaccgaccgtggctcccttggcgaagcgctcgggattccaccacacgtcagcgccggaggggtgcacgccgacggccatatcggacatgatgccgatatgcatgccggcgtccttggctgcctgctgggcggaggacagctgctcggcggcaatccattccagccagcggtagaagtccaaagtgtccgggtactgcttgcgcagattggcgatttccggggagttgcggttgaacttgcgctcccagttgctctcctcgccgttgggtgctccccacttgtcgtagcacaggcaccacgtggcatacgcctccaagtcggaaccgcagtccgccttgaattggtcgaacgcgctttggcgttcggcggtacggccggccttgaagataatccacagggcgtgcatcttgctgcgccacatggcgtcacggtcgatgagctgggaatcaccgttcagcggttcggtgtcggcatgcagtccgtcgacggcgttcttgtcgcccgcgctgagcgtggcatattcggcgatcgcctcggggcggatgtacgtgaagttgatcaggcgacggcttaccggcagatacggcgacggggtgagcggggacaccggctcggcggcatgtaccggattgatgagcacgaagtcggcaccggtcttctgcttggcgtccaccagcatggtcttcagatcctcgtaatcgcccacgccccaggagttggaggagcgaatcgagtacagctgggccatccagccccacagactgccgcccttcatcgggtcaagcagatcgacgcgatcaggtgcactgatcaaagtggcgtcttgcacacggtcggcgaccttgacgtgcagcgtatggtagccaatcggcagatcggcgggaatgaccacagccgcattcgaaatgaacgtgccatccaagtcgtaggcctgggatccatctccaggaccaacttcaacggtgccctgatatggctcgccgttctccagcgtgatgctcgccgaaggcacgtccagaatgccggtgttcaccagcacccggtcctcgctaccggcgatatgcagcacggtgggtgccaccaatcgggagtaacgctcgttcagaatgcgtcggatggcgatgagttgggcgttctcgctggaggcgtcgatgcccagcgctgccagcacctcgatcaggacgtcatcgtctatctcgtggtagtcatggctcatgcccacataactcgtgccgacaccgaccaacttggccagtcgaatcaacggacgggccagacgctcttcactctcggtaatctcactcatagccccagtctaacgccgtttgattgcgccacaccgtaagcaaaatgccgtgattccgccaaattatgtactttttaccctcacatagtgagatgtgagcgctcacaatggtggatagagggtgattgccggccaaatttgcacggcaaaacacagcaatagtgtgcttagcggcggctttccacggcgtgccgcacctcggccgaggggtcgttggccaatttggcaagcatcgcttcggacgtattggggttcagcgccacggcacggcggaccatcgaggaaagcaccgccggtgctccctcttcggattcggtgccaagtacgcccaagaaatccaatgtctccgcatccgcagtggggtcctgcgcgccctcaagccgcatcttccagctggtgcgcttgtttttcaacgccgtatcccggaccgcaggcaccgggtccttggtcaggcggccgaccagccaattcttgtcatccccgttggcggccacggcttggcgcacggacggttcggggtcttcggagagtttgaccaatacgttcgggaacggcatggtgtcggcgaggaacacgcgatcggccaccggggtgtgcgggttgccggccacagcctccaaaagtgcggtggcgcgggagaacgccgcctgatcggcacggtcaggcaacggccgacgggcgaattcggacagttcggccgggtcggtggaatgacgcagacgttcgtatgtagcggtcagcggttcgaaatccaccggagcggcggactcggctgcgtcctgcgcgccttggtcccgctgctgggcgcccgtgtcgattgcagtctcggttgcggcctcggtgggctgggtccgctggctggtggtgttctcgtcggtcatgatgcccagcttagtcatacaggcgtcacgcgagcggaaccggaatgttgaccacgtcaatcggatccggcaccaccgcggcattgaacgcttcccgcacacactcctcgaatcgcgcgcaatcatcctgcggcaccaccgcggtcaactcgacgttcaccgcatacgattcatcctcctgactgccaccgagctgcgccagaatctgctggaatcgtgccagctgcgggtattcgagacggacccggtatcgcttggcggtcatgatgcgggcggcgcgggcggctttcatcgccaatgatgcggcggatgagtacgcgcggaccagaccaccggagcccagcagaataccaccgaaatatctggtgacggcaaccacgcaatcggtggtgccggactgcttgagtacgtcgagaatcggcttgccggcggtaccggacggctcgccgtcatcgctcatgcgttcggacagtcgcccatccgcgcctccgcacacggcggcatacgccacgtgtcgggctttcggatgctgctcgcggatcgcggccacgaacgcgagcgcctcgtcgagcgtatcgacatgggcagcgtcgccgatgaattcggactttttttcgacgagcgaatcgtgggcgggatcgtcggacgtgttgagaatcgtctgcataagcgtgttccggtggtcggctgactgggtgttcgattgagcgcgaggctagacaggactatcagtgttcggagacgacgacgttatagtcctcgccggcgaagtaggcggtcaggcaggcgatcatctggcgggtgagctccttgaacgcgccgtcggtacgccagccgacgtgcggggtcaggacgatgccgggcacatggcagatggcgtcgtcggcggtcagcggctcgtggtcgaacacgtcgagtgcggcgggaacatcgcccttttgcagtcgggcaagcagcgcaccggattcgatgacttcggagcgggcggtgttgatgaacagggtgccgggcttcacatgcgcaaggttctcggcggtgacgatgccgcgcgtggcgttgttgagcggcagatggacggagatgacgtcgctggtttcgatgagctcgttgagatcgtcgaccggagtggcgccggagcgttcgaaatgctcgggcggcacatgcgaattccatgcggcgacctccatgccgaaggcgcgggcgatgccggccacggtggcgccgatgccgcccagtccgatgatgcccatgcgacggccggcgagttgcagtccatcgccgccggcccacgcccagttgccggccttgacatccttatcgagttggccaacgcggcggatgagctcgaacaggagggcgaaggtgtgctcggccacggcgtgatcgccataatgttcggcgttgcagacgcggatcttcagctcgcgcgccttatcgagattgatgtagctggcgacgccggtaccgcagaacacgatgcacttgacgtgcccctgctcgctgatggtgcgcagcagatcatccgaaatgtggtagccgcccaccagcagggcgtcggcatccttcagacgctcggctatggtcgcctcgtcggacgtgaattcctcgaacatacgcacgcgggcaacgtcgtggagcgcggggaactgggccttgatgggctcgatcatcgcgtcgagcacggacggcatcacgacgaggggcagatcggtgcgttcgctttgggtttcgtaaatctcggtcatgggctccacattaggaggccgacgggaaaagcgtcaccttgcggcttcccctccttgagaccaagccgagcaactattgctttgccgcctgctcctgcgtgatgttccattccttgacgacgttctggtccgcgcccatcgaatagatgacatcccagatgcgttggcgtatctgagcgtcgtaggcttcgtcccaacatgtgcctatgggatggtcgctggatatcgggcaccattggtagttgccttgatgcacgttggcggtgggcacccagtcgatgcggttgacgcgccacgaccccttgacgcccttcttgccggcgaactggatgcgtgcggtcacaccctggttgttgaccaaggtttccggcgtgttcgccgactcggtgacggtgttgcccagaccgtagacaatccacgtgccgttatagttctcgatgggctgcgcacaatggcagccggcaccgtagataacgtcgaaggcaccagtgtcggcaagctcatgggcttccgaaatctgccaggaatcggcgtaatcaaggtattcctgcaccgagtgcatggcgatggccaccacatcggcaccttgctcgcgggccttgttggccttgtctaccgcgcgctggatgtcgctgccgtgattcgggtcgccgtcttcgcgcagacgatccacctgccagtcctcgtcggcggtcatgccgttgagggagaccgtgccagtgaccagacctagcttgccgccgccggtcggggaatcgatgactaacggtttggtggagtcggcttcggttttgtacgagccggtctgggcgatgccatcggcctcaagcgtgtcccacagacgggcgatgccatccgccccctgatcccaggaatggttggtggcgtgtgtgcaggcgttgtatcccacgttgcgggcggcatccgccacttccggcggaatgttgaagatcgggtacgcggcatatgggccgccgcgctgggcgatcggggtttcgaattcgcacacggcgatgtccgaagcctgaatgtactgcttcatcggcgcgaacagcgggtcgaagttgaaggcggtgccatccgtggcgttggggttcgggccttggaaatggctccacaatccctcatggaacaacaaatcgccgttgaccagcatggcgatgcagtccgtatccgggcaatccggtgaattgccgtgatgttcggtcaccggtttgggcgtgttcttcgctttattcaacgcgacgtccgacactccggcgcgtgcggggccattgccgtccgtgcgatgggttgcgaaccatgcgccgatgcccagcgtaacggcgagcgcgatcacgaacacgataatcagcgccgcacggttggttcgtgtcgagttggagcgatgttgcccctgcccagcgatatggctcatctttgcccacccttcggaactcttcttctctctctaggataccgcccatctcagtcaaacactgcggggaggaaggcgatgggcaagcgattggacaagcgacataaaccggttaatcttcaatcaccattcacgaacaccacgcaaaagtctcacttagtggacattcttctttcgtttgttagcctttccccgaggtgccgcactcgttcacccgctaaaatggcggtttggaggcggacggacaatggcgtacctccgactccgcttaccacaagcggagaccgaccgtcctcggttatttcggttatttctagcgacacattcccaggaaagtttcgcaaaacagacccccaagcaacccactagaaacacattcccaggaatgcgtcgcaaaacagatatccggacaacccaccagaaccgtattcccggggttcgaatccctctgactccgcgaagtgcgaacag

SEQ ID NO: 3475 - DNA, 3431 bp, Unknown
  R85_18m  MAG No. k141_2837
tcgggtcgatcggcagacgatcctcgctcggggtgatcgggcgatcgtaatccggctcgccggaagcgttcaccgggtaccacagcgggaacggtacgccgaagaagcgctggcgggaaatcagccagtcgccgttcaggccgtgcacccagttctcgtagcgcacgcgcatgaagtcggggtggaagttcagttccttgccgcgctcgatgagctcggcgttcagtttctcgtcggtaccgccgttcttcaggtaccactggcgggaggtgacgatctcgagcggcttgtcgcccttctcgtagaagttcgtcatacgcttggtcggcgtcggctcaccgtccaggtcgccggactcacgcagtttgtctacgatgaccttacgggcggagaacgtggtcttgccagcggtctcggcaaagacctcacggccggccgggtcggtgatccaatccggggtgtccatcacgatacggccgttgcgctgaatgatcgggcgggtgggcagcttcagatcgcgccaccactcaacgtcggtcacatcaccgaacgtacagcacatggcgatgccggcacccttgtccatttcggcggccgggtgagccagaatcggcaccttgaccttgaacagcggggagtagacttcctggccgaagtactgcttgtaacgttcgtcattcgggttggcgatcagcgaggtgcaagcggccagcagctcggggcgggtggtctcgatgtagattggggtgccgtcctcaaagcggaaagccaccttgtggtagaagcccgggtattcgcgggactcaagctcggcctgagccactgcggtctggaaggtcacgtcccacaggccgggggcgtcctgctggtaggcctcgccgcgggcaaggttgcgcaggaaggccttctgagccacgcgccgcgggtgctggccgatggtgtggtaggtctgcgaccagtcgatggacaggcccagcttgcgccacagggcctcgaacagcttctcatcctgagcagtcagacgctcgcacagctcgatgaagttcttgcgggaaatcggcacctgatccttggcgtcgatcttcttgccatcggtgccctcgaacggcggcttgaagtccgggtcgtaggggagggacacgtccacgcgcacgccgtagtagttctgcacgcggcgctcggtgggcaggccgttgtcgtcccagcccatcgggtagaacacgtcatagccgcgcatgcgcttgtagcgcgcaatcacgtcggtgtgcgtgtaggagaacacgtgacccacgtgcagcgaaccggaaacggtgggcggcggggtgtcgatggagtagacggccttacggtcgcgggtgttgcggaatttgtaggtgccgtcttcgtcccagacggcgcgccacttgtcctcaagcccgtccacgccgaccttgtcgggcagcggggtgagttgcgcgttgatgatggaattgccttcagtcataaggccaaagtttatgcatgttgcatgacaaggcgttgttgggtttgctctatcctgcttcgttcgtctgctcccctcagtccgcgtaggtgactaaggggagctttcaggtgggagtgcttacttcaccgtgaggtcggccaacggcatgcgctggtcgatgagcgctgtcggatatccggaaagcttggtggaggccacggtaaagcatttgcgcgtgtacagccagttgcttgacgcatcttcgctgagcttgcgcgcatagaccttcatcttctcggcatagtcggcgtcgttggtggcggcacgggcatcggcataggcctgctgcacctcggcatggttgtaatggaagatggaatccgggtcggcaaacgtgccggcgtcatcggtgccattcatgctcatcagggtcagttcccaagtgccgtcctgaatacgcttggcatattcttcgtcagatacgacttccagattcaccgaagggcgcggcagctgttcgatttgctgcttgatggtctcggccatcggctgccactgcgcggtgaccaccagattcaccgtggtcagataggtgccgaaataggaggtcatcgtttgcgtcttggacatatcgtgcgggaacaggccggtcaaatcctcatatccaggttccaacgggctgatcggacctcccagcgcaccgctggagtctggctgcgaggcggcgatgccggccgaatcgatgaggtatcggaacgtggtgcgcacattctgatcggacataatcgaatcggaattgttgttgaaggccagcagcaccttatctgtggtggcgccttcggtgacggtcagaccgtccttgccgttcatctgcgatgccacggtggcggtggcgggtgcggccatatcgatagtgcccttggatacggcatcggccagcgacgtctcatcggaatattgggtgaatgtcacggtaccgacgtgcgccttggtgccgtggtagcccccgttgtaatcgagcgtcaacgactgcccgggcgtgaactttccaacggtgaacgggccggaacctactgcctgcttggcatagtcggcatcgcccgcttcggaatcgtacacaatgcccagtctgccggacaaggcacgtagcaacgtggggttggtctgcgcaagagtaatgaccacggtggagtcattcggattggtgaccgacttcagatcgcccagatcatccacgccggcatatttctgggttatcgcctgttgcagggaccacaccacatccccggcatccaacgtgtgcccattggagaaggtgagtccggaggcgatggtcagggtataggtcagcccgtcatcggatgttttccaatccgtggccacgcccggcttgagctggttgttctgatcgacggtcagcagtgtttcgtacacgttgtctagcagcagacgttccgccgaggccgatgccgtggcacggatatccagcgattgcggcatatcggtaataccgacggacaccttggtatccggtccggaatccagtagacccggaatggaatgactgcgcgtgattaccgaccagcagacccataccagtgcgctaagcactgcggcgactactaggaagaccacccatctgaaccgctcgttgcgactcttatgcatgcccatcagtctaacgagggtgcgctaccgaacgtcactttgtactgatcccagcgctggggcaggtggcggccagcgggcagttggcgcagtccggcgtgcgggcatgacaggtggatcggccgaacaggataagccgatggctgagatccgtccactcttcaggtgggaagcatgcggtaatctcccgctcgattttcacgggatccagatgagtggagcgccaatccgatcgccagcgcagacgaccggtcacgcgcatcacatgagtgtccacgggaaagccgggaatgccgaa

SEQ ID NO: 3476 - DNA, 12478 bp, Unknown
  R85_18m  MAG No. k141_2885
attccacgggtcgtctcctggctgcggagccgcctgagcatggttcccctgcggctgattccacggatcatcgtgaggagactgctgatatggctggttccacgggtcggcttcggccggttgcgacgccggtgagaccgcggcctgagactgcgtctgattccatggatcgtcgctcgcgccggcaactgccgtagcggaagatgcggtggctggctgcccagtggactgtccagtgggtccagcggacgcaacggacgcagtgggtgcaacaggagcagccggagcggcccacggatcaacaccgtcactgatgtccggaaccgcaacatgcttcttgtgatgctcttcgggcgcaggcgcagcagcgggctcgttaggtgcgaacccgtctgcagattgcggtgaagcgttgcttacggccggcttggcccaagggtcatcgtcactccagctcttcgccgccgtggatgcactggattggccggctcgatggctgtcgtccgtatcctcggcttggcctgttgcagtcggcttcggagctttcggctcgctccccatatgaatgcccagacccgcgcccaaactcgacgcggccaatccggccttggccatggcaatctgctgcttgaccttggccaattgctccgggctcatacgtttgacggattcgactcgctcgccattcgccgcgaccgcagaaggtgcaataaccgcattggcaccgaactcgttgcgcacggcatccaacaccacggacgccgccttcttaccgctgttgtccacggccaaggcgaaagcgtgctggctcagcgacttgtcgaacgtcatcgacaggcaaggcagactcttacggttgggaccgaattttacggtcggcaccttgtctcgtgacacatattcacgaatggtttccggcaaagcggcgacggctgcatcccacttctcgtcgatggaccgattatccgatgccgcaggcgaggtcaccggttgggccgggacggccggcgacgtggcgggagcaccccaggcattggcagcagcagttgctgcggcaggttgcgcagacggagagcccgcgggccggtcgctgactgggctgctgacagggccattgtctcccacagcggattcatgggaagcggtgctctgaggcgcggctgcttgctggttgcgtgcagcaccggagaatccaccatgtgaggctccggcaaacccgcctcgcgatgcgccggcaaaaccactggcacccgtaccggaagcggctgacgtagtcgaagtcgaagaagcagccgcaggcggcatgccagaagaagctggcgcgggagcggctgttgcaaagcctgattcactgccggccaacaatcgtgcggccagcagttccaagcgcatacgcggagaaatggctccggtcatggcacccaacgtagtgttgatgatgtctgccatggcggtcagtgcgcccagtcccagcgccttggcttggcggtgcagatcgtccatatcctcggcctcagccgtgtcggacagcacggattccgcacggtccccggccaacgtaagcaccagcagatcacgcacacgagccagcaggtcttcgacgaatcgtctcggatcgaatccgccgaccacgactttctggataacgccgtacagggcttcgccgttgtgattgattaccgcatccactgcctcaccgatcagcgcctccggcgtgaagccgagcagggctacagcggcatcatgggtgataacgccttcgaccgaaccaaccatcagctggtcaagcacagacagggtatctcgcatggagccgccaccggcgcgcatcgccagtttcagcacaccgggctcgggcttgatgccttccttgtcgcagatcgtctccaggtagggacccatgacttcctgcggcaccagacggaacggatagtggtgggtgcgcgaacggatggtgccgatcaccttgtctggttcggtggtggcgaagatgaacatcacatgttcaggcggctcttcaacgattttaagcagcgcattgaagccctgctgcgtgaccatatgggcctcatcgagaatgaaaatcttatagcggtcgcgcgcaggggcgaaaccagcgcgttctcgcaattctcgagcatcatccacaccgttgtgcgaggccgcatcgatttcgaccacgtcgatggaacccggaccgccggtggccaggtccttgcagctttcgcattcgccgcaggggtgggaagtcggccctttggcacagttgacgcaacgggccaggatacgcgcggagctggttttaccgcatcctcgcggccctgagaacagataggcatgcgtaagcttgccttcgtccaaggcgcgcatcagcgggaccgtgacttggtcctggccgatgaccccttcgaaggtgtccggacgatagcgacgatacagtgcaagtgccatagctactaacctacctttgccctcagaattaaccgataaaaagtcaagataaaccgggctcatagctgccgaatcgggaaaactctttatattccaacgacattcatctgacaacggttaccgcatttttattgttattaaccgctttctttgtattaacatagtgtcaataacggttgtagtcaggaggtgcccatgagcgatatcctcgacgagaaacgccccacccgtggcgatgcccggcgcgacgccatcgtgcaagccgcgcgcaaggtgtgtctggaaaaaggcttctccaaaatcaccgtttccgacatcgcaagcgaagtcggtatgacgcgttcgctgttctaccactacttcgaagacaaggaagccgtagccgacgcagtactcgatgacgtcatcgacgaaatcctcaccacgttgaagcagtggaaccaagcgcgcgaaacaggcaacgtgaacaaggcattagacgacatcgtgcatgtgctccgttccctaatcgccgacgagagccccttctcaaaccgtatgatccaagatggcaacgccgaactgtatatcaagttcattgaccgcgcggcggaccgtattgccgactacattgcccagaccaccgtacgtgatttcgagcagatgcatggtctgccaatcaccaacgtccatgagacattcttcacgctaatcgtggggcttatctcgctggttcgctcgcatccgaacatcagcgaccgaaccatcaaagaggtcatggcgcagacgctgcatatcgaaagctatgtcgtctgaggtctgacggccattggctctggtaccgctctcccgcactcccctcagtccgcttcgcggccagctcgtccgcaatcgcggacagcctacggctgactttctcctggttcgactatcgtcgaaccctcgcctacaaacatcccactgggctgtttgctttacggctcagcctaatgaggggagccaatataatcaggtcaggcgaactggccggttacggggtcgcgaccgtctcgggcgatggcgtcgagcacttcctgtcgggagtccacctcacgggcggctacggccggcggtaccagcacgcgtagcgcgcagtcctcggccactaccctgaatggcagatgcccgatgtattcgccgtccgccatcagcaccggtggctcgtcgccttctgcggctcgcgtgacttcgatctcgcgtatgcgcttccacccgaacacctttgaggcgagcagcttgccgttataggcgttcgagatggccaccgcacattcgccgaagttcggcacatgattcatccacaccaggtccaacagcccgtcggagaagcaggagtacggtgagacctcgatgccgccaccgatatgacgcgaattcgcaatcgtcagcaacggcgtgatgatgtctcgttcatccgtggtaccgtccgccagcgtggccttgacgtggtacccataacgcttcatatgcgtcagctccaccagcaccgccgcaaagtagcgcatggtgccggtcggcagatgcgaatgattcgcacggtcgttgatacttgcgtcaagaccacaggacagcatgcccgcatagtaccggtcaatcgggtgctcggcagacttgttctcccggtactcgtattccccgccggtggatgggttcacggcatagccaccatccaaagaggtcacgcgtcccatgtccacatcaatgtgtgatccgcgcacgatagcgccgacgataccttccactgcggtttcgatgcgattgaccggcagcttaagtccccgagcgaaatcgttgcccgagcccatggccacgatgcccagcggcttaccgccgcaacccacggcattggcaccgagtgcgatcatgccgtcgccgccgaccaccaccagatagtcgtactcgtgcgcgcgttcacgcgcctggttcagggaatcgtcgaaacttacgccggtgatgtcgatgacgtcgaagttatgggcacggccggcgtcctccagcagtcccaatactcgcgcatccaccttggcaccacggcccttatcggaagtgggattgcccaccatggccaccacgcgacggcgttctgtgcgtccactctcgctcatgctctcaccttaaccaaaggtccagaagcccgccagagcatcagtgcttacggtccattattgtgataattgtctccttccgtacaattcaccggtccggcccgagccatccgctccacggatgatgccaccggaaccatggtttccaccttgatggttaccaacacgtcttcatcccgcacggagcaggagcccagcgtgacgccattcgcttcagccatgtttgcagcaagcgcgcatggatcaccgatatccacatgccacagcgcatacgcggcgtcaaaggcgatgagatcggcgagggaacgcgctcgattctggcagatcatgaggttgcccacacttgccgccaccgcgagcgcaatgcccaccgccataaccagcatggctccggccatcgtgcccgatccctcctcataacgcattccctgcaccgcagttcctttctattgcggccgcccagccagcagccgaccagttattggcttatcgccgtagcgttgccggtgacccgcgttggagtgacatccagtgggccgggcagtaccgaacattcgaccatcacgctcgtcgattggccgttgtgggcaatgctgacgcggggatctccccctgcaacgtccgcagctatgctgcgcgcggatgattcgtcaccggtaaccacaaactcgcgtgcagccgccgtcgcggcaccttggcagtccatggaaacgatgaccacacgtcccattgccagtatcagcccggcgatggcgataacgctgggcaatacgatcgcgaattcggcggtggccgatcccgtgcataggtctggcggcagtctggcgagcctccaccggcatctcatggtcttcatggctgtcacccgactttcagagcctgtttgatgatgttggtcagcaacgtcttgatggcatccgacttcaggatggcgaccagcaccgccgcaaagcctgtagccgcaacgagtacgactgcgtattccgcagtggctgcgccttcttcgggctcagccatgagggcgcggatgcgtgcgtccatgaggcatagccgttctttcgccttggcgttcagcgtggccacacgagccttgctgtgcgcaaagatgccggcctgcccgtcgacgatgacggggataggggtattcattggcgttcctttcggtaaggaggggaagctgcgcagtggcttcgcaccttccccatgcgtatgtgagtggttggcccccgcgccgggttgacgcggggtgcataccactgtggactatcaacgcttcatgcaccaggaaaaacggggtatgtggttctagcttgccgagttatccacacctcgacgtgtcgtccaccacaaatgtggataaccaaacgcagccaagtacaataccgagcaatacaacaagattcagcctaagcgcactcagttcacgcctatattcacatcatgaaggacgcaatcgccggaatgactcctaccagcacgaatgccggcagaaaacatagccctgtaggcatcagtagctttaccgacagcttcgcggcattccgttcgatagcagcacgctcgtcacggtccagctgttcaatggcggattcgaggcgcacaccaggcatatcgccatgcgtccatgacgattccaaagccgattgcagcaggccaagatctcgttgcgtggtattcgtatttcccttggatggactatcagctggcgcaccctcatgctgaacagccatagcggcatgccacgcatcagcccagggaacccctctggtcagggagttcccgacctcgctcatgcgagcgccgcagtcgccgccgacggctttgcccaccatgtcaagcgcccggggaatcgaggagccctgacgcaaggacacctgcaacatacgcaatatgagtatggtccatgacgacccgcaatcatgcgctacggccggctcctcgcccggcaagcggctgtcatgacgagacagagccttatacagccaaccagcaatcgccgcacagcctgccgcggcgtgtacccacaccgtactcataatccgctgcctttcaacaatgcccgcatccatgccaagccggcagcataacaacatcctcccaatgtcaagcagaccacaccgcgtggcgatccaagcaagaacgccaatggtctagctcccagaagctcgcccaatgccacagtgacggccggaagcgcgctcagcagccccacagtggctttaggaacggcacatgcttgcgatcgcaagttctgcatcagcctcatctgccggtaagcagtcaataccgcttccagacatggcaccgcttggcaaccgagctcatcgctcaaaaccgctgcggcggcgaccccgcgtgcagcttcaagtacctgcgctggtgattcgtcgggcagacgccgctgttcgaacaccgttatgagccgttccacagtaatgcgatgagtggcgaagcgtctgctggattgttcctcgaatgcttcaaccaatgtgccgccacctcgcaatcgcgcgatggcggacgtaatcacctgcgcaacgcccacgcgaggtgagtcggcatatcgaggttcgtttatggctgcggaatcgaccgcgcgcccgcggtaagccagccggtacagcctcccggacttgttccccggccatatcagcacggcgagcgccaccagaacagcacaccacatcatcacccaccaccactcggcctgggaacgatgccccatcgttcaatgaagtgcccccattcggcggcataccgaggaggatggcagccattccataccgccagcggtgttcctgccagttcaccatgtgctacgcgcagttcgccgatctgcgtgatacgccgctgtccgttcactcgctccaaatgcaccaccgcgtcgaaagcgcctgccgccagcatggtcaacgcctgtggactgactccggcgagtaatccaagcgaaatcagcctggacggtactcggttcacgccgtccgcatgcacggtggtcatgccaccgtgatgaccagaattgaacgcgcgcaataggtcgacgatttccgcgccacggcattcgcccagcaccacgcggtcggggcgcattcgcaacgtcgctttgaccaagtccgccaggcttatggctccgacgccctccacattcgcctcgcgtgttaccaacgagacatgatcgtcgcgtcccagttcccccagttcgcgaacttcctctacggtgacgatgcgctcgttcacgtcgcattgcgccagcagcgccttgagcaaggtggtcttgcccacgcctgttccgccggtaatcagcactgtggcatgtttgcgcaccaatcccacgaacgtcggcagccaagcagccgggaatacgcctaatttgctcaggtgctgtagcgatgccatggttcggtcagggaatcgtatggaaatcgcggcaccttgtggcaccaatggggcaatcaccgcatgcacgcggatgccatccggactggcggcatccgctatcgggcaggcatcatccagtctgcgcccgagctgcgcgcacagttggacggcgtattctcgaactacttgcggcgagcggaacggcacatgcaatactgtttcgcgcatgccattgccgcggtccgcccaaacgcggccatcacaggtcaccgccaaatcggtaacctgcgggtcagatgccacgtcatccagcagaccgaagaatatggttctgagcgctgtgccagcctcattggctcgcgtgctgacggcagccatagcatcactggtccttgtgagaagctcccgaaaccgggcgaatggcctgttctacgagatcggcaagcaagttcatggctttgcgactgcctttggtcaccgatctgatgccgaggccttccagtacgtctccgcacagattgacacttggcttgatgggccccaataccgtggcagtcaaatagtcctgcgcctcgccaatacccacgtggcctctcccacgtggagcgccacgtggttccacacctacgatatgtggcgcttcacagccccatgaatccaatctggaccggtgcgacttggctctggccagccccattaccgacaattccgcggcaatcacctgcaggccactgcgcagatcgggtacggtctcaatgagtccaccctgaccggcatctacgatgacaacgtcgttcgtttccgccaaagcccgaatggccgcttgaacttcccaccagtcaggctggcgcgcgctccaagggtcatagggaagtactcgcacaccctcccacatcatcagctcatggttcatcgcctcaccctcgatacggccgaggggcgcgtcgacttggctgaaccgcaagcccggctctcgttctacaccaagcagcaggtcaaggcatccggccacgaaatcagcgtctatgagaacgcagctgtgttcacgtctcgccaatgtccatgcaagcatggaagccatgacactcaaccccacgcctccatgacctgacgtcatcgttacaatgttatggaagctggtgtctgtagttagggcgagtgccggagcctcgcccgatctctgccgttcgcatgaggccaacggcctgggcggcggagtgtagtagcgatacgctggaattggcgcatcgtccgtgggcagcggaatgcccggaggtgctaccgctggcgaggtgatcctacgcgccacgcggggtgtggtgttgctattcataagccgattgaaacgtgtccgagttcaatgctcaacacgaatcgaccattgtggttctagcttgctgagttatccacaccccggcatgtcgtccacgacaaatgtggataaccacgctgctgtttcacgcccatctcatgcagaaaaggccctgacctcacatgcacagtcagggccttcattttcacgacgattccttatgcggtaatctacatttcttgcttacttatcgaggttcttaatgccgtcttccatagcatccaactgagcatcggtcaccttggccggcttcttcttgccgaacttggccttgagcagaccgatgatggtcggggcgagcgagaccagcagaatcagcacgatcaccagctcgaagtggtcctgtactgccggaatgttaccgaagaagtagcccagcagcgtgaacaacgtggaccagcacaggccgccgagcactgagaacggcgtgaaacggctccaacgcataccggaaataccggagatgaacggcatgaacgtacgaatgaacgggaagaaacggcccaggaacacggccagcgggccccacttctcaatcatgtgctcggttttggccaaacgctccggggtcaaggccttcaccttgccggactggataatgcggcggccgaagaagtggccaatgaagtaattgcactggtcaccgataatcggggcgcaccagaccaccggcagcagccagaacagcggcagcgcagccttgccggtcgcggcatcgggagcggcgaacacaccggcggcgaacagcagggagtcgcccggcaggaatgggaagaacaccacacccgtttcgataaatacgatgaggaagatgaagccgagggtcggcgccacgcccatggcaatccaaccggcaatcgcggcacgcggatccttcagcagttcgaggatgaaattaacgaagcccatgtgattcctatgagtcctatacgtctatatgtgtgaacaatctgtccaatgaaccagacattcgtctgaaaaccgtcaaccactctaccagtcgccccgatacaagagggggccaccggaacctcatagcagccattactgccatcttctttacaaatatggcgtgcttcgctggtatatcgtcaacacattccaccgctcatgaggagaactgcatgcgcggtgatgtaatcaattactcaccaagacgctggcgcacgaaaccgtccagcgcggccgcatcgataccgtcatacgattcgatggacgcgaactggcccaggccggaagtatccgtgcgaatccagccagtctgcgcgatcagagtcgcgcccgatgccgcaccggcctgaagtccaaccgaggaatcctcgagcaccacgcacttggccatgtcttcacgggcgatgccaagcttgtcggctgcggccagatagggcgcagggttcggcttgtgttcgtacggatcgtcgccacagacgtagccggcgaacagtccctcggactgcttcatgatgttctccgccatacggcgcggcgacgtggtgaccagcatggacggaatgccggcctccttgagcgagtgcagcacgtccaatacgccgggaatccacggcagacgttcgacctccgccttgaacacataatccttgagctgtttgtcgatttcgggaacgctcaatgtgcagccatgcgcaatcatgacctctgccacgtgtggcaccggagtgccggagcactcccaaccgaggtcctcgttccactcgccgccattgttgtgcgcgatctcgatttcaccgtcatgccaaagcggctccgaatcgataagcgttccgtccaaatcccaaaacacggccttgagcagcatggttacctccgtacgtcgcagtgaatcctcaactattcgtattcgatatacctatctcaccaactccgcacgacagccgaacagcaaatcaccaaccccacaggaccatggatttggaatcggcgggggtggagtcggattcgcgcgtggtgtcggcagcggtatcgcggccgggcagttcgcgggtttcgcggcggatggcgttgcgccagaggcgggcgcggttggagcgttgtacctccacgatattgccgtcacggcctgcggcgaaaacgctctcctggtcgccggtttgcatgcgtttgacttcgcggcgcagttggcgattctcttcttcgagggccaaaatgcgtgcgatgccggaaagattgatgccctcatcctgacttaggcgctgagctcgagtcaggcgggcgatgtcgcgcaggcagtagcggcgtgcgccgccatcggtgcgctgcggacggaccagacccagccggtcgtactggcggagggtctgggggtggatgttgcccagttcggctgcctggccgacggtgaagatgggcagttcgatgtcgaagccgacgtcatcggctccgtcgagatcggccctgcccatcaccagcgcggttgcgcacatcgcgtacaactgcttcatttggttggctaaccgcgccattgttcacctcctgattacaggctgagatagtcgccggctttttcgtcgaattctttggcggcgtgcttgacggccagacccggcttggcggggaccatgatctgcacgcggccgatcaggtcgcccggctggttgccgcgctggacgccaagtcccgcgagcttgacctcggcaccggagctggagcctgccggcaccttgaaggtgacgggattgccgtcgatatccttggcctcgaccttgccaccggccacggcctggcccacagttacgggcaggtccatgacgatgtcgtggccgcgcatcgagaacgcggcatcgggcttgacggtgacgtgcaggtacaaatcgccggccttgccgccgttgatgcccggcttgcccttgccggcaagcttgattttctggccgtccttgacgcccgcaggcacgtgggccttgaacttcttgccgtccacggacagggacacggtagcgcccttgaccgcctgacgcagggtcaggctgatcttggagttgcggtcctcgccgttttcggggcgcggggcctcctcatagccatagccgccggcattgccgtacggcgattggccgtagccgccatacgactggccgccctgacctgcagcaccgccgaacatcgagaagatgtcgttgatgttgttggggccgcc

SEQ ID NO: 3477 - DNA, 15916 bp, Unknown
  R85_18m  MAG No. k141_2958
cgaacgcggagatctggttacccttgcgggcggtcttcggcgaattcatgaaatgcagaccgaccacaaacaggacggcagagaacaggtagacgaaccatgcgacgatgtcgatggcgccaacggttgcggaggtcattacttcgactcccccttcgtctcgttcttgctggacttgaacatctcaagcatgcggtcggtgaccacgtagccaccaacgacgttcatggtgcccagcacggcggccaggaagatgaacacgtaggccagtgggctattggcttcggctgccacgatcacaacgccgacgatgacgatgccgtggatggagttcgcgccggacataagcggcgtgtgcagggtggcgggcaccttgccgatgacctcgataccgatgagcagcgcgaggacgaacagggtaatggaaacgacgagagtaggcatggtattccttcttccttacttctcggacttctcggcatcggcagcagctgccggggcggcggcgcggccggcaaccaccagcgcgtcgtcaagttcttcggtgagatcctggccgagcttgccgtcacgcacgaagtgcacgaggatgtcggccacattgcgcgaaagcaggttggatgcggtggtggcgacgccggaggccaggtagggagcgccaatcagcttgacaccgccctcggtgacctgctcgccgacggcggaaccctcgacgttgccgccgaggtcggatgctgcgcagtccacgatcacggcaccacgcttgagacccttgacgccggctgcggtgagcagcaccgggggcttacggcccgggaccttggcggtggtgatgatgatgtcaaagccggcggccttctcatcgacggcagcctgctgctgagcctgctcttcggcgctcaacgcgcgggcataaccgccctcgccctggcccttggagaagtcaagtcccagatcaaggaacttcgcgccgagggactcgacctcgccctgggaggcgggacgcacgtcgtacgcggtgacgaccgcgcctagacgcttcagcgtaccaatggcctgcaggccggcgatgccggcaccgagcaccagcgccttggccgggcgaatcgtgccggcggcggtggtcatcatcggcaggaaggagccgtaagcatcggcggcggtgatggctgccttgtagcccatcacggagttctgagaggtcatctcatccatggactgggcgctggaaagcttacggggtagcttttcgatggcgatgcccaccagaccggccttctcgagcgcggccacgtaatcggcatcggtgaaggaaccgagcatgccaatgacccactggccggccttgagcttggctacggtctcggcggacggtcggtccacaaaaccgagcgcgtcggcttcggcgagcacctcgtcgcggctggtcaccttcgcaccggccttttcgtaatcctcatcggtgtattcggcggcaatgccggcaccggcctcaataatcgaggagactccgctcctcttcagccgggtgacgatatccggcgtcagcgcgacgcgggattccgtttcggacgtttcgttcaaaacgccgaacaccacggtggcttctgggttttgcgccatgagagccctttcttgttctacttcaaaatggacatggttatccgcatagtaagtgtagtcggaaagcaaagaccatgacttgagattccgccaatcgaaacagaaacgaacccgaaattagtgagaaatacgaatgtgtccatgtgcattgcggatgaattgctcggaagtcgtccaacaatcacccggcatcgatcagcaaccaaccgctcagtaattatcgacaatcaccgtttcgtagctcacggttactcaacaatatcgggacctgtgcaatattttgccacgcactcccctaacccgccagaatcctacggttgcgtaaggtgacgagttcggtttgggcgattacaatttgaactttgagaagcgttcgcctcatggctggacgacactgaaaggtttacaggagcaagacttgtcggttatcaattccttcacgcagcacactatcaatctcacccgtaaggcgctcaggttgggatccgacttcgtccacccggtccacgacgacaccccggacgagcccgattacctgtctaacgccgacgtgccggtcgagaccaatatcgctttgcctcacagcgacgattgggacgacggccacctgaccgtcaccgacatcgaccccatcaccggcctgctcaccacctccaccgaaggcaatccgccgctggacgaaggtacgtccatctacgacctgtatgcggaccgcgccgaacgtatgggcgatgagccgctgtacacctacaagtccggcaacgattgggtgaccgtcaccgccaacgagttcctggctgacgtgcgtgccgtggccaagggcctgattcattacggcctgaagaagggcgatgccgtggcattcatgtgccgaacttcctacgactgggacctgaccgacgcggcgatcatggcgtgcggcggcgtgctcgccaccatctacgacaccgattccgccgagcagattcgcaatatcgtcaacaactccgatgcccgactgctgatcgtgcaggacacggacatgcgtaagaaggcggatgggtccgtcgaagagtgcccgtccctggagcacatcatcaccatcgagaccggtggcttggacgaaatcaaggcctacggcaccacggtctcggacgaggagctggacaagcgcatcgattcggtcaagaagaccgacctgtgctccatcgtgtacacctccggttccacggccgcgccgaaaggcgtggaaatgacccatgagcactactgccagaccgcgctgaatctgccgacctacatgcccgatctactgcacgacaagaggaacaccatcctgttgttcctgccgcaggcccattccttcgcccgcgccatcaactacatcgtcgtctcctcgaacgtccgcatctacatcgccaccggcatcaagacgctgatcagcgatctgcaggtggccaagcccactctcatgatcgtggtgccgcgcgtgctggagaaggtgtacaacgccgcgtcccagaaggccggacacggtccaaagggcgtggtgttcgcctccgccgtggtggccgcgcagaactatatgaaggaagtctccgccaatggcaaggcaggtgcactgacccgcactcgccgcgctgccttcgatccgattgtctactcttcgctgcgcgaagtgctcggcggtcgcgtcaagtggattgtggccggcggtgccccgcttgacccggaactgctggctttcttccgtggcgcgggtgtgcctgtatacgagggctatggtctaaccgagaccaccgcaccgtgcgcgttcaacccgctgggtacgccgttccacgctggttccgtgggcatcgcattccccggattctccctgcgcatcgccgaggacggcgaaattcaggtcaagggtcgtgccgtgttcccgcgctatcacaagaacgacgaggccactgagctgtcgttcaccgaagatggctggtatgccaccggcgacttgggccgtatcgacaacgacgggttcctgtacatcaccgggcgcaagaaggacctgatcatcactgccggcggcaagaacgtctcccccggcccgatcgaggaggtcatccagcgttgcgagatcgtctcccaggcgttggtgctgggcgacaaacgcccgtttatctccgccctggtgacgttggacgagaagtcgttgcgcccgtggctcgccgccaaggggcttgacgagaacatgtccctcgaggacgcggcaaggaacgccgccgtgcgcgccgaagtgcagaagtgggtcgatcaggccaacgagggcgtctcccgcgccgagtccgtgcgcaagttcatcatcctgcctgaagagttcactcaggagaacggcctcatgaccgcctccatgaaggtgattcgccccaaggtcatcaagcgctactccaccctcctcaacacccagatgtacaccaagcggaagtaaaccgtatagcaaaagctccctctgacgagggagcttttgctatacgccctagaagcctaggcgttctagttgcttggggtcggactgccagcctttggctaccttgacgtggaggtcgagcttggctttttggccgacgatgcggttgaccggggtgcgtagcttcttcttgacgtaggtgaggttcgaggcgcccttgccgatgatgatcggcttctgtgagtcacgctccacgtaaatggacacgttgacctgcgccttgccgtcatagccctgaccggtctcgttgtcttccggatagtcgatggaatcgaccaccacggccagcgaatgcggcagctcgtcgtccagggtctcaaggaacgcaccgcgcacgagttcggcgatggtgtcttccggacgctcctcgctgatctgatcgtccgggtacatctgcgggccctcgggcgtgtgctcaatgagcacgttcttcacttcagccagattgtcgtgcttcagggcgctcaccggcacgatgtccgagaaatcggcgaaatcgttgatttcgatgagcttgttgatgagttgctgacggccaagctcgtcgatcttggtgacgatggcaatcagcgggatgcgccacttgaacgtaccgtcctcacgcttggtggcgaagtcggtacgcagtcgggaaagaatacgcttgtcgccggggccgatttcctggtcggcgggcagcaggaaggccaccacgtccacatcggccaaggattcgtcgaccacgtcgttcagacgctggccaagcaacgtacgcgggcggtggataccgggcgtgtccacgagcacgagctgcgcgtggtcggcggtcaggatgccgcgaatcgccttacgggtggtttccgggcgagaggatgcgatggcgatctgcttgccgatcaacgcgttgatcaacgtggatttgccgacgttcgggcggcccaccacggccacgaatccggagcgatacggcacgtcctgcttggtcacattctccgtttcaccggtcgcgtcgacttcggcaacgccggcaacatcggaagcatcggtgacgtcaatgtcatcgacgtcgttcgtgctgttgttctggtcggtcatatcactccttgctggcggtatcatcgccttcgacgggctcgccgtcagtttcctcatgggtcctgctattttcctcgccgccctcgacgtgcgccggttcgacgacgatggtggacaccttcttgcggcgtccggcggagtccacggcggtcagtcgcagaccgcgcgtcacggccgaagcaccgacaatcggcacgcggcccagaatcttggtcagcaggccgtacacggtatcgacatcgtcctcatcaatgtcgatctcgaagatctcctccagatcggcaatcggcgtacgggcgggcatcttccacttgttgtcgccgattttctccggctcggtacgctgggtgcggtcgtgctcgtcttccagctcgccgacgatctgttcgatggcatcctcgatagtcaccatgccggcgatgccgccatactcatcgaccaccacggccacatgttggcgggaacgctgcatctcatggaacaggtcgtccaccggcttggattcgggaacaagcagcggctgccggacgatggattcgaccgtgcgctccatggccgccgggttgaaggcggtggcgcgcacggcgtccttcaaataggccacgccgatcaggtcatccacatcctcaccgatcaccggcacgcgggagaaaccggagcgggagaacagtttcagcgcggaagacagtgtggagtcgcgctccatgcagatcatatcggtgcgcggcaccatgatctcgcgagtcaacgtatcagacaaggtgagcacgttgcgcaacatttcggagacttccggatcgaagtcgttggactccaccagtcggtcgatggcggccttgccctgctcgagctgaatcttctcaagctcctcgtcatcggacagatcggagtccttggagcggcggcccggccccttggaaccggacttgtcgccaccgatgcgtgcgaacggcgtgagcttggtggccaacgacacgatgcgcgagttggaaatcatgatgtcgaccggcttggtcatgccggcggtgcgcgggcggaccagtacggagaccacggctacgataatcgcgaacaggaatccggcgagcagttcaacccacagttccgcaccccacagggatgcgatggaagacaccagtacgccgtcgagcacattgcaggcgatgcggaagaacgcacagctgccggcggtggcgtaacggtcggcgatgagccgttgcacgcgatgaatcttgtcgatcttcttcatcttgaggaactggcttgcttcggagtcggtctgcacctcgaggatgagattgttgaggctggctcgcgttacgcgggccacggcgccttcagcggcggccatggtcagcgaaagccagacgaacatggccgccacaagtacgagaatgacggtgacggcgatcagcgtggtactggaatactccataatgttttttcggtgtccttgaatgtccttgaacggtatagaataatccaaatttggtgtgattgatttggaagtttatttggaatcgaggtcgcggccagcaccgtgcgcggcgtcgtacagggccagcgcgtcgggtgtgccggcgggcagcgtggcctgcacgttggcatcgtggcgcagggcgaagaaggtgagcagcagctgtcgctgcaggccgaacatctggcgctcctgctcgggggtcacgtggtcgtagccgagcaggtgcaggatgccgtggatggtgagcaatagcatctcctgcatggtgctgtgcccggctgcggcagcctgttgggcagcgacccacgggcagatgacgatgtcgccgagcactccttccatcacggttttgccgtcgcctgggcgcagctcgtccatcgggaagctcatcacgtcggtcgggccttcgaggttcatccaacgcatgtgcagttcggcgatgggatcgggatccacgaacatgatggtcaggtcggactgggtgctcacgcgcatctggtcgagtacccaaatacccaaatcggagaagaccttggggtcgatgacccactgggtttcattggtgacgtcaacgctcatcgtctgtctcactttggttggttgaatccgtttgctggcgggcatcgaagtcggtatggttgcggcggcccttgcgttcgatgtcgcggtggtcgccggcgatggcggagtgacggtcgtaggcggccacgatctggccgaccagctggtgacgtaccacgtcctcggttttgagatgcacgaatgcgatgtcgtcgatgccgcccaggatgcgttcgatggtggccagtcccgagcgcggcacggtcaggtccacctgcgagatatcgccggtgatgaccatcgtggagttgaagcccagacgggtcaggaacatcttcatctgctgttcggtggtgttctgagcctcgtcgaggatcacgaacgcgtcgttcagcgtacgaccgcgcatgtaagcgagcggcgccacttcgatggagccgtcgtccatgtaccgcttgagctggtcggcgccgagcatgtcgccaagcgcgtcgtacagcgggcgcagatacgggtcaaccttgtcgttcagcgtgccgggcagaaagccgaggctttcgccggcctccacggccgggcgcgtaaggatgatgcggcgaatctgcttgtcctggaaggcacgcacagccttggccacggccagatacgtcttgccggtgcctgcgggaccaatgccgaaggtgatggtgtgcgattcgatggcgttcacgtaggccacttgtccggcggttttcgcacggaccggcacgccggcggcaaaggtgatgacgccgggaaccgtgggcttgcggtacgtcgggtcgtgggagccggcagaacgtgcatgggcgcgttcgtttgaggtcgattgcgccagtttgtcacgcaccgggccgtgaccgggatgttcgaggcgcacgtggttcttgagcacgttctggtcgagcatgcgacgcacggtgtcggcgtccataggcgcggtgtaggcggcttggatgatggtgttgaccaaatcctcggcctgtgcggcctgggcttcggtctgcttggagcgggagacgatcgccacgcggttgccgcgcacgataatcgtcaggtccggaaaggcgcgctccacctcgcgaatgacctcgtcaaccgggccgagcacggcgacggggtcaagttggggcgggatggtgatggtacgtgtagtcgttgccacgaagcggatattcccctactactcgtcgagcttttcgccagtcatcacgtgcgcgtgcacgtggaagacggtctggccggcgtcgagaccggtgttgaacaccagtcggtaggcgccgtgaaattccttgtcggcgatgttctgcgcgatggagacgatgtgggccagctcggtcgggtcgtcggcggcaagttcggcgacgttggcgtagtgcttcttgggcaccacgagcacgtggaccttggccttggggttgatgtcgttgaatgcgtaggtcgtctcgtcctcgtagaccttgctgctgggaatctgccctgcgatgatcttgcagaacaggcaatcgtcggattcgctcatcatgctccttggtttgatgttgctacgcaccagcttagcgcgtgggcgttactcgtaacgtcccaacacccgagacaacagcgacaacgctacaggaccggccgtcgcggctctcagaatattgtgccccagtacgcagctcaccgctccggccttgacgaaatcagctacctcctgctcactgatgccgccctcaggcccgaccaccacactgacagtccgcggccggccgtcctggagcgtgcgttccaccaactgcgtaaccttctcctccacgccggaccacgtatcggtagcatcctgatgcagcacaatcaccacatcgccatgcacgcaggccctgcggcagatggccacgacctccttgctggacgcgcacgcctccagttgcggtttaaaagcgcgccgcgactgctcggtggcggcatccagtaccgaattccacttcttgtccgtacggccgaccttccacttggcaatggatcggtccgcctgccatggcaccacttggtcgacgccgatctgcgtagccatatcgatggcctgctcatcatggccggttttcgccaatgcctgaatcagcgccaaacgggtgagcggctcgggttcgcgccccacttccacaacttcagcaagtccggcttcaggatcggccatcactgcctggattctcaagccgttgccgtcggaaagttgcaggccgtcccccgccttgagtcgcatagcctgcacagcatggcgcttgatgtgcgcgggcagggttagcttccagccggcgtgaagttcgtcgctgttcaccgggacatcgtcgacctgcgggtcgaaaagaaaaagggcatcagtcatgacttcaaggctacacgcgacacgccgggcacacgcgcgaattgcatccctgtaatttcatgctaaactatttactcgttgtccaaacgacacctgcccgggtggcggaatggtagacgcgctagcttgaggtgctagtgcctattttatacgggcgtacgggttcaagtcccgtctcgggcacagataaaccccttgcattgcaaggggtttttcgttatctgcacacacgaaaggccaccaatgcagttcatcacgctggacaccgttgacgacccgcgcgtcgaagcgtatgtgagcctcaccgaaatgcagttgcgcaatcgcttggaaccagccaagggcgtgttcatcgccgagtcccccaaggttatcgaccgcgcgctggccgctgaccgcgaaccgctgtcactgctggtcgaggaaccttggctggagggcatgaaagacaccttcgacttcatcgacgggcgctggggcacggacattcccgtctacgtggcctcacctgagcagctcaagcgtctgaccggctaccgtctgcatcgcggcgccctatgcgcgatgcgacgctggccgctgccctccgtagccgaggtctgcaggagcgcccgccgcgtggcagtaatggaaaacatcgtggaccacaccaatgtgggcgcactgatgcgttcggcagccgcgctcgatgtggatgccgtgctggtcacgccctcctgcggtgatccgctgtaccgacgagccgctcgtgtgtcgatgggcaccgtattccagattccgtggacccgtatcaccgggttcaacgacgacggtaccgaaaacaagcattactggccgttccagggcatcgacgagttgaagtcgctgggcttcaccaccgtggccatggcattggaggatcgttcgatttcgttggacgagctgacacgccgtctgcacgcgcctgccgaagatccgacgcatatcgacaagctcgcgctgatcttcggcaccgagggcgacggcctgtcccaccatacgattgcccgcgccgatttgaccgtgaagattccgatgagccacggcgtggatagtctgaacgtggcggcatccagcgcagtggcgttctacgcgacacgctaaggaatcgcacgcgctccgaaaaggccggatccttaaacaaatctacgaaactgttcatcgcaagttcacggcacgcgggggggaaagccttgcatgttcgaatttttctgcaattattaactatgtaaaccgaatgcaaggaagcatccggcccagcagtgcggtgtcgaaagacgctcagtaacagagaggacagttacgatggccaagaatcccaagattctgtcgattgtgcttgcaggtggtgaggggacccgcctgatgccgttaacccgcgatcgcgcgaagcccgccgttcccttcggtggtgtgtatcgtctgatcgatttcccgttgagcaatctggtgaactccgggtaccgtcaggtcgtggtgctcacccagtacaagtctcactcgcttgaccgccacatctcccaggtctggcgtttctccccgctgcttggctcgtacgtctcccctgtgcccgcgcagcagcgtctcggcaagcactggtacctcggctccgccgacgccatctaccagaccatcaacatcatcgaggacgtccagccggacatcgtggtgatcgtgggcgccgatcacgtctaccgcatggacttcgagcagatggtacagcagcacatcgagtccggcgccgagttcaccgtggccggtatccgccagcccatcgaggaatcgaaccagttcggtgtaattgaggtcgatcccgatcacccgaacatgatcaggaacttccaggagaagccggccaccaccaccggtctgccggacaatccgaaccagattctggcttccatgggtaactacgttgccaacaccaaggccctgttcgaggctctggctctcgatgagaaggctgccgacaccaagcatgacatgggcggcgacatcgccccgtacttcgcttcccgcaacgaggccggcgtctacgacttcaactcgaacgagattccgggttccacggtcactgatcacgcctactggcgcgacgtcggtacgattaagcagttctacgatgcgcacatggatctgatcgcctatgtgcccgagttcaacctgtacaaccaggattggccgatttacacgatgtccggcaacctgccgccggccaagttcgtgcacgccggccgcgaccgtctgggccacgccaccgattcgatcgtctcccccggtgtgatcgtctccggcggtgaagtgcaccactccgtgctctcccccaatgtgcgtatccactcgtgggcacagatcgtcgattccgtgctgttcgacggtgtaatcatcaaccgccgcgcccgcgtgtacaaggcgattctcgacaagaacgtggtcctgaccgaaaactccactgtcggcatcgataccgagcacgatctggcccgtggcttcaccgtcacgccggacggcattacggttgtcccgaagaacaccatcgtcgatgactgattgaccagtccagacttggaaaagccccgcatcatgcggggcttttctcgtatagagctccctcatcagagggagcttactaagcgctatcagtactttggcatgttgtcgaagttgaagccaagggcggcgagctggtcgcggccttcgggcgtgatgcgctccatggtccagcgcgggtcccacgtccagtcgatgcggaactcctcgaccagaccggccagcgtggatgcgcattcgtcctcgataaggtcggtcagcgggcaggccggcgtggtcagcgtcatcgtaataatggcgcggcctagctcatcgatctcaatgccgtagaccagacccaaatcgatcacgtcgatgccaagctccggatcaatcacctgatgcagtgcctcgcgcacgtcttcggcagtggcgcggccgatatcgtcaatcgccttgatcggaatctcgctgccatcggactgttcgtcatcccggcaaccgcatttgccatggtgaccgccacacgcacaggtgtcatcgccggacgcagcagagtgctcgatcgggcgtccgttcgggaagcccttggccaaggccgggttggccatcacgcggcgagcggcctcctcgtcctgcaggacgccgttgacggcatcgaaaacggacggctgtggttcggggaccaaattatcgttggacatatttcctcagttctttgcagcgagggctttggcgatggaatccttcagcccttcccagcctagcagagcgcatttgatgcgcatagggtatttcgacacgccttggaataccacggcgtcgccgagcttttcttccaggttctcgtcgtccagaccggcaccgcgcgattccatcagcttgtggaatgtctgttccagatccatggcctcgtccacggttttgccgtccaccagatcgaccatcaccgacaggctggcctgcgaaatggagcagccgtggccgtcccacaccaatcgcttgatggtgtgcggttcgtcatcggagacttcgacatggatggtcgcctcgtcgccgcaggtcgggttgaactggtgcgattcaccgggcgtgcagtattcgtggctggcttgcacggtgacattggccgccgcgtccgcggactgttcgaccgccgcgttgggcgcaaaggattccttgccatgcggatgtttcgacgcctcgaggatgacctcttggtacatctgttcgaggtcatccccgctcataccgaattcgttcatggtgttctgttttactccactccaaagaacttacggatgcccttggccgcttcgaccaatgcttgggcatcttcgaccgaattgtagacaccggaggaggcacggttggatgcgtataggccgaagtggcggtgtaccggctgggcgcagtggtgccccacgcgaatcgcgatgccctgggcgtcgatgaactggcccacatcgtgcgggtgcacgccggccacgtcgaacgccacggtaccgatgcggtccacgttttcgcgcggtccgaggatgcgaatgccatcgatgtcgccgagcttcagcagttcggcggcgatggtcttctcatgggcctcgatgttctcgagcccgatgttcatcatccattcggcggcgacgcctgcggccaccacttgggcgaccggctgggtgccggcctcgaagcgggccggaggggccatgtattgggcctcgtggtccatgtaggcgagttcgaccatggagccgccgaagttggccggcggcagggcttcgagcagttcgcgcttaccgtacaggaaaccgacgccggtaggaccgtacatcttgtgcgcgctccaggcagcgaaatccacatcaagcgcatggaaatcgaccttgaggtgcggtacggactggcacgcgtccaagatgaagatcgaacctacttcatgcgcacgcttgatgataggggcgatgttggtgatggcacccgtggtgttgcccacgtgggtgacggccacgaccttggtgcgttcggtgatgacttcgtcgaggttgtccgtacgcacacggccgtcctcggtcaggtcgatccacttgaaggtggcaccggtacggtaggccagctcctggaatggcagcagcaccgaatgatgttccgcacgcgagacgacgatctcatcgcccggcttcagggcaaaacgcttggcggcttctcccccacgacccagcgacgcattgccgaatgcggtggcgagcaggttcagtccggccgtggcaccaccggtgacgacgatctcttcttcgccttccgctgcattcgcgccgaccagcttggcgaccttggcacgggcctcttcgaaagccatggtactacgggccgccagctcgtgggcaccgcggtgcacgccggcgttgatcgtacggtagaagttcgcctcggcgtcgatcaccgcattcggcttctgcgaggtggccgcagaatccaggtacacgagcgggtgcccgtgaatctcctgattcagaatcgggaactcgccccgaatctccttaaaatcaaccattatgttcccctacttacgtaacaattgtacgaaacgagtgggagtcggacatggcctgttcgcgaccgtaacgacttggcctgagcggcccggagcgtgtcgagaatagggcatgtcaggctcccacggtcacggactcaggccagcgcggactcggagtcggcgccttcgggcaggtactggtcgtagccgttctcttcgagttcgtcggccagctcagggccgccggtcttgacgaagtggccgtcggcgaacacgtgcacgatgtccggcttgatgtacttcaagatacgggtgtagtgcgtgaccatgaggatgccgaactggttggcttccttggcacggttcacgccttcggacacgatgcgcagggcgtccacatccaagccggagtcggtttcgtcaaggatggcgaacttcggcttcagcagttcgagctgcagcacttcggcgcgcttcttttcaccgccggagaagccttcgttcacggaacgggaggcgaacttcgggtccatcttgaggcgcttcatggctgcggacaggtccttggcccactggcgaataccgggagcctcgccgtcgatttcggtcttggcggtacgcaagaagttggtcatggacacgcccggtacttcgaccgggtattgcatggcaaggaacaggccggccttggcgcgctcgtccggagtcatcttgaggatgtccttgccgtcgaggagggcctcgccggagtcgaccacgtacttggggtggccggccaacgtgtaggcgagagtggacttgccggaaccgttggggcccatgatggcgtgggtttcgccggagtggacggtcagggtggcacccttcaggatcggcttgatgccttccttggtttcgacgtggacgtgcaggtccttgatttcgagtgttgacattgttgtgctcctaaaaaatgctgttcttacttgtcttcgaggacctgtgccatggcgtcgttttcgccacgggccagtcggcggtcaatcacggtcatcagatgttcggagatggcaggaatgccgatctcctcgacgagttcgccgaagaagccgcgcaccacgagcttgcgggcgtcggtttcggggatgccgcgggattcgaggtagaacagttcctcgtcgtcgaagcggcccaccgaagaggcgtgaccggcaccgatgatgttgccgttttcgatttcga

SEQ ID NO: 3478 - DNA, 10664 bp, Unknown
  R85_18m  MAG No. k141_3209
cggctcagctcgtcagaggggggggcttggcactattttacctccctctgatgaggaaggttgtctcggcggagccgggacggagggagggaccccgccgcgaggcggtgaagacaccgcgtcggcggagccgactccatcactccttgacggcgcctgcggcgagtccggactgccagtacttctgcaggcacaggaacgcgatcatcagggggatgatcgtgatcagggagcccgtgatcaccaggttctggatcgcctggccgcccgcggtcgaggcctggtccttccactggttcaggccgatggtcagcgggtaccagtccgcgtccttgagcatgatcaacggcaggaagtagttgttccacgtcgccacgatcgtgaacaacgccgtcgtcacgatgttcccgatactggccaacaacacgctgggggcgagcacgtcgatgtccgtgcccaggaaatcgttcaacgaacccaccaggccgtacttcgcgccatacacgaaaccccagatcaacgtcgacaccaccgccggcaccgcgtagggcaggaacgtcgagatacggaagaacctcgtgccatgcagcttcatcgaatccaacgccagggccatcaaagccgacaggcacagcatgatcggcacctgcacgcacgtgaacagggccacacgaccaacactgctccagaactggccatcacccaacaggcgcgcgtagttctcgaagccgacgaacttggtgccgccgatcatctgcttcttgaagaacgaaatataaacggcgtacacgatcggcacgatgaacacgaacacgaacaccaccgcaaaaggccacatgaatttccatccacgccaatcggccttgtgcttattcacacgagccttgcccgaatgcacgggcgcagctgcgatatcggctgaagccattcccaacccctctccttcgaaggttgaccaaaatgtttgcgttatcatcataacaccatttgtaacattgtccaatcgtgttgagtaccgtgttgaattaagggtttctcagtcactctgctacaatggtcacgaagacaacgatgttatcgttaccgtaagcgtccctaagataagcgttgtaaacgaaacaccgacattaatgagtcaagcgagggtgaaatgtcgagaccaacacaggtgtccatgcaagacatagcgaaagccgccggcgtttcgccacagacagtgtcccgcgtggcgaatggcagcgatgcggtgaaacccgaaacacgccagcgtgtcgaagctgcaatgaaacgccttgggtatcgtccgaattatgcggcccgagccctaaagcacggccgcttccaggatatcggcgtggtgatgttcaacaccaccgcgttcggcaacgcccgcatccttgattctattgtggccaacgcggccgatgacgattattcagtcaccatccagaccatgcgccacggtgcggaacgcacgctttccgccgccatcgatcgcatgcagcgtcagccggtggatggtgtcatcgtagtgctggaggaacgcatctccgatttcgtcggatacaagcctccgcgagaacttccagtcgtgctcatctgcgaatccgccgccgaccactgccccaccgttgacgccgaccagtatggctgctcgaccgctatcgtcgattacctgatgagcaaggggcacaagaccgtctaccacattgccggaccgtccacctcgcgcgccgccgaaagccgcgcccgcggctggcgagaagcgttggaacaaatgggagcacgcgtaccgagcatgtacatcggcgattggtgcgcggattcaggctatcaggccggcgtggcgttggcccacgaccccgactgcacggccatctacgccgccaacgaccaaatggcatacggcgcaatgctcgggttgcagtcagcgggcaagcgcgtgcccgaggatgtcagcatcgtgggcgtcgatgattcgctggtagatatggttccgcgcttgaacctgacgaccatgaagctgcgctttgacgacattggcgccaccgccttctccatggtccgccgtcaatgcgaaggcgagaagataccggtcggcgtcaaaaccgtaatcccgccggaactgatcgaacgcggttccgtgcgcgacatcagctgacgagcggcatgtgctggcatccactggtacctgtcagtgattcacctgtcagtgatccataggcaattccgcaccgaccaatcgactcggttgtgcaatattctgcacatttccaactatgtgcagaatattgcacactttactatactgtgatatattttgcacatgattgtcatggatatcgccgaatacgcgcggcttatcaaggatgaaaggcaacgccagggcatcagtcagaccgacatggcccaacggctgggcgtgtcacgtcgctggctgatcgaatttgaacacgcccgagtccccaatcccggattctccaccattctcagcgctctgactgagcttggcttgtcgctggatgtctgcaaaaccccgcagcccgccgaactctatgaatggtgacaccatgagcgaaaacactctcaatgcatttctcggcgaaacacccatcggccagtttcgaagaacaaacgatggcagcattattttccaatatcacgattcctatcgttggtcgcaatcacccacaccaatatcgctttccatgcccattaccgcagccgaatattcaggcgacatcccgcgtaatttccttgaggccctggtcccggaatcccctcaggcccgagatgaagccatgcgattgcatcatgcccgatcgacaagcgcatttgatctgttgcaagccatcggattcgatgccaccggcgcattacggctgtccgccgacccgcacttgcccatagatgacgattcgcttattccaatcagcgattcgcagatcgcgaatcgactacgcgcagccgcccccacaggcatccagtccgcaagcgtagacgagcattggtcggtcgcgggacagcagggcaagatcgcactgaggaaccgcaatggatcatggttctccaccactggaatcgcgcggacgactcatatcatcaagcccggcataccgacccttccacaccaagcattcaacgaacacatcaccatgcgcattgtggaggcgatgggaatacccgtggcccacacctcttttcacatctttgatggggtcccagccatcatcagcgagcggtatgaccgtatagtgtccgccaatggtacggtgacggccctgcaccaagaagactttacccaagcgctgggcattccctcatcgctgaaatacgaggaacacaacggcccaacgtccaatgcatatgcggaaatgttgcgcaagcacggtctgcccgatcaggccgaaagcaatatccgagccttcaccgacggcatcctcgccagttatctcgtcggggcaacagacagccacgccaagaactactcgctattgctcgatggcgcgtccgtgcggcttgccccgctctatgaccttgcttcggtgttcccttatttggggcatggcaagcagatcataaatgccactttggcgatgaacatcggcggacgccgagatcttcttcaattacgccgcaaacatctggaacgattcgcacagcggatgggattagatgaggaatccgtgattttacgattccacaccttggtggataggctgccggaggcattcgacagcaccgtgcaacccgctcacgacgttatcgcgagcattggtgcgcaggaattcatcgatagctatcgcaagcgcatcatgatggtgtacgacgatgcaatgagctggatggccagtcgaaagggacagtgattcggacgggtggggattggtctcgccatcccccccctaagaaatcagatcttaagcggcacacgggaaacgaattcgcgcttctcgcctgttattggatcggtgaatcgtagcacacgcgccactaattgcagcggctggctgaaatcgtcgtaggggcgtgtctggatgcgcgggtagaagtcgtcgcccacgatgggcaggccgagcgaattcatgtggacgcgcaattggtgggttttgccggtgcgcgggtggagtgtgtagcggcagatggggtgatttcccggatggggaccaccctccggcgcttcgcgccacctcccgccagcgggagggaaacagaggtcgccgcgctcgatgagggtttcggcgttggccaaacccggttcctcgaatgcggccatcgtgccgtgttccttggtgatgtgcgatcggcgcagcaatgggaacgggcgtggcggttcgacctgcatgatcgtgccgaatcgtgggccgctgatcggccggcagggtgccaggcattcatagatcttgacggcctgccggttctggaacagcatctgatacgcgccgcggcaggccgaatcccgcacgaacaccaatacgccggcggtcatgcggtccaatcggtgcgctggcgtgatgtccggctcccccagccgctcacgcaatcggatcagcgcggtctgccgataccacatgccgcgtggcatggtggccagaaaatgcggcttgtccaccacgatgatccgctcgtcctcatacagcacgtccatctcaaacggaatatgaggctcgtcaatcacataccgatgtggcttactcaacggtcacggacttggcgaggttgcggggcttgtccacgtcgtagcccttgagctttgccatgtccatggcgaacagctgcagcggcaccacgtcaaccagcgggctcatcagcgttgggcaggcggggcgccagaacaccacgtcagcgtaccgttccacatccgggtcgccctgctcggccacggcgatgatgtacgcgccacgagccttgacctcctcgataccagagatcaccttggcgtgcaacacattgcggccgcgctgcggcggcacgatgaacaccacgggctcaccctcgtccaccagcgcgatcggtccatgcttgagctcgccggccgcgaagccctcggtgaacgtgtaggcgatttccttgagcttcaacgcgccctcaagcgccaccgggtagcccacgtggcggccgaggaacaagaaggagttggcgttcaccatgcgctcggcggccgcctggatggtcttgggctgggtgtcgagcacccactgaatcttgcgcggcatgtctttcagggagtcgagcatctgatgaatctcatcgcggaacatcgcgcccttgacctgcgccagatacaggcccagcaggtaggcggcggtaatctgcgccacgaacgccttggtggatgccacggcaacttccgggccggcgtgtgtgtagagcacggcgtcggattcgcgcggaatggaggcaccctgcgtgttgcagatggccagcaccttggacccctgttcgcgcgcgtggcgcagggccatcagcgtatccatggtttcgccggactgagaaatggccaccacgagcgtacgcggggtcagaatcgggtcacggtaacggaattcgtgcgcgagttcgatttccacggggatacgcacccagtgttcgatggcgtatttggctacctggccggcgtagctggcggtgccacaggccacgacgatgattttgtcgatggccttgaagtcgtgttcgtcgatacgcacttcatcaagggtgatgtcgccattcgtgtcgaagcggccaagcagggtgcgctgcactgcggcagggtcttcgtgaatctccttgtccataaaggaatcccagccgcccttttcggcggccgaagcatcccaatccacggtgtaggtcttcgggttttcgaccacgttgccgttgaaatcggcgacgatgaccttgtcggcggacacgcatacggcctgatcctggtcgacttccatggcgcgcttggtgtaggccacgaatgcggcgacgtcggaaccgaggaagttctccccctcgccaaggcccacgaccagtggcgaatcatggcgggctccgaccacgatgtccggctggcggcagtcggtggccagaatggtgaacgcgccttcaagcatgcgggccatacggcgcacagccttgaacaagtctggcttgccttcgtccgcgataatcttgtccacgatcttgccgagcagcttagcggccacctcagtgtcggtggcggaggcgaatcggtagccttcggcttgcaggtcgaaacgcagctgagaggcgttttcgatgatgccgttatggatgatggccaccttgccgtccatgctggtgtgtgggtgggcattcacgtcgctcggctcgccattggtggcccagcgcgtgtggccgatgcccaccgtggcgagcggcatcggcttgcgctcgatgtcttcgaccaggttcttcaaacggccggccttcttgcgcacgaccaccttatccatgccgggcgcggtcagcgccacaccggccgagtcatagcctcggtattccagacgttccaggccttgcaggcagacctccaaaggcttgccgcatgccgtttcaatatttcccgcgtatccaacgattccacacatggctcaccagcctagcggacgattattgcgcaaagcgaatccaacccgccgcctttgcaggattggaacatgccccttcgtgaaaagcgtacgctgagttcatcagcgtacgcttttggagctgcaacaacgagccttcctacagcacgtgctgtaggcggagccgtaaagcggggagcccagtgggctccccgtaggcgacgccgaagcacgacagtgctgaggtaatataacagccttcctacagcacatgctgtaggcggagccgtaaagcggggagcccagtgggctccccgtaggcgacgccgaagcacgacagtgctgaggtaatataacagccttcctacagcacatgctgtaggaagtccttaaacctaggctcggtggggtggtcgatgatgtcggggccgcccttttctacgactacgccgccgtccatgaacacgatctggtcggcgacttcgcgggcgaagccgatttcgtgggtcacgcacaccatggtcatgccttccttggccaaggaacgcatgacgttgagcacttcgcccaccagttcggggtcaagggcggaggtcggctcatcgaagagcatgatctccggcttcatggccagagcacgggcaatggccacgcgctgctgctgaccacccgacagctgggaggggtaatagtccatgcgatcgcccagaccgacgcgctgaagctcggccacggccaggtcacaggcggctttcttggactggtgctgcacgtggatcggggcttccatcacgttctccagcgcggtcatgtgtgggaacaggttgaagcgctggaacaccatgccgaggcgagagcgctgtgcggcgatctccttatcgtccaaggtctgcagcatgtcctggccgtttttggtcacgtgcttgtagccgatgagttcgccgtccacctcgatggaaccgccggtcagggtttccagctggttgatcagacgcaggaacgtggacttgccggaaccggagggccccagaatcacggtcacagtaccgggcataacggttagatcgatgcccttgagcacatgcagcggcccaaacgccttgtgcacctgcacggccttgacagcaggaatcacggaaccgtcagccgccttgcgcacgaccggggcaacactggtgatgtcattcgtagtcataatcgcactcccgccttatgcattcaatccgacaaatgtggtctggttgagcttgtccacgtcatccttcggctcaccgtcggtcttacccggcaatggcgcctgcttgcccttggtgcccaccggtcgggcatcgaagcccttgccgaagtgcgcttcgaggcgggactggcacaccataaggatggaggtaatcagcagataccagaagcaggctacgatcagcagtggaatcggcttgtagatacggttggcgatggcgttggtggcaaactgcagttcgagggtgaacggcacggcggtgaccagcgaggtggtcttcagcatgccgatggtctcgttgccggtgggcgggatgatgatgcgcatggcctgcggcagcacgatgcggcgcatgatgagcgtgcggttcatgcccagcgccttggccgcctcggtctggccggggtccacggcttcaaggccggcacgcacgatttcggacaggtaggcggcctcgttcagggccagaccaatccatgcggcgttgaatgcggtgaccaccacgttggagtcgatgctccagaactccaccgaggtgaacggaatgccgaggctgatcttaggaatcagcacggcgaacagaccccagaaaatgagctgcgtgtacacaggcgtgccgcggaagaaccagatgaagaaccagctgacgccgcgcagcaccggattgatggatttgcgcatgatggcgagaatcaccgacaggatgatcgccacgaccatggagatcacggtaagctccaaggtatagcgaatgccttcaagcacgttctcgttgaacaggtacttccagacggtgggccaatccagtcgcggattggtaatcaagccttgaatgagcatcgcggcgagcagtaccacgatcactgcggccacaatcgggccggggcgcttgaccggcaacgccttgatgcggttggggatgttcagcccctcaccgtcgacttctttcttcgccataatctggttccttggatgtgttaggcagcctgaactgcaagttgcaactagcgttgaaccttagtgcacgaatggggcgactgtgttacaaacagtgcgccccattcgaattttcgcgacagcttgtcgactattcgacggccgggttgatttcggccttgtccagtgcgccggattcgacgccccagtgctggagaatcttagtgtaggtgccgtcgtccatgagcttttgcatggccttctgcacggcttcggcggtctgggaatcgcccttcttgatggcgatggcgttcggcacttcatcgaagtccttgccgagctgttccagctgaccatcggtctgggcgatggcgtagccgacaaccggggaatcggcgaagaagacgtcggccttgccggtcaccacagcggtggtggcgtcggtctgctgcttggaggactggatggtgatgtctttcttgccgtccgccttgcactgcttggcggtcttgttgatggcctcttcctcgacggtgccggtctcgacggcgacgttcaggccgcacaggtcatccgggttcacgttcttggggttgcctttggccaccgcgtagcccatgccggcggtgaagtaggagacgaagtccacggactgcatacgttccttggtgatggtgaacgcggcgatgcccagatcgtacttggagccgatggccggaatgatcgtatcgaagttggaggagacgatttcggtctcgagaccgaagatgttgcccatggcgcgggcgagatccatgtcgtagccgatctgggtcttgccgtcggcgtcgaggaattcggccggggcgtaggaggggttggtgccgatggtgagcttgccgtccttggtcacggattcaggcagcagtgcggcgatggtgtcatccttctccacggagctgacatcgtagctggtgatggtggcggcatcggagcccttggcggaatccgtaccggcatcggccttgtcggaggcgccgcaagcggcggtggcgaacagcatggccgagctcagtgcaatggccataatggacttcagtttggtggactgcataatcgtttcttcttctctcttacgccgcttcaacggcaacgatcaacggttaagcatatttatacactacagtgcatacatatacaaaaagactcccgccgcagggcaacgggagtcttcatagtaaccgaaactactcgacggacgggttgatctcggccttgtcgacggcgccggaagagacgccccacgtgtcgaggatcttcttgtacgtgccatcatccatcagcttctggatggccttctgcacggcttcggcggtcttggaatcgcccttcttgacggccacggcctcaggggtcacgccaacatcctcgccgagggcctcgagcgtatcaccggtctgcttgatggcgtagccggcaaccggcgtatcggcgtagaagatatcagccttaccggaagccacggcggtggtcacatcggtctgcagcttggaggactggatgtcgatggcatccttaccgtccgccttgcactgctcgttatccttgttgacttcctcttcctgggtggtaccggtctgcacagccaccttcacgccgcacaggttcgaggagtcgaccttgttcgggttgcccttctgcaccacgaacgtggaaccggccttgaagtaggtcacgaagtccacagcctccatgcgttccttggtcacggtgaaggaggagatgccgatgtcgtacttggagccgacggacgggataatcgaatcgaacgtggaggagacggtgttttccttcagtccgaacactgcggccagcgccttggacaggtcgacatcaaagccgaccggggtcttgccgtcctcggccaggaactcggccggggcatagga

SEQ ID NO: 3479 - DNA, 10707 bp, Unknown
  R85_18m  MAG No. k141_3283
agccgaagcctcagccggcggcaccagcgccacatacgggccgaaacgcccattgcgcacctcgacggtaccgccggataccgggtcaacgcccagctcgcgcggtccaccggagtggttgtcgatcaaatcgcgggccacagccaccgtcagctcatccggcgcgatggtgtccggcagggaggcgcgcttcgggttgccttcggcgtccagatgctccatatcttccagatacgggccgtaacggccgacgcgcacgtgcaggccgtcgccgatgtcgatggtgttgatggcgcgcgcgtcgatctcgccgagctgcgcgacctgctgttgcaggccttcgtgcgcctcgtcggcgttgcgggcggtgccctcgccggaaccgaagtagaagtgggtgagccagtcgcggccggattcctcgccgtgggcgatgcggtcaaggccgttttccatctcggcggtgaactggtagtcgaccagcttggggaagttcgtctcgagcaacttggtcacggagaaggcgagccagctggggatcagcgcacggccacgctcgtatacgtaaccgcgatccatgattgtggagatgatgctcgcgtaagtggacgggcgaccgatttccttggcttccagcgtcttgaccagcgtggcctcggtataacgggccggcggctgggtttcatggccgtccggttcgatgtcgcttgcctcgacctgttggccgacgctcatcggcggcagggaggtgttggattcggaggcgtcacccctgacggccttgacgtccgtcttgccggcggcagcagcctggtccgagccagccccagcgccgggagcggcggctttgggcttgcgcccctcccccgtggccttcataaagccggggaattcgatgacagtgccggacgcttggaacacggcctcgccctcggtggggccggccggcgcagacaggcgcacggtggcggtggagccggtggcgtcagccatctggcaggcgagcgtgcgctgccagatcagcgtgtataggcgcagctggtcgccgggaagtttggaagccagctcatccgggtcgtggaagcgcgagcccgccgggcgaatacactcgtgggcttcctgcgcgccagcggttttggtggcgtactgcttgggctcggcggagaggaacttgtcgccgaaatggtaggagacggcgttgcgggcggcggtgatggcctcctgcgacagcgtcaccgaatcggttcgcatataggtgatgtagccgttctcgtacaggctttgggccgcgcgcatcacgacgcgagcacccatgccgaggcgattgccggcggtctgctgcaaggtcgaggtggtgaacggcggctgcgggcggcggcggtacggcttggtttccatcgacatcacagtgaaatcggcggtcctcagcgcttcagccacggcagtggcaccagcctcatcaagctggcgaacgttcgccgcgaacccgtccggggtcagctggccgtcggcaccgaaatccttggagccggcgagtcgcttgccgccgagcgcgatcatgcgggcggagaattcggcacgctcccccagcgcgtcaggcgcggccaacatggcgacgatatcccagtacggcacacgcttgaatgccatgcgttcgcgttcgcgttccacgatcaggcgggtggccacggactgcacgcggccggcggacaggcccgggcccaccttgcgccacagcaccggcgacagctcatagccgtacagacggtcgaggatgcggcgggtctcctgtgcgtcgaccatattgccgtccacgtcgcgcgtgttgttcagggaggcgttgatggcgttcttggtgatctcgtggaacaccatgcgcttgaccggcaccttgggtttcaaggtctgcaccaagtgccacgcgatggcctcgccctcgcgatcctcatcagtcgccagatagagttcgtcggcgttcttcagggccgatttgagttcgctgaccgtacgcttcttgtcgccgtcgacgatgtaatacggcttgaacccgtcgttgacgtccacgccgaacttgccgaacttggccttgtctgccgcgggcacctggctgggctgcgcgaggtcgcggatatgaccgaccgacgccatgacggtgtaccccttgcccaggtagtcaccgatcttgtgggccttggtcggagactccacaatcaccagtttggtagccatacccactccttatgtattgcgcgaaacacacgacgtttctggcgtcataatactcatgaatcatatccaactgccaaattccgccgttgtgccaggcaaattcggccgttcgcacctcatgttttaccgtttgggcggtgccggcggagcgccgatcaggcccagcctgcttaagggcgctgcagtgatctgacgtagggccagcaacagtccgaatgcgagcatggccacacccgtaatgcccacaacagcgctgacattcgccccctgaaccgcccaactggcgctgacattgagccccggcaccacctgccagatcacataaccgctgtaggcgagcaacagcaggcccccggtaatcaacacgctgccgacgatctgcacactcactgaggagacgcggtggcccggctcgtccatgccggacttgcgtgtaaccgccagagcgagcagggccaatcccgccaccagcaggatggacatcgccacatccgaagggcgatgccattgcccgtatatcacagagacaccgacggtcgccgcccaaaccacgccgatgacgcccgccaaagctcgaaccgcgcgaggcacggtaagcagcagaatcaccgcacaggctgcggccagcatcgtgtgtccggaaggcgcggaattagcggcaggcgattcagtgttgatgatgaacggacgcggcaacagacccttgatacgggtgacggccaagcagaccacggcgaacacggcgatttgcccggccaaccaccagcggcgtcgaatcagcgccgtaataatgccgattgcggcaattgtgcagctgacagcgataaccagccaggattgtgcgacggcgttcatcatgccggtggtccaggacggtacatcgttgtgcaggtttttccagaccagttcgtcgtacgattgtccgttttcggtaaacacgcacccccaccacacgccgaagccaatagcgatcaggagcagaccgaataccacgcacagtacgcggctggagattcgcgggcgcacggtaagcgggtcaagccgggccaagccacggtcgatatcagatgccccatccgcatcgtccatgcccagcggcctgaaatcccctaaggagcctgatgtggatgccgatgcatctgaaccggagaccgggccgagcgcagccaatgggtcaacaacgttcgacgacgagtcaggctgcgctgcgcctgagccgaccagattgaccgccgcatgcgggtcgcgaattctaggggtctgtgcgtcattcatacgttcgactgtacggccgcgccccggacagggagccgtgctcgtgccagctcacggccaaatccgcacaaatggaaaacctccacgcacccgtcagaggccacttacccttgctgcattcctgccctgggggagttgggtgacatagcgccgcgtggaggctggggataagtctatggagacgtatggaccagcgcagcgacacgaaacgtgcgcgccgggtcgcacggcaggccaaccagcgcattcaggcaatattcatgcagcatcaaggaacgtgcccaattgtaagaattccggaaaaataccggcataaatgcgtgtggttacgctcacgtcaaacgattgttcaaggccaacagttacggtggacaccatggcttcttatactcgtcgtgcacattcgggaggcaatggccccgctctgaggcaaccgcgcaccgcgcaaagcagagccgaccactccgcacaggagggcccctatacgccccaggagagccgttcccgccacgcaagccacaaggcttccaatagccatcgagccccgaacaggaagaaaaagaacacaggaaaaggcaagcaccgtgtactgaaatgggtgctgggcatcttcttctccctgattggactgggcttgctggccggtatcgcagtattcgcatacctgtacaccaccaccgaggtcccgcaacccgaaaagttcgcgttggccgagaaaaccaccgtgtattacgcggacggcaccaccgcgatcggctcctacgcggaacagaatcgttcaatcatctcttgcgaggggctgccggactacatcggcaacgcgattgtggcgtccgaaaaccgtacgttctacacggataaaggtcttgatctgaggggcatcgcccgcgcattcattaataatgtgaccaagggcacgcgccaaggtggttccaccatcacccagcagtatgccgagcggtattacatgggcgaaaccacatcctatgtgggcaaggcgcgcgaggccatcgtggccatcaaaatcgcgcaaaccgagtccaaggacgaggtgctgtgcaattacatgaacaccatctatctgggccgcaactcctacggcatccaggcagcggccaaggcatacttcaataaggacgccaaggatctgacgctgtctgaagcggcgatgatcgccggcattattccgtcaccgtccacgtgggatccggccgataacgccgatatggccaaatcgcgcttcaagcgtgtgctgaacatcatgcaggaggatggttacatcactgccaagcagcacactgatgccaagttcccgcagactgccgcggtggcgcagcaaaacgaatacgcggggccgaacggttatctgctggatatggtgcgccgtgagctggtgcagtccaaggcctttaccaaagaggatttggataccggcggatacaagatcatcaccaccatcgacaagagcaagcaggaccttatgcagtccatcggcgacacccgtctggacgacatgcctgaatccctgcaaatcggcggcatagcgctggacccgaagaccggtgaagtattgtccgtatacgccggttcagattatctgtccaagcagctcaacaatgccgatcaggccgtattcgaaccgggttcgactatgaagccgttcgctttgctgggggccgcgcaatccggcgtcagcttcgatacgttgttcaacggcaattcccaccagcacttcaccggcttggatcaagaggtgaataacgctctggagaacaactggggcaacatcaatctgtatcaggccaccgccaactcggtgaacacggtgttcatgaacgtcaatgagcatctgacgccgaagcgcacggccgcaatcgcccatgaagcgggcattcagggcgatatcgatgaaaactccatgtacaacgtgctgggcatcaacgccctgaccgtgtgggatttggcgcaaggccattcgaccatcgccaacaatggtgtgaagagcaccttgcacatggtgtccaaagtgcttgattccaacaataaggacatgtacaacgcgcccagcaaaggcaccaaggtgttcgatgccaacgactgcgctttggtgcagaaggccatgcagggcaccaccacgtacggtacggcggccggcacatccaacatgctgggccgacccatcgccggcaagtccggtaccgccaacgacgaaatggcttcgtcgttcgtgggatacacccccagcatgatgaatgtgtgggctatctggaacccggacgataagggcaatccgcaggcggtgccggccttctccggatacggcatctcttccactggataccccgcccacctgttccaggagttcatggctcaggccttgcaaggtaccgaggtggagcagttcccgaccgctaaagacaatggcaagatcggtggacccgacggcacttggggcttgggcaagggacagagcagcggcctgtccaacaacaccaacaagcagtccaccgaagacgcgcagaagcaggctgagcaggacgcacagcagaaggcggccgaagaggaagccaagaagcaacagcaggcccaggagttcgcccagcagtgcctcgccaatccgagctattccaccgagtgtccgaattatcccggcaccactaccggcggagatggcaacaatggcaacaatggcaacaatcccggcaataccggcgggaacaacgggaacaataccggcaacgataatggtaattccggaggcaccggcgggaacaccggcaccaacggcgtcacccagtagtaagtaagcacagacaacaaagctccctctgatgcaatcagagggagctttgttttgttgttagcgctcagcgcttgcgctgggaacggttgatggcagagataatcgacttcagagcgctggtggtgatcgacgaatcgatgccgacgccccacacgatctgcgcatcatcggcctcgccgacctggcattccacgtacgaggcggccatggcgtcggtgccgacggacatggtgtgctccacgtaatccataatcgaggcgtcaacgccaaagttggaaatggcgttgaggaaggcggcgatcggaccgttgccgatgccggagacctcgcgctccacgggcgcatcgaccccgacgttcacgccgcggtcgagcaggcgagccttgagcacggtatcggagccatcctcaccggagctgacggccaccttgagcagcttcaagcggccccacggcgcgagcgaggcgtcatgagtatcgcccacaaccacaccggcggcggtcatgccggactgttcgatcggcaggtactcgtccttgaacagacgccagatatcctcgtccttgacttccttcttggtcgtgtcagcgtagtcctgcacgatcttgtcgaattcaatctgcagacgcttgggcaggtcaagattgtggttggtcttgagcaggtaggccatgccgcccttgccggactgcgagttgacgcgaatgatggcctcgtacgtgcggccgatgtccttcgggtcgatcggcaggtacggcacaagccacacgaagctgtcgagatcggcgccagcgcgctcggcggccacctgacgagcctcgagacccttcttgatggcatcctgatgcgagccggagaacgcggtgaacacgaagttgccggcgtacgggtgacgctcggagatcttgatctggttgcagtactcaaccgtcttgcggatctcgggcacgttggacaggtcaatctgcgggtcgatgccttgggtgagccagttgaggcccagcgtgaccaagtcgacgttgccggtacgctcgccgttgcccagcaggcagccttccacacggtcggcgccggccagcacggccagctcggtggcggccacgcccatgccttcgtcgttgtgcgggtggagggagagcactacggagtcacggtcgtcgaggtgggtggagacgtactccacttcgtcggcgaacacgttcggcgtggtcatttccacggtggcgggcaggttgatgatcatcgggtgctcgggagtcggcttgataacaccgatcacggcgttgcacacctcgacggcgtactccggctcggtgccggtgaaggattccggcgagtactcgtagtacaggtcgatgcccttggcctcgttctcgaggtccttgcacagttcggcggcgtcggtggcgagcttcttgatctcttccttgttcttgcggaacacgacctcgcgctgcagcacagacacggagttgtagaagtgcacgatggcgcgcttggcacccttgagcgcctcgtaagtacggcggatgaggtgctcgcggcactgggtgagcaccacgatggtcacgtcgtccggaatcagctcacgctcgatgagcatacggatgaagtcgaaatcggtttcggaagcggacgggaagcccacctcgatctccttgaatcccatggagacgagcaggttccagaaacgcagcttgcgctcggaatccatcgggttgacgagggcctgattgccgtcgcgaagatcgacggagcaccagcgcggcgcgcgctgcagtcgcttgcccggccacgtgcgctccgggtaatcaaacgggatctgcttgtcgtaggcggcgtacttgttatacggcatacgactcggcttctgcggatcgccgatgaatcgtgccggaggcagcagcgggtcgttgttccccccattggacgccgcagccactgccgcgagatcaaaaacggatgattgaccctgacccattgttcctcctttactggttattgcgcgggccctcttgcggacgcgactgcggcgttgtgccagggcggcgccgggccacgcggatttgtcaatacgcacgtaacatcctacaggccggttcgggcaaacccgcgggaaatgccgtatcgtggcatttgcttatgcacctggctgatatgagggcactcagcgtcgtcagcggaccacgctttgactccggcacaacaccccgcctgcgataccccaccagatggccctccatacgtcggcggcgggccaaatattggtactgcaccgacagccaaactgctcagcgtcgtcagcggaccaacttatggcgaaataccgactctgggaaagcttatcgtcggcaaattgccaggctatggcacactatcgacgctacgaggcccacaaccatcggcaacgcgacaaatattggcccaccgccgacgctagcctctttgagcgtcggcgccgggccattccatgaatcagtaacgacgccaatggtctcagaacgtcagcatagggacgctgtctggatctccaccgacgctgcatgacaaaatcgcggcaccatcaagcaacaacacggctgcggcaccccgccctgccccgtcccttgctgtgccagtcctgtgaacgcgcgggcgatccgccgcccggcaacatagactgaagagctatgacgagcttgcgattccgcgaagacggcagcttccgcgtgctgcaaatggccgacgtacaggacggccccgatgtgttgcccgacaccatccgcctcatccgcgaggccatccgcgaagccgatccggatcttgtggtgttcaccggcgaccagatccgcggctatgatcccgcctacatcgacacgttcctgcgccgccgcggcgaggagccgggcgctcgcgtgcgcgcggtcaccgagatcgaggccaaaatccgcgggatcaagcgtcaccccgtaattcgcaaagtatccgatcgcgtggccgatcgtctcaccgaagccggcaagcctgtaccagccgcgctgcttgaccccgataccgtgacgaacgccgtcgccgctgccggcgccgattcgaccgacgtgatcacgacttccgaagtaggcgattccgttgagaccagccccacgcccgagacggtttccaccctcgtatattcaacgcaatccggcaaggccagccccgcacacgagacgccggcgaccctcgacgaactcatgaatgagacccgcgaaaaggtccgccgcacgttctccggtttccttggtccggtcgtcgaggccggcgtgccctttgccgccacctacggcaaccacgacttccaatgcggcattctggccgacgaacaggatgacatctaccgcgaataccccggctgcctgaaccccgacgacagtctcgagcccggcacgttcgcgctgcccgtcgagtcctccgatggttccggccgcgtggccatgtccgttatgatggtcaattcaggcgattatgccggcaaacccgaagaaaacgatgcccaatacccggcgtatgtggtcaatccgcgaggactcgacctggccgacgccgacgggtacggcacccccacccccaaggccatcgaatggctggggtccgtccaaaccgagttgggcgagcgcaatggcgacggcaagcccgtgccggccatcgccttccagcacattccgccgcaggaattctacgattgtctgaaggaagtgcccgcatggacgccgaacgccgtggaaggcgcgcgcacgcacgccgggcgttgctatgtgctcaaccatgaggtctgccgccccggctcgcggctcggcgaggcaatcggctgcgcggacgagaatgtgggcgaggtggatgccttgcgcgaggctggcggctatttcgcgctgttctgcgggcatgaccataagaactctttcgttggtcatgtgcatgatatcgatctgggctatgcacccacgtgcgggttcgaatgctatggtcccaagtcgcggtaccgcggcattcgcctatttgaattccatgagagcaatccggcgggctatgtgacccgcatgctcacatggggtaatctggtcggccgctactccagcaacgagctgcgcgtctggttcgaggatcattgcgttaccggagcggtcagcgcacgcaacgagctgcgccgcccgcaggtgttcgccgtggtggccggcgcgatgagccttggctttatagccatcatccgttcgctgatcaaggccgcgcgctaaacctacttaaacagactcaccccgcgacgggccgtgcaatacgcgttgcccagccaggtatggcgggaattgggccagacagctcccagtcgcggtgcgttctggctcatccagatgctcggcacgcggccgtctgcggagcgtgagccg

SEQ ID NO: 3480 - DNA, 14590 bp, Unknown
  R85_18m  MAG No. k141_3372
cagatcgcgcaacacggcgatgatgatcgacagggataccagccgctgctgcccgtcgatcacgtcataacggttatcgccctcgcgcaccagaatcagcgagccgaggaaatacggggtaccgggtgacttgcaggcgtcatccaagtcgcttaccagttgcaggatgttctcggccttccatatgtaggcccgctggaatgaggggattgtgaaccggaaatccggggtgaacactttcccgagtggtagttccttcgcgctgattgccatgtcaatcccttcgtcgccggcctttggacggtatgccgacgtgccgactgtgctcaagcctaccagtgttcgcccggcggcgggcgcatcacgccggctcgggcaccgacccctcgtacaagtagaacgaagatgggttttctcccggcccggatgcgggcagtgactgctcgcacacctgcgtcaggccgcgatgtacatagaatccgacatcgcacgtggtatccgtgaataggaagtactgacgtatgccggctgcgtggaatgcgctcatcatcgtctcgaacatgcgccggcccagaccgtgaccgcgcgccgccggatcaagtacgaacagcaccacttcagccgaatactcatggccaatgttcgccgcctgcttacgcagttgcctatcgacatgaagagtcccgagaatctcgctcgcagctgccatgccgtcgtgggcaaacgccagttgcaatagcttgcgcaacgaatgacgccggtgcatgttcagcgggctgcgatggtcgagctcgtcgatacgccccacaatcaatgcgacgggtttatcttccagctccgcgacaaaggccgtggtcacacgtgccagacagttctcccaatcggcctcggctgccagcaagccggtccgctcatcatattcggcgtaccaagtgcggcgcaccaggtcgatcagcgccggataatcgtctttacgtaacgttcgaataatcgcttcactcatgttctccattatgactgatatggctcgataacccgacgtgttacagtcgcgccggcaaatcggcccgctccaccagcctcgccatctgtacgcggcccatattgagcttgtccgccgcggaggagagatgcgccttggccgtacgctccgagataaacatacgggaggcgatttcggcgttgggctatgtgctgcaagacgattcgccgattacggtgtatgtcacttcgttcctatcaacggatcaagacaccaaggtgacgcatgccttcacgttgcagtgaatcgcgcggcggtccaagctgcggtcgaatgccaatcgaatctcaagtgcatgccacgcgcatggtggaaacgcccgttacgctttgcgatgagcagaacgagccgatcgatcctattcatggaatgttcagctttgttcctctaagattggtactggaacaaacgctaaaggagcgattatgacattcggtcagcagccccagaacaacgggcaatacaacccgcaatacaacacgcctgattacaacgccgcccaacagtctggatatggccagcaatacgcacagtccggttacggccagaactactatgcccagccgcagggcgcccccacctaccagtacgcgccgcaggatgcggccggtgccggcgcgggtgccgccaccatcaacacgacgatgacctacaactacgaggaggcccgccgcgtctccgtagccaaggtgtacggcgagatgaccatcggcatcctcgtcaccgccgtggtcgccgtgctcggccagatcaccggagcctactacagcttcctcatggccaccggcatggtgggcctcatcggcctgtgcgtggtgcagattgccctggccgtggtgctcggcatgcgcgtcaccaagatgaagtcggccactgcgcgcgtcatgttctatgtgtacgccgcattgatgggcttcaccttgagctcgatcttcatggtctacgacctcggctcgatcggcgtggcgctcggtgtcaccgcagcgttcttcttcgcgctgaccatgttcggcatgactaccaagttcgacatgctcaaggccggcccgatcctgatgatcggcctgatcgtgctcatcatctcgcagatcgtgctcgccttcgtgcaggtcgacggcatgaccaagatcgtctgcgccatcggcctgatcctgttcgccggcatggccatctacgacgcgcagtccacgcgcgcgctgctgaccgaatacgaggcccagggcccggaaatggtcaagaagatctccatcctgtgtgccctgaacctgtacctcgacttcgtgaacatgttcctgtacatcctgcagctgctcggcaacagggactagcctcgccagccgattggtgggcggcatgtagcctgctcgtcaaacgtcacagcccgaccacattgtggccgggctttttcatgtctgtcacattcgcacgttaggctgtctccccgtgaaaagacaagaactcgtaggcatgctgagcctgttgttgaccgcgctgatctggggttttgcgttcgtggcgcaggtccagggcatggatttgatgtcgccgatgttcttcaacgccacgcgcttcacgctgggagcactgtctttggtgccgattctgctgtggcagcgtggccgggggagcgcggataagggcgatacagccggggtcgatgtcgttgggaccgaggcatccagggccgtctccacagatgccgcatcgaacggtgcatccgacgtcgttaccatcaccggtgccaagctgaatgcgaacaagcccgattcggccgtggcgcgattgctcgccaacccggtggtcatttccgtgatctgcggcatcgtgctgttcaccgccagcaccctgcagcagtatggcattctgtacggcaaatcggccggccgcgcgggattcctgaccgccatgtacatcgtgatggtgccgttgctggcctgcgtgttcctgcgccggcgcatcggcatgctggtgttcgtggccgtggtgctgtccatcgccggcttctatctgctgtgcatcaccgatggtttcggttcgatcggcctggcggatatcctgctcgtgttcacggccgtgctgttcgccgtgcatattctggtgatcgatactttgggcggcaccgtggacgccatcaagctttcattcggccagttctgcaccaccgccgtgctgagctgggcgggttcgctgatcgaaggctcggtcgactgggccggcgctgctcattcctggattccgattctgtacgccggcatcggctcggtgggcatcgcgtacaccttgcaggtggtcggccagcaatgggtgccgccgacgcgagccagcctgctgatgagcctcgaatcgttcttctcggcggtaggcggtgcgttgcttctcggtgaagtgatgaccccgcgcggttacctcggctgcgccctcatcttcctcggcaccctgctggcccaagcgccggccaggctgccgaagtggctgcaacggtgaatgaatcggacgcaggccgattccatagcacctcagtccgtggtcttaggcgcttcacccacttgcggcgcgccgttgatgtcgcggtggatgttctgcatttgcacttcgatgttctgcagcgaacgggcgcagtcgagcagtgtctgtgaatgctcgctgagcttgttgtccggcaaatcggtcttgtagcgcagcgcatgctccagcgacgcccaataatccatggcgatggtacggaactgcacctccaccggcgtgtaatgcgcgcccgaggagagaaacacgggcaccgcgtagattacgtgcaatgaacgatacccgttctgtttcgggttcttgatgtaatccttgacgcgcagcacctgaatatcggactgcgacgacagatagttggacacggaatacacgtcgtcgcggtaattacagatcacgcggatgccggccacatcgaacagattgtccttaatcgaattgacactgattggcagattcttgcgctccagcttgccaatgatcgaactcaccgacttcagacggcgttccatatgatgtatcgggtcatggctgaaccgcacctggaactcgtcgtcgagaatctccagcttggtgctgatctcgtacatcgcgccttcatacacctgcatgaggtcaacgaatttaacgacctgttcgggagtgaaggtgcctcccggaagatccaacgctttgagacgggcctgtagatcggaggttttgagtcggctatgtcggtcaagtatcacgtccaccaatatactcggcggattccagacaatctggatgttcgcggggaatctttccaagaacccatatttaagatcgtgacaaccaatggcatacgtgaccggagcatgacgaaccccgccgatagaatcggtcgttatgaatgaagacatgatgaccgaggcggagcgtgcctcgattgcagccgatggaaccgatagcttgttgggggagcgcggcaagggcgtattccatatccacacgctcggctgccagatgaacgtgcacgattccgagcgcatcgccggcgtgctggaggccaatggctacgtccctgcaaccgaggaccagatcaatgacaatgacctcgatctgctggtgctcaatacctgtgcggtacgcgagaacgcagccgaacgcatgtatggcaccatcggccgattcaatcgcgtcaaactggttcggccgaacctgcagatcgccgttggcggctgcatggcccagcttgaccgcaagaagatcgcggatactgcgccatgggtttccgcggtgttcggtaccaagaacatcgaagatctgcccaagctattggatcagaatcgtgcgaccggcaaggcgcaggtccaggtcactgaacaattgcggcagttcccgagccagcttcccgccgcccgcgcctcccgcatcagctcgtgggtggcgatttccgtgggctgcaataacacctgcacgttctgtattgtgcccaccacgcgaggcaaggaaaaggaccgccgccccggtgacattcttgatgagatccgccaatgtgtggccgatggtgccaaggaggtcacgcttctcggccagaacgtgaactcgtttggttatggtattggcgatcgatacgctttcagcaagctgttgcgtgcctgtggcaccatcgacggtctcgaacgcgtgcgcttcacttcgccgcacccggccgccttcaccgatgatgtgattgcagccatggccgaaacgccgaatatcatgcatcaactgcacttcccgctgcagtccggttccgaccgcatcctgcgcgcgatgcgccgctcctacaggtccgccaagttcctcgatatcctcggtcgtatccgcgaggccatgcccgacgcccaaatttccaccgatatcatcgttggattccccggcgaaaccgaggaggacttccagcagaccatggacgtggtgcgccaggcgcgcttctcctcggcgttcacgttcatctactcgccacgccccggcacgccggccgccgcaatggaacagattccgcgcgacgtggtgcaggaccggttcgaccgactggtggcgttgcaggagcagatcaccgaagagaacctcgccacattcgagggccgcgacgtcgaagtgatgatcaccggcaaactcggcaagaaggacaccgacacccaccgtgtcaccggccgcgagaaaaccggcgtgctggtgcacatcggcgtgcctgaaggcgaaccggtacctgaaatcggcgatttcgtcacggtcaccgtcacacacgccggccgccataatctgcttgccgaccccgatgtggccgctggacagacctattccgtgcgacactgagggggcgtatatgacgcaacgagtcgtctccatcgtcggtcccaccgcgtcaggcaagacggggttgggcatcgccatcgcccggcgtctggccgaagcgggggagcgggccgaaatcgtgaacgcggacgcctaccagatgtaccgtggcatggatatcggcaccgccaaacccaccgccgaagaacaggcggccgtgccgcatcatctcatcgacatcatcgaccccgaagacacgatgagcgtggcccgattccagcagcttgcgcgcgagaccatcgccgacctgcaatcacgtggcatccggccgattctcgtcggcggctccggcttgtacgccagagcggccatcgatgacatcacctttcccggcaccgatcccgacgtgcgcacacgtcttgaggaacgcgagaaaaccgagggtgccggtgctttgttcgacgagctgcgggccaaagaccccgaagccgccgcgcgcatggacccacgcaacccacgccgcaccatccgtgcgctggaagtcatcgagcttaccggcaaaccgtattcggccagcctgccgcgctaccggtacgtgattccgtccgtacagatcggactcgacctggaccgcccggatttggaccatcgcatcgacctgcgcaccaagcagatgtatgacgatggattcatcgaagaagtcgaacggctgcgcccgcatctgggtgccaccgccgtacgcgcgctcggctatcagcagatcatcgacctgctggacggtatctgggatgtgaacgacgccttcgcggacatcgcacagaaaaccaagcgactcgcccgcaaacagatgggatggttcggccgtgacccgcgcatccactggctgcaggccctgaacccgaaactggtcgacaacgcgatggccattatcgcgcacgccgacgccggcgactacgacccgatcgacgcccgagccgacgaatacacccagcatcatctgggcgatatcacggcgtaggaatcagccaaaggccggtgcaatcacccgcaatcagtgtgcaggcccctgattccagccggcgatcaagaacacgcgcgtcggattcgccgggcgtagtatcgcgtcgaacatcgtctccagtgcagacgtgtcgccccgatatgccgagtgcttggcggagcgatactcctcgcgcgtcactgagccccagtcgagatcccagccggcgtcatgcgccaagcgtgaaccgaatatacgcagcaccatcgcattgccgccacggaacggatgcagataaccgagctcatcataaatagaagcgaacgcgtgaacgaacacgtcgcgatccaacgcatgcaggttgcgcttgtccgccaactccatcgcgatgttgtgcgcgccggtctcaatgagcccagccgggaagaacgcctccggattcgcggcccgagcccggtcgttcgtcacctcgcgtgtggtgtttgaggtacgcaacttgcccgcatcctcgaacacgccttcgaacagccccttatgaatggcggtcaactcgtccaagtcgccagacggattccaccgacgttccgccaacaatacggtacgtgcgaacaccgcatccgcgcgatccgtggcatgatcatccagactgccggcagccagacgatcctttccggcagggtcggcggcggcgcgcagacgcatggcggtctgctcgtccgccacgtcgatgagatgggtcactggctccaagccacgttcgtaggcaaccgcggcgcgcatcgttgcctcgcccggcgtcatcgcttccagtgcgcagttcttgagtgcaaatgcgactgcgctcgcacgctctgcgggtgtcatgcaacccatgataaggcatattcgcgctccagcggggaatcgactcggacgaacctcgacgaaccgcggcgaatcggctgtcgggattcgtcaatcgaccatatcgtcacggtgtcgtcaccaaccatgcacccccgtactagtagaatcagacccgatatggcacgaacagcatcctccaacagcaccaaaccccgtaaatccaaagacaacgggtctacccatgatggcgaaaccaaggtccagtccgagcttgacctcgaacctgagccgttgtggaagaagatcctgctcgcgattccgcgcgcgttcggctccggcgtacgcgccgtcaccggcgtcggcgaatacgacccagcctaccgtcgtgacggtttgtgcttcctgctgctcgtgctcgccgtactgttctgcgcgtccgaatggttccgtgtcagcggtccattcggccagctgcttcacgccatcgcggccggtgtgcttggtctgatgagcgtcgtgctgccggtgttgctcgccgccgtggccttccgactcatgcgcaattccggtaaagggtccaataacccgcgtgtggtcaccggttgggtgctgctcatgtggtcgatttgttcgatcatcgacgtggcgatcgccgccgaccacaccggattcgacatcacgattctgcaatccgccggcggcctgttcggcttcttcctcggctcaccgctcgcctggggcctttccaacgtgttcgccatcatcattttcgtggtcgtcggcctgttctccttgctgatgattaccggcacccacgtcaccgatttgccggaggatgcgcgcaaaatcgcagctaaaatccaacgcaaaccgtatgtgccgatgggccaggaggccgacggaagcgccagccagttccccaacgaggtccatgtgggagataccacactcgcctttgccgacggtgttccctcgcatgacggcaacgacgacggcaacgacaacgatcaggccggcgatgcacggcccagcctgttcgcacgactgttcggccgcaaatccaagaccgaagacgacaaaacccttgacaagtatgctgccgacgatccgttcgaccgtgccgccagccagcatggtgccaccgccgaaaccccggtggtcgatccgatgaccggcgagattaccggtgcgcgaaccattgcatcgtcttcgtacgacggtcgtccgcacctatccagccctgcgcctgctgccgatgcggatgatggcgacgcttcccgaacccgcgtcatcaccagtggccagaccatcgccatgcccggtgggggagcggtagacgatccgtgggcacccagtgccgcccaggccggtactgtcgcgctcgcaggggcagccggggcgatgggagcggccggggccgccggtgccgcggccgcggcagccgcgaccggagcctacgcaggcgccgatgcggatggcagcggagtcggccagggcgtgcccaatacggacggacagccgaatgccgccgccggcaacggtacagacgacgacgccaataggccgtatcagttgcccgacctgaacctgctgaccaaaggtcagccccatgcgatgcgcaccccggccaacgatcgcgtgatccgggcactgacttccaccttcgaacagttcaacgtggacgccaaagtcgtcggcttcctgcgtggcccttcggtcacccaatatgaggtcgagcttggccccggcgtcaaggtggagaaagtcaccaacctgcagcgcaacatcgcctacgcggtggccagttcggatgtgcgcatcctttcaccgattcccggcaagtccgctatcggcatcgaaatcccgaacgaggatcgcgaaatcgtgcacttgggcgacgtattgcgctccgacaaggccgtgggcgacccgaacccgatgctctccggcatcggcaaggacgtcgaaggccacttcgtgaccgctgacctgaccaagatgccgcacctgctggtggcaggtgccaccggttccggtaagtcgagttttatcaactcgatgctcacttcgatcatcatgcgtgccacgcccgaacaggtgcgtctgatcatggtggatcccaagcgcgtggaactgtccgcctacgcaggcatcccgcacctgctgaccccgatcatcaccgatccgaagaaggccgcacaggccctcgaatgggtggtcaaggagatggatgcacgctactccgacctcgaattcttcggattccgccacgtcaaggacttcaacgaggccgtgcgcgccggcaaggtacatgcgcccgccggctcccagcgcaaggtggccccctatccgtacatcctcgtggtggtcgacgagatggccgaccttatgatggtggccaagaacgatgtggaaagctccatccagcgcatcacccagctggcacgagccgccggtgtgcatctggtgctcgccacccagcgtccgtccgtggacgtggtcaccggtctgatcaaggccaacattccatcccgactggcgttcgccacctcgtccgccaccgattcgcgagtcattctcgacacggtcggtgccgagaccctgattggtcagggcgatgcgctgttcctgccgatgggttccgccaagccgattcgtgtgcagggctcgtgggtgtccgaatccgagattcgcaaggccgtggagttcgtacgcacccagcgcaagccgaagtaccgcgaagacatcgaacagatggccaaggaagctgagaagaaagacagtatggagcctgacgaggagatcggcgacgacatggacgtgctgctgcaggccgccgaactcgtggtcactagccagttcggttccacctccatgctgcagcgcaagctcagggtcggcttcgccaaggccggccgactcatggacttgctcgaatcgcgcggcgtggtcgggccgtccgaaggctcgaaggcccgcgaggtgcttgttcagccgcaggacctgccgcaggtgctcgccttcatccgaggcgaaaccagctcgctcgaagccagcgccccgcaacaacccgaactcggcgaataattcacccatcgacctccctctgatgagggaggtgcccgaaggggcggagggagagaagcgcggacagcatcagcacgaaacctgattcccgaataatagcagtcaatatccagccaccactcactcaaggtaggagtatgggggtaacgtgaacactatggatgagaacacaatggacaagcagtcatcgcccaaatcatcgctgttcgacggatggaacgcgccgccgaacctggtcacctactcgcgcatcgtactcgtggtgattttcctgacgctcgacattctcgccggttcctggggtgagaacaacctgatcatgcgttgggtcgccgcggtactgttcatcatcgccgcgtccaccgataaaatcgacggttggatggcccgcaaatacaatcaggtcaccgaaatgggcaagctcatggatccgatcgcggacaagctgctcacttgcggcgcaatgattgtatgctccgcgttcggcgagctcggctggtgggtgaccatcctgttcctgattcgcgaaatcggcatcaccgttatgcgtttcttcgtcatggagcgtccgggcggcaaggtcatcgccgccgcatggcccggcaagctcaagaccgtattccagtgcgtgggtctgtccatgctgctgctgccgttctggtctctgggtaacggacaggccacgccgttctggatgaccgcttactacttcctgacctacgccatcatctacgtggcattggtcctgtgcctctactcgggtgccgtgtacctgtacaacacgttcgtcgccccgaagcggaagtgacggatattccaatgcaggaattgtgcgacagtctcgcggccggcatcctcaagatctgcgaggcgaacaatacgaaaatctcctgcgctgaatccctgaccggtggcctgctcgccgatgcgttcgtgcgtattcccggtgcctccaacgtgttgctgggctccgctgtcacctacgacatcaatgccaaggcctcgatcctacacgtggacaaggccctattggatcgagaaggcgccgtacaccccgaagtcgcccggcggatggccatcggtgccgctcgcctatacagccagccggaatacggcgaccgaatcatcggcctttccaccaccggcgtggccggccccggtccggacggtgataagccggccggactggtgtatgtgggcctgcgcatccccgcaagcctcaccgcggaccatgccgaagtgctcaaagccgtcgaactccatcttgatggcatgcgcgaagaggttcgtcgcctcaccgtattccacgttctgcaaaacttgagtctattcacagcaagttttaaggaataaaaccgcgggaccgtcgtgttgtacatagtggaaacactgaaccgaccttggaaggggcgatggcgatggaaacgatgacccgagtgaacgaacagatggatgtggccgccaagaagccgatggctgtgcagccgggtgtcgcccgtatgcgtgaactgactccggcccagcgccgtgcggtgatgttcgcccagcagcaggtgctcaaggcgcaggctgccaagaaggccaaggatcagcgtcaagccgttcgtgaacgtatgtgggatgaggattcgccgtcgtacaagccgactgccgccgccgagcccgtggtggttgaggaggagcctcgcgaggtttcgctgcgtggtgctatcggctacgtgctgcgcgaactgcgtacgcgcgatcgccgcacgttgcgtgaggtctccgagaaggcgggcgtttcgctgggctatctttccgaagtcgaacgtgggcagaaggaagccagctccgaactgctgagctccatcgccgatgcgctcggagtctccacttcgcgcatgctgcgcatggtggccgattatctcgactcggtcgagggctgatcggttggcggtgtgaagccgcatcccgtaatctatgtctagctgtgaacccgtatcgcttgtggcgatgcgggtttttgctgtcctgcgggtggtggcacactggcgtgtatgcgtgaacgggaattctgggaattacttgaagaggtgttcggtcggacctacggtcgttcgctgtcgcgtgatcaacggatgtccaaattggcgaatatgaccgtggtcgaggcgctggacgcgggggaggagccacgcgtggtctggaatgtgctctgtgaccaaatggaggttccggactccaagcgttggggccacgatcataacgcgccgcccatgcccgccgtctgacactgcgggattacggagtcgctgaatcgtgaaattggcgatttcggcgtgttgcacgccaaattcgaacaaatgttcgtgtgtgtggttatagttattcacagtgacaagaagccgcatacgtgtgcacagggtgcttgtcatccgccataagccttaccgcagtaggtcttagggaggtcagatggccgagctcgggcaagctggaaccacaatggttggtttggattgcctcacatggcatgtccgtcatacggtggaggcatccgattcgcgcacgacttcgacaaggagaagatcatggcacttgagaccaagccggccaaggacccggcagccgaggacaagcacgagctcgatcccaagcgcaaggcggcgctggacaccgcgctggcgcaggttgagaagagctttggcaaaggttccgcaatgcgactgggcgaccagcccgagcagaacgtcgaggtgattcccaccggttcgttggccctcgatatggcgctcggcatcggcggcctgcccaagggccgcatcgtggagatctacggccccgaatcatccggtaagaccacgctcgcattgcatgtggtggccaatgcccagaagaagggcggcgtggcggcctacatcgatgccgaacacgcactcgacccggcctacgcccgcaagctcggcgtggacaccgactcactcatcgtctcccagccggataacggcgagcaggccctcgaaatcgccgacatgctgattcgctccggtgcacttgacgtcatcgtcatcgactcggtcgccgccctagtgccgaaggccgaaatcgaaggcgaaatgggagacagccatgttggtttgcaggcccgactcatgagtcaggcgctgcgcaagatgaccggcgcgttggctcaggccggcaccaccgccatcttcatcaaccagctgcgtgaaaagatcggcgtgttcttcggcaatcccgaaaccaccaccggcggcaaggccctgaagttctatgcctccgtgcgtctcgacattcgtcgtattcaaaccctgaagaatggcgacgaagcggtgggcaaccgcacgcgcgtcaaggtggtcaagaacaagatggccccgcctttcaagtccgccgaattcgacatgctctacggtgaaggcatttcccgtgagggctcggtaatcgacatggctcagcaggttggcgtggtcaagaagtccggttcgtggttcacctatgagggtgatcagctcggtcagggacgcgagaaggttcgtcagttccttaaggacaacccggccatcaccgaggagattgagaataaggtcaaggccgagttcggtctgatcggttccgccgaccagttcgcggaagatagcgaagccgcagcagcggccgctgtcagcgaggccgccgctgccgacgtggccaaggacagcaaggccgcagcggcgcctgctgccaaaacgacccgtgccaaggccggcgcagctaaggcctgaacatgattagtgccgaagcattcttgc

SEQ ID NO: 3481 - DNA, 11292 bp, Unknown
  R85_18m  MAG No. k141_4386
atcattgactataaagaagtagtacaaacacgctcttgagttctcaaaccaccaccacaccagcaagacaggaaaccaaccagaagaaggaacccgccgcgctgagcggcaacaggtgaataacttacacgcaaccacgccacaacgcaaatcaaagcgcacaagaacccaaggaatcggcataacagcgcggttccttcggcgtgtcgcacagagcccaatttgctctgatagggctagcgtaacccctcgaatgtttccggaaaacatcgaatccattattcggctggcgtgtcgcacgagttttcggactgtcagctccatgttcatcgttcggcaaccacaccaccggcgcacaatcaatgcatggcaacaacgctccatcatcggatttcgttcatgaatcacgggtatacctgtagttatgaccaagaagattgctgtattaaccggggcgggcatttccacgtccgctggcatccctgatttccgcggtccagacggtgtgtggaccaagcatcctgaccaaatgagcgtttacgacatcgatctgtttctgcgtaacaaagaagaccgtgagtactcctggcgctggcagaaggaatcaccagtatggaacgcacagcccggcaccgcgcataaggcgctggtcaagctggaacaagccggcatgttgacgctgctggccacgcagaacttcgatgcgctgcatgagaaggccggcaacagcgacagcgtcatcgtgaacctgcacggcaccatcggcacctcgcattgcatgaagtgccatcaggaatatgccacggcggacatcatggcccgtttggatgaagaacccgatccacattgccatcgcaaactgaagtatcgcggcgatatgccatgcaatggcattatcaaaactgatgtggtgtatttcggtgaggcgctgccggacggagcgatggagaagtcgtacagcttggccaccaaagccgacgaactatgggtaatcggatcgacccttgaggtgtacccggcagcgagcattgtgccggtggccgcgcaggcgggcgtgcccatcaccatcatgaatatgggtcacacgcaatatgaccatcttgcgagccgcttgattcatgaggatatcgccgtcgcgctgccgaagttggtggacgagacgattgcggagaacaagtagtcctcggcataacgaaagcgccggtgggtggttaagcaactgatgattgttggttaaccacccaccggcgctttcgcgccacctcccgctagcgggagatattggagcacacttctgcgcggcctcccgccagcggtattggaatcagtagatgcgcttgggctggaatccagcttccctgagtgccacgaggatgcggtcgatgtgctcggggccgttggtctcgaccgtgacgccgagagacaccgcgttggtgtagtggccggatgccttgaactggtcgtggtcaagctgaatgacgttggcgcgctgctcggcaagcagggtggccaccttgacgagctggcccggagtatccggcagctcgacctcgaagttcatgatgcgaccgcgggcgatcatacctttctgaatcaccgcacccatggtcacggtgtcgatattgccgccggacataatcggcaccaccacgtgcgggccggtggcggcggcgaacttgcgcgaacgcaggttcaggtgttccagcgcggccagcgaaacggcgccggccgcctcgaccaccagcttgtgcttctcgagcatgagcagaatcatttcgttgatgtcgcgctcggtgacggtgaccagatcgtccaggaactcgttgatcagcgcaaacggcagatcgccgggatgcttgaccgcgacgccctcggcggaggtgaccacatggtcagccggagacacacgacccgcggccagcgagtccttccaggccggggagccctccggaatcgcaccgattacgcgcacttcaggcttgaacgtcttgatggcgagcgccacgccggcacccaagccaccaccaccgagcggcacgaccacgtcagtgacgttcggcacgtcttcgaggatctccagaccgatggtgccttggccgcagatgacttcgtaatcgtcgaacggcggcacgtaaatcatgccttccttgtcggcgagctcagcagcgtgggcggcggattcgtcgaacacatcgccgtacagcaccacatcggcgccgtaggccttggtggcatcgaccttcagcggcggggtgatctgcggcatgcagatggtggccttcgcaccacgctcacgggccgcataggccacgccctgggcatggttgcctgcggatgcggtgacgatgccacgggcgatctgctcttcggtgagcgatgcgatcttgttgtacgcgccgcgaatcttgaaggaaccggtgacctgcaggttttccggcttcaggagaatctcatgaccggtcatctcgctcaataccggcgaagggataatttccgtatgacgggcagtccctttgagtcgtccggcggccaacttcagttcggctgcatgatcacgctgcagcgccttcaaaacatccttttgttccatagcttttaattgtatggcgcggggacaccgaaaacagtggcttatctcgctaacgagcgctcatttacggtaattcccgttcgtaatcagctttcgaggggctgatttggcttcgcggggaggtctatctcctcttcgaggggctgcccgatcgtgcaatgcgtgagtatgacacatcatttgcagcggtattatgcggttttcggagcccggctattcaggcaccaaccccctgaaacggagatagacctccccgcgaagccaaatcagccccttgaaatggagataccgcctagcaacacttataggctgacgacgacgccctcccatggtgcaagctcacggccggcaagagcggccacagcgtgcggggcatcatacgtgctgattaccacgttcgactcggcaaggccatcggccactgccaacagttcggcggtttcgcgcggtagatcaacggttcggccggacatgttgaccacgaccagcagcttctcatcgccgagggtgcgggtgaaggcgtagacatgcgcgtcatccgcatcgagcagatgccagtcgccggccgccacgacaggcatgtcgtggcgcagcgcgatgagctgcttgtagaaggcatacaccgaatccggatcgtcgaattcgccggccgcgttgatcgccgcatggttgggattgacggagatccatggctccttagcggcatccggcgcagtgaaaccggcatagacagagccgtcccattgcatcggggtacgcgaattatcacgaccgcgcgcggcgatacccgccaacatcgattcgggcgactgcactttggcttcctcaaccctttgacggtaagcgttcagggactcgaggtcacggtactggtctaggcgcgtgaagtgggcgtcggtcatgcctagctcttcgccctgatatatgtacggggtgccgcgatgcatgtgcagcatcaggccaagtgccttggccgaacgcacacgagattcctccgaggagtcatcaccccaacgagaaacgacgcgaggctggtcgtggttaccagtaaacaggcttgcccagcctgcattcttcacggccgcttgataaccggccataatgctcttgagcttcggcaggtcaagtggcagtggcttccatttgacgccttcgcagtcaaaatcaacgtgctcgaataggaagagcatgtccagctcgccgttggcggggtcggtgatgtattcgttgcgctgtgcggtaacgccgggagcctcgcccacggtgaggaagccctcacggccttcgaacacttcacggcgcatttcggccaggaattcgtcttggcgagggccgtccgcgcagaacggattcgggttggaatagccttcctcacccacgggcagatcgtccagctcggaaccgtactcgccgggcagcttgccagacaggtccgtgcgcttggaaatcagcgtaatcacatccatgcggaagccgtcaacgccgcggtcaagccaccagttcatcatgtcgtataccgcgcggcgcacagccggattttcccagttgaggtccggctgcttcttcgagaactgatgcaggtagtattcgccacgctcagggcaatactcccatgcagaaccgccaaagtaggagccccactggttgggctcggcaccgggctcgccggcagtggtgccgggacgggcgggacgccaccaataccagtcggcgtgctcatcatccttgtttttggacgcttcaaaccaggcgtgttcatcggaagtgtgattgacaacaagatccatcacgatcttgagcccgcgcttgtgggcctcggccagcagctcatccatgtcgtcgagtgtgccgaacagaggatcaatgtcctgatagtcggaaatatcgtagccattgtcgtcttgctgagacttgtataccggggatagccacagcacatccacgccgaggtcggccagatagtcgagccgtgacgtaatgcccttgagatcgccgaggccgtcgccgttggtgtcttggaaggaacgcgggtaaatctggtaaacgaccgcattggaccaccacggatttggggtggcaccgttggtgcggatggaatctggaattactgtgcgttgtgaagtggtcatcgttggctcctccattatttatggtctacattgcctgttgctcatagtctaaaaagcgctgaattacatttccattggggaactgcgttggtgtgccggaaacaaaaaccgcaaagagccggaaggcactgctacggctcaattctcataagctgcacatgctatttagcaacatatgggccctttcgctgtttgtggtgggtgactgtgccgtggggtgatgttggtcgggtaggttggaggcatggatgcctctcacctgttcaccgccgcgcttcggctgcggtcgccttggagggtcgggtctgcggacttccgtgacgccgacggcgacgggcgggagccgcacatcacgatcggcttcgagcccggcagagggttcatgctcctgttcgaggcgtgggtgtggctatatcgcctgtgctcgtggatgatgcactcgaggctcgaacctatgaaggagctcgcccgcttgttccgccgccataatctacctgacctgcggcagctcacatattaacggttcttctgattgcgacgcgcaagagcaacttcgggcgcgcttggattgcctgcttgaacccactggtgcggggatagatgatttagttgacacgcctgcgggaatctggtggggatttcgctggcacaccggatttcaagcaaaccccgcctcgggaaccgctccggacttcggcgttggcccggttcgtatgtcaatcgattgccgtctgaaccgggacagaatccgctgtcccggttcgcgatttttgtccttttttacaaacagggacaagccaatctccgcagttcatatgctccgtaatacaaaatcggcggaatagagccgatcccggaatcaacatgttgtcccggttttcacataaaacgattgacattcataccgggacaatgaaaattgtcccggttcgtgaaaatcgcccgaaaccgcgaaccgggacagcggattctgtcccggttcgcgcgtcaaacggttgatatgtggaccgggacaagccagtggcacggcgacacagcagatgcgctcaattgcaccgtaagccgtacggtttcgtcactttttcattcgcacaacgagcaaaaccacatgacctttgtgcgccaccgccacatcaaccgaccgtcgcctttattgtggcggtttccagtatggcaacaggacagaaaagcctcctccggtgagagccggaggaggcttgggtggaagcggacctttacttcacagagtcctgcaattcaggactggcctacggccagacccaacatgacctcgcgagtacgcgacctatccggccgcccgggccgggaaacagcccacggggctgtttccttaatcggctcgtctcgctcgacgcggtgaagtaaagcagcgcctgcgctgttttacttgaccgctcccctcatcacaccaccgacgacccacttttgggcgaagatgtagacgatgaggatcggggccatggccatcaggtagctggagaaggccatcgggtagttggtggcgaactgcgagctgaagacgtactgggcgagcgggatggtctggttcgactggtcggtcagaatgatcaacggcaggaggaagtcgttccaggcccacagcgcggtcagaatggcgatggtggcgttaatcgggctcatcagcgggaagatgatggtccagaaaatgcgccacgtggatgcgccatcgatgcgggccgcctcttccagcgaaaccggaatcgaacggatgaagccagtggcgatgaacaggttcgtgcccaggccgagcaccgtgtacaggatgatcaggccgacctggttgtccaggtgcagggagcccatctgcttcgcaatcggcagcatgacgaccgggaacggcacgaacatggcggcgatgaagaagtagtacaggaagcggaagaagcgcttatccatgttgcgggccacagcgtaggccacgaaggtgttggtcagcaaggtgagcaccacggcggccaccgtgatgatcgcggagttgagcgcggccttcgggtagttgaccttggcggaggcgtcggcgaagttgtgccactgccacgaggtgggcagggcgaaggtgccggcttcggccggagtcttcagcgcggtgacgatggtgaagtagagcgggatcagaatggtcaggctcagcacggccacggcggcggtcagccaccagttgatcttgtggtccctgcggaacttggcgggcttgccggacttggacggggtaactgttgcagtagtcatttcttatcctcccctaaatcagatctgttcctggctgcgggagatgcgcagctgtacgaaggcgatgatcgccagcacgatgaagaagagcacggcgtttgcggtctggtaggcgtactcgccaccggtcaggccacccttccagatgaggtaggtgacggtttcggtggaggagttcggaccgccctcggtcaaggcgacgacctgatcgaaggtgccgagcgcgttcttcatggacagcacgaggttgatggtgaagaacggtccgatcagcgggaaggtgatcttccagaacttctgccagggattgacgccgtcgatggcggcggcctcgtagatttcgtcgtcgatggtctgcagaccagcgaggtagatgagcaccgagtaggcgatgccctgccagacggcgaggaaaacgatcgggatccagctgagctgctcattggtcagcagcgaggtggacagccacttgatgccgagtgccttgccaagttcgggcaacgggttcatgaagatgtacttgaacacgtagccgatgaccagcacggagagggtgtagggaatgaagaagatggcacggaagccgtttttgaaggcgatcttcgagttcagcatcaccgataggaacagggcgatcacattgatcagcactgtgatgagaatggcgatgaagaatgtgaacaggtaggcgtggcccacacggttgtcttgaaagagagcgatgtagttcttcaggccgatgaacttgtagtcgccgtatccctgcgaattggtgaaggaatactttacgccgtcaagaaatggcaggtagaggaagaaggcgaaaatgatggccgccggaaccgccatccagtagtaggcgggatccactttgcgggtagagaaggcggaaaccttcttcttggcgggtttcttggcagcggacttagcggccggagcagcggtcttagttgcagttgcgtgtgacatgatgttctcctctcctaccgatcactcgaaggtcctggcttggaccttgtcccattcggtctgcatctggttcaggaagcggtcggtgttgccggaggtcaccatggtctgcaggtagccgccgatattgatggacgaaggaatgtagtgatcgcagaagtcggccactcggttttcctcgaagaacgggcgcacagtttccagcgcctcattgccgaagtaggtgtccttgagcggggtgatggcggactgcgcatcggcgtaggcgtcgagctgatccttctgcatgaggaattcgacgagtttcatcgattcttcggggtacttggtgtttgcgccgatggtcagcatcacatcgtcgcctgcggtgaggatctgttcgctggcgtcatcggtggccggcatctgggcgaaaccaagttcaatgtccgggttgatgagcaggatctgtggaatggcgtaggtaccgagcggaatgattgcggccttgccttgggcgaagttctgcgtgccctgctggtaggtgacgccagtatcggcagtggagtaggtgaagagttcggattccttctcgactgcggttttccacagttcctggaatgtggtcttgccttgcttgagctcggtgtacttcggctcgggaaccagcgtaccggtcagcgaggcgagcggggcctgggtggtccaggcgtcggccactgtgccctgcaacggattgatgccggcgtccttgaaggtgttgagcatgtcggtgaactcggcccacgtggtcggtgggttctccgggtcgagacctaccttgcggaacagcgccttgttgtagatgtaaccggaggcgttgccggcaaagggcagaccatacaggcgcttcttggaggaatcggtggtctgcaccaggtttttggcgatctgcaccatgccggggttgagggtgtccacgatgggctcgtcggtgaagtcgtagaaaacaccggatgcggcgaagttgccgaagctgatgtcgccgttgaaggtgattacgtccggcacgcggttcttgacgaagcgggtgcgtagatcggtctgggcgttggcagagttgttgatgttgaccttgatggtcgggttctgcttttcgaagtcggcgaccatggatttgaactggtcggcggcctcggacttgaactggaagaaatccagcgtaacggtacctgcggtgctcgatccgcagcctgccagaccgaagccgacggcgatagcgcacaccacagcagcagtgcgcacggccagacgcttcagtctaggcgttgaatgtggggaatcggacagcatattgttgactcctttatctcttgccttccggcttcagcgccggcggctcttccactttcaaaagtaacgatttcgccatttcattcccagcgccagcgagcccaattgcgtaagaaacaaaaagcgcggtattttgtgattaacgcaataaataatgcaaagggggcttaagcatgtctgacgccaatgcgattccgcaatggttttccggatccgagcatacgcatcgcgtggcggcagccatcgcccaatatgggccgattgcgcgcaccacattggcacagatgctgggattgagccagggtgcgctctcccgcattaccagcgatttgatttatgccggagtcatcgaagaactgccggctgtggccggaactacaggtaagctgcctgaacggtttactcccaaggagagctcggatcgtcgcggccggccgcagaccgcattggtattatgctcgaacgcacgcaccttcgtaggcgtcaaagtgcacggcacatccattgtgtcggccgccgtgaacgcgcatggcgaggtggtttccggccggcatgagataccaattggtgctgatcagtcggcagaatatgtgacatcgtcgatagccacgctggttcgtgaatgctctgatgatgtcgccgccaccggcctgcccgctcccactgccgtgggcgtagcggtcggaggtcacgtgatcgatgattccatcgtcacgttcgccccattcctgcactgggagggcaccacagatttaggcgcaatggtgtacgaggccaccggattgccatgtggcgtattcaacgatatcgattcgctgctggtggatgcctcctggttcgggccgggagtgggcgtggatacgttcgccgtagtgaccatcggcgtgggcgtgggctattcgctggctgtgcatggcgaaccggtcagttacccggacaagagttttggcctagtggggcatgtgctcatcgacccggagggcccgcgctgccccagtgggcatatcgggtgttcgcaatgcctgactgacgattcgattgcggaacagtattcggcgatcatcggccgcgcagtgaccttcgatgattttgcgcacgatgccagagcccatgtgccgcaggcctcccagctagtgcaccgcacttgcttccgattgggatcgctggtggccaccgtggcgaacatcgctatgccggggcatgtaatgatcgccggcgaatcggcatttttggcgaagcttggtaccgattcgctgcgtgacggcatccgcttctatcggcatagccaaactcaaccggtgaagttcacgattatggatcacgactggcagctctgggccaaagccgctgccagccgtgtaatcgtgaagcatattgggtaggtcactccgccacagctttgaacagtactgcctgctgagggtggagggacgggggacggatgccgtagcgctgcagggcttcgccggtcaggactacgccttcttcgttccaccaaccgagggtgctttgaccattggtcagaccttcgaggtccaggcttgggtcgagcgggctaatgcgatacttgcgcttggggtcaaggccaggcagatgcacgggagcggcaggataggtctggctggtggtcagttgggtgaagcggtagatggctgcgtcacgattcggcatcaccatgccatcgaggcgtacagccggatcgttggaatcggcgtgcacgcaggtatcgatggcgaaccaatcgcgatgcttcttgaactcggccacccatacggccaattcggcgagcgcatcatccggctccttcaacaggttccattcgatgcccatatggccgaagaacgccatggccatgcgcagctcctggctggtggcgcgctgcgtggagtgtgcagggctggcgcccacgtgttcgcccatcatcgcgggcggcacgagcagtgatgtgtaacgctggatgtccgcgcgctcgaccggatccacgcaatcggacacccagatacggtcggcgtattcgaggat

SEQ ID NO: 3482 - DNA, 23909 bp, Unknown
  R85_18m  MAG No. k141_4635
cacgcgcgacttctccgaagtgttcgcgcttggccactgggagtatggcaagtacacgcttgccgaggaatacgagcgcgacatggccaaggggctgaccaacgtgccgttcccccggaactacttcccgcatgacgatccgaagctggaaccgttgttcgtctggcgtgcccacgccaatctgctgtggcgcaactggctcaactgggtgtaccagaccacgccgtacgacctgaccgaggtgccgcagctcagggctgagaagaagctgggtaccgaccgttcgattcggcatgagccgggcgggccacgtgaggatgacttcaagccgtttgttcatgacggatacggggttattcagggctgagcgttcgcaccgtggacggcaatccgtccacgatacggacaacctgatgaacataatgccacacatccgccatatgcgaccaatagcgcgcgaagccggcgaaacgcccgggaaagccttgcgccagtaggcctcggaaaagactcgccggtgtaatattgactttgtctagacgcaggcaaataatcactcttcagtcattcggagccgaatgcccagcgcagactccgtgtccacgcccggcaggctccacaccgaggagacgaaaaagacgaaagtaacgagcacgtcacatttgcctgcccggtgggtttaaactgacacctgacattgaaaaagcaggaggcgtgatatggtcggttcgctcggcgcaggattgctgttggctgacgaggcaggcgctcatctgccctcggtcaacgacttccttcccccggagattctgttccagggaactccgtttgctatcaaccgcattattttgattcgtatcgtggcaaccatcgtgctgttggtggtgctcggcgtgaccgcaaagcgcgccaagctcatccccggccgttggcagggcgtggtggaatacggtcttgacttcgtgcgtgacaaggtcgtctatgacgtgatgggcgaggttcgcggcaagcgctacgtgccgatgatcaccaccatcttcttcacgattttcatcttcaacctgtgtggcatcatcccgggtatgaacatggcggccaccgccactgtggtcatgccgctggtgttcgccatctggaccatggtccagtattggatcgccgccgcacgttcgcaaggtcttggccattatctgcgtcacgagctgttcacccccggtgtgccgtggccggtctacatcctgttgaccccgattaacatccttgagttgctggtcatccgtccggcctccctgaccatccgtctgttcgccaacatgatttccggccacctgatggtcgccacctgcctggcattcgcacagtactggatcgtcgatgcagccaacaagctgcaaggcatcccagtcggcgcgatgtggttcgtcagcggtcttgccatgacgtgcttcgaggcgttcgtcgccttcctgcaggcttacgtcttcgccattctttccaccgtgtacatcaacctaagcttcccggaggagtgaggttcaaccccctctttcggaacccggcctcgcctaggtaggcaggaccgaacgaaataagatttataacgtcgccaagtacgttagaaaggaaacacaatggatatcatcaccctcgcagcggtcgccggcaacctgtccgtcatcggttacggtctcggtgcggttggccctggcatcggtctgggcatcctcttcggcaaggccatggaatccaccgctcgtcagcctgagatgtccggcaagattcagaccatcatgttcatcggcctggctctgatcgaggtgctggcactgatcggcttcgttaccgccctgatgttccactgatcgaacgttttctcagtcgaatacagaaggcaaaacgaatccaccagtgaaaggaggacttcataatgacgctcgcagaaggcggaattgatctgttcattcccgagacctatgacattgtgtggtccctgatcattcttgtcatcgttgcggtgttcttctacaagttcttcatgccgaagttcaatgcgatcttcgacgagcgcgccgccaagattgaaggcaacatcgccaaggcggagcaggccaagaaggatgcggacgaagccaaggccaagtatgaggcccagctgagcaccgcccgtgtggacgccgccaagattcgcgacgacgcccgcgcagaagcgtcccacatcatcgccgacgctcgttcccgcgccgagtccgatgcggcccagatcaccgcatccgcacagcgctcgatcgaatcccagcagcagcaggccatcgtctcgctcaagggcgaggtcggtgctcttgccaccgcgcttgccggcaagattctcggtgccaagctggaagacagcgacgtgcagtcctcgatgatcgattcgatgatcgacgacctgggcgccaagaagtgaccgtgaccatccgtaaccagaaagggaggtgaccatgcgaggagaggcatcacgtattgcagaccgcgagtcgcgtgattcgctggccccgaaactgcgcgacacccgtgaggacgcgtggcggatcggcaacgaactgttcacgatcaccaaggtgctcgatgacagcattcagctggaacgcgcactgaccgacccgtcccgcccggtcgccgacaaggtggccgtcctgaagggactgctcggtgacaacgcgcatcctatgaccatggagatcatgaccgacttggtctcccgccgttggagccgtgcgcgcgacatcgccaacgcggtggaggacttcggcgtggacgccatgatgtactacgctgacgccaccgacgccacgctgcaggtatccatcgagctgtccgagctgcattccgcactgctgaacctgccggtcgtccgctccaagctgtacgactgccaggccaccagcgaggcccgtgtgaagctgttccgcgaggtgttctccggcaagaccctgaacaaggtcaccatgaggctcgccgaacacgccacctgcaacctgcgccgccgccgctacttggagaccatccagtggctgatcaacaagttctcccgccacatgggcgagtcgatggtcaccgtgaccaccgccaccccgctgaagaaggagcagattgagcgactggtcgaggtctactccgccaaggtgggccgccaggtgcacatcaactcggtggtcgatccgaccgtactgggtggcatgcgcattcaggtgggcgacgaagtcacggacaacaccgtggtcgcacagctgcagaacctgcatcgcaaggtgcagacggaggcgactccggcctgaccggccgagccaatccgtccaacaccacacacaagcaaagacttgactgaacaataaccaatagaaggagtgatcatggcagaactgaccatcgatcccgcctcgattcgcaaggccctcgacgacttcgtgtcgtcgtacaagccgagcgacacccccacccaggaagtgggctatgtcgccacggccggtgacggcattgcgcacgtgacgggattgcctggttgcatggccaatgagctgctgacgttcgaagacggcacgctcggcctggcgttcaaccttgacgcccgtgagatcggcgtggtggtcctcggcgatttcgcaggaattgaggaaggccaggaagtgcgacgcaccggcgaagtgctctccgtgcccgtcggcgacggctatctcggccgtgtcgtggacccgctgggcaagccgatcgacggcctcggcgagatccagggcattgagggtcgtcgtatcctcgaagcccaggcccccgacgtgatgcaccgccacccggtcgacgagccgctgtccaccggcctcaaggccatcgacgcgatgaccccgatcggccgcggccagcgccagctcatcatcggcgaccgccagaccggtaagaccgccatcgcgatcgataccatcatcaaccagaaggccaactgggaatccggcgacccgaagaagcaggtccgctgcatctacgtggccatcggccagaagggctccaccatcgcctcggtgaagcagagcctggaagacgccggcgccatggagtacaccaccatcgtggcctccccggcagccgattccgctggcttcaagtacatcgccccgtacaccggctcggccatcggccagcactggatgtacaacggcaagcatgtgctcatcgtcttcgatgacttgtccaagcaggcagaggcctatcgttcgatttccctgctgctgcgccgcccgccggggcgtgaagcctacccgggtgatgtgttctacctgcactcccgcctgctcgaacgttgcgccaaggtctccgatgatctcggcggcggttcgatgacgggtctgccgatcgtcgagaccaaggcgaacgatgtgtccgcctacatcccgaccaacgtgatctccatcactgacggccagatcttcctgcagtccgatctgttcaacgccaaccagcgccccgccgtggacgtcggtatctccgtctctcgagtcggtggcgccgcacagaccaaggctctgaagaaggtctccggtacgctgaagatctccctggcacagtaccgttcgctggaatccttcgccatgttcgcctccgatctggatgcggcatccaaggcccagctgacccgtggtgctcacctgaccgagctgttgaagcagccgcagttccacccgtactcgccggaacaggaagtcgtgtccgtatggaccggcacccacggcaagctcgacgacctcgacctgaaggacgtccttccgttcgagcagggactgctggactacatcgaccacaacaccgatatcctcaagaccattcgcgagaccgaggaattcaccgccgacaccgaggctgccctcgataaggccgtggacgagttccgttcgacgttcgtctcttccgccggcaagccgctggtcgagaagaagccggacgttgacaaggccgcgccggttgatcaggaaaagatcgtggcgggagaaaagtaagccatgggctcgcaactcgcattgaaatcacgcatccactccaccgagtcgttggcgaagatcttcaacgctcaggagatgatcgcgtcttcgcatatcgccaaggcccgtgatgtggccctgaacgcgaagccgtacaccgatgcgattttcgatgccgtgcaagcgttggtggcccacacccatatcacgcatccgatcgcggtgaaggacgagaagaacccgcgcgtggctgttctcgccctcacctcggatcgtggtatggccggcccgtacacctcttcgattatccgtgaaacggagtcgctgctgtcccgcctcgatgcggcaggcaagcagccggagctgttcgtgtacgggcgtcgcggttcgacgtactacaagtaccgtaatcgtgacatcgcggcgacgtgggaaggcgacaccgaccagcccggcgtggaaattgctgaaacgatctccaacactttgatggatgcctacatgaagccggctgagaaaggtggagtttccgaactctacatcgtctacaccgagttcatcaacatggtggtgcaaaaggtgcgcgtgctgcgcatgctgccggtcgaaatcgtgaaaaacgagaccaaggtgcccgatcctgatgaagaggcaccggctactgcggatgtcgctccgctgtacactttcgagcccagcctcgaaaaggtactggacgcgattctgccgaagtacattcagtcccgcatccacgagtgcctgctgaccgcggccgcgtcggaaaccgcaagccgccagaacgccatgcacacggcaaccgacaacgcacgaaacctgatcgacgaccttacgcgcaagctcaacgcttcccgtcaggcctcgatcacccaggaacttaccgaaattatcggcagcgctgacgcgctgaccaagaaggaagagtaggaacgcatatggctgacaaccagaccactgcggccgagcctaccaacggtcgcgtcacccgcgtccagggctcggttatcgacgttgaattcccggtgggtcatctgcccgacatctacaacgccctgaaagtaacgatcgtcaacaccggcgccaaggaagaaggcgaggcgaaggagaccgagatcaccctcgaggtcgaacagcacctcggtgattccacggtccgttgcgtcgctctgaagcccaccgacggcctggtccgtggtgcctccgtctccgacaccggcgccccgatctccgtgccggtcggcgacgtgaccaagggccacgtcttcgacgtgtccggtaacatcctcaacaagaagccggatgagaccatcaccgtctccgagcgttggcctatccaccgcaacccgccggccttcgatcagctggagtccaagacccagatgttcgaaacgggcatcaaggtcatcgacctgctgaccccgtacgtgcagggcggcaagatcggtctgttcggtggtgcaggtgtgggcaagaccgtgctgattcaggaaatgattcagcgcgtggctcagaaccacggtggcgtgtccgtgttcgcgggcgtcggcgagcgtacccgtgagggtaacgatctgatcggcgaaatggccgaggccggcgtgcttgagaagaccgcactggtcttcggccagatggatgagcagccgggtacccgtctgcgtgtcccgctgaccgcactgaccatggcagagtacttccgtgacgtgcagaaccaggacgtgctgctgttcatcgacaacatcttccgcttcacccaggccggttccgaggtgtccaccctgctgggtcgtatgccttccgccgtgggttaccagccgaacctggccgatgagatgggttccctccaggagcgcatcacctcgacccgtggtcactcgatcacctcgctgcaggccatctacgtgccggccgatgattacaccgacccggccccggccacgaccttcgcccacttggatgcaaccaccgagctgtctcgtgacattgcctccaagggtatctacccggctgtggacccgctgagctccacctcgcgaatcctcgatccgcgttacgtgggccaggctcactacgactgtgccaaccgcgtcaaggcgattctgcagcgtaacaaggagctgcaggacatcatcgccctgatcggtatcgacgagctcggcgaagaggacaagaccaccgtgaaccgcgctcgtaagatcgagcagttcctcggccagaacttctacgttgccgagaagttcaccggtcgccccggctcctacgtgccggccgacgagaccatcgaagccttcacccgcatctgcgacggcgtgtacgacgacgtcccggagcaggcgttctccggtatcggcggcatcgatgatctcgaagagaagtggcacaacatgcagaaggaactgggtgcgtgatggctgcggaaaaaaccacgatgaaggtcaacatcgtcgccgctgaccaccctgtgtggcacggcgaggcgacgagcgtgaccattcccgcctctgagggcggcatgggcatcctgcccgaccatgagcctgtgctcacggtgatcaagcagggtacgctcaccgtggttgagcccgatggcgatcgccacatgttcgaggtgaccgacggattcatctccttcgactcgaacaaactcaccgtggcggtcgagcgcggccacgacgtccagtactccggcaccgccgagtgatctgaaccaactcctcaaggggctctctggttttccagagagccccttttgctatgtatgccatgtgttgcgctacagtggtggcctatgcgagttattgttgccgactgttcggccgagtattcgggccgcctcaacgcctcactgcccctggccaagcgtgtattgctgatcaaggctgattccagcctgttgattttctccgaattgggctcctacaagccgctgaactggatgaccgcgccctgcacgattcgtgagatcgacccagccgccaaatccgcgcaacattcccgggaaagtgtcgctggtggggctgtggatggtgattccgcgacgcattccccggaaagtgtcgccgctggtgagccggaaaaggtgctacgtgtcagcgccgacaagggctctgacattcttgaagtgacgctgcaacacatctattccgaccaaacctatgatctgggcgaagatccgggtctcatcaaggatggcgtggaagaccatctgcaacgctatctggccgagcagatcgagcgtatcggcaagggagccaagctggtgcgtcgcgaataccctaccgccattggtccggtggatatcatggccgtgaatgccgagggcgagcatgtggctgtggaaatcaaacgtcacggcggcattgatggcgtcgagcagctgactcgctactgcgaactgctcaatcgcgatccgctgctggccccggtgcatggcatcttcgccgcacaaaccatcacgccgcaagcccaggtcttggccaaggaccgcggcttcacctgcctcatcctcgattacgacgatatgaaaggcaccgaggacgacagtctcaggctgttctgattgttcttggcttccctcttgaaggggagttttcgaacgtacatagagagactgaggggaggcctcacggtatattccgtgaggcctcccctcagtcagtttcgctgccagctcccctcttggggagagccatcgagattgtttagtacgcggcgagaatatcgattacgaagaccaacgtggagttggcgggaatcgaaccttgctccttatctccataggcctgatccggcggaatcaccagcagaacctgagagccgacggtctggccgaccagacccttctgccagccctcgataacctgatgctggccgctggaatcgctgaacagatcggcgtcgattgtggaatcgcgatcccaggacgaatcgaactgcttgccatccgtaagccaaccggtgtacttgaccaccacggtgttcttgtcggtcagcttggcgccgttacccttgatcagcgtctgcgagatcagcgaatcaaccgaaccctgaccgttcatgtcaatggacggcttgccattcttggctcgcgtcaccttcggcagattggccggcacatccttgacttcctcgccagtggccttcttcaggtccttggacttggatacaaacgtcatcgccaaaatgtaagagtatccggacgaatcctgagcgttgacgccaaagccgatcgtggtgttgatcttggcacccttgatctggttgtagtaggtcgaggagagggtcttggaatccaccttcagcgagcaatccggcgtgttcttggtccaggtgtccatgagctcggtgccgtctttaacgttgagcgcgatgccttgggcgcagacgcggtcgccctcctcgatcacgtcgccatcgcccttttgcagcaccacataggagccgtcggacacggtcatcggcgtattaaaggagatggtcggcttctcgccgagcttgcccttggcggtcacgccggcaatttgccccttcttgtcagaagagtcggaagaggatttcgagtccgagctcgaactggagcaggcagccagcgatacgcacatcgccagcgagcaggcaagagcaacggccttgccgagaggggataacatagatttaacagacttacgcatgacacaccaccctactggtgaaccttgattttctgcgctcctaggtaataaacaggtgaagattgtagaatggttaagttatgagtgctgaagaacagactacaagaccggataagggcgccaagcgtccatcccgtcatgccaagatcatgcgtggagtggtgacgcctatcttcggtctattggccgtggcggctgtggtgttggggtacatgaatgccacgatatggaagccctccactgaaatcaccgcttccgcaaccatgagcggctcccggtatgccgtcactgatccgaatgtgctgaccttgttggatcagaacgccacgataaccgtggactcgggatcctctcaggacgaggcgtgcgtggcgttgggtccgtccaaggatgttgccggatgggtcgcgtccgagaagtcctatacccgtatcaccggattggcgtcatggagcgagctgagcacccagaagggaagcagcacgagtcagggagcgcctgccagtgccgatgacgcggtggcgttcaaggattccgatatgtggactgccgtgaaatgcggcaccgggtccgtttcgctggagagcaagaagaccggcgcctcgacggtggccattgtggatttgggtgaaaatgccaccaacgccaaggtgcagctgcactgggtgcgctccgaagtgccggactttgcgatgccgttctatctgtccggtggattgctggccgtgctggccgtattgtgcgcctccgtgttcgccatgccgccgcataagcgccgcaagcgcatggtggaaggcacggcaagcgccgtaattgaggaagaggcacccgccagcatcgcagtgtccgggaagccggatggtgcaagtcgacgtaatcgtcgccgccacgccacaaatcggcgttcgggccgtgcgtcctcgcaatctgaagccaccgaaacaccggttatcatcgacccaagttcacgtaacctggtcgccgaccagcagactggtgccgagagcggcgctgagaccggcttcagcgccggcgataacgaatcgacttcggtaatcacccctgacgaactgcaggcctacttctcccgcttggcccaagaggtcaataccggagacgactcggccgatgacggacaggaggaaagctgatgaacaagcgatggaacaaactgtgtgtggccgccctcgcctgcgtggcgttggtcgtgccgttgaccgcctgtgaaggccggctgccgacgccggctgctgatacctccaccaaggttgcgccggatttgaccgaggcacaggagaagaagattcgcctgaagattctcaagacgatcgatgaagccgatcaggccaagaatcccgatggatatgcggccgttatgggcgggccccagctggacattcgcatcagccagaccacgatcaaccagcgcggcggcggtatgtccaaatacgcgaccattcccaaggacatcgcccagacggtgattcccatggacgacggatggcctcgctcggtgttcaccatcacgaccaccaccgaagatcagcagtccaagcgtttgctggtcttcgatcaggaatccgcccggcagaattacaagctgatggccatggctcgactgtttgagggggccaagctgccgaagttcgagattccgactattggctcgcagatgggcactgcaaaggatgagaagctggtggccactcccgccgatgccttgacccaatacgccgatgtgctgcagaacggctccaagagccaatacgcttccaagttcgcagacgatttgctgcgccaggaactggccaataccacggccaaggtgcaggaaggtatgcaacgcaacaacggtacgcaggagcagaaattcaccgttgtgcctgaacagatgtgggtgatgcgtgctgcagacggtgccggtgatttggtggttggccgtattaacggcgaatggactcgcaaggcgggggatggccgcgaatcgcagccggcttccgacgacgagaaggcgctgttcaatagcgacaagtacaccagcaccatgaaggtcacgtatgtgaacgtggtggccttgtacattccgttggcaagctccggtgagcaaatcaccgccgtgggtgccgaccgtcagccggtaaaggtcgaagcgctgtagttgttgccgccgcccaccgcgcggttaacgccccaccacgatatgattcatccaccacgatgtcggtaagttttacctttcgcacaatggtgccgttttgagtcacatcgtggtgggcgttttgctacgtggtgggaatttcaccgcgtagtggaagaatccctacgtggtgggaatcggcattacaatcaatgtcagcaaatgtgattgttgttgtacgcgaatcgcgtggaatcgggaggcattatggcagagcagcagttcaatccgggagtctcattggcgggcgccgtcgatttggaggcgctgaagcatcaggtcaaggccgagcccggccaggcgggtggcgctcctgccgctggtgggtacgtgatcgacaccaccgaaaacaccttccaggcaatggtgcagacttctgcgaccttcccgatcctgctgctcctgtggataccgaccgatgaccgcctgttcccgatggcccgtgcgttgggcgacgcggtgaacgccctgaacggccagattcagctctcccgtatcgatatctcgtccaatccttcgattgcccaagcgttgcaggtgcagggcgcgcccgcactgttcgcgttgattgccggccgtccgatgccactgttgcagggccttccgggtgacgacgagctcaagcaacttaccgacgaggtgattccgaagatcattcaggccgccgcgcagtctggtgtgaacggtaccgcgccgtactcgggtgatcctgattccgatgccgccaagagcgctggtgccaccggtgccggcgtgggtgctgagcaggtgccgccggagcatgccgaagcccatcgtttggccgaggagggcgattacgccggtgccgccgccgaatacgagcgcgtgctcgaatccgacccgtccgatgcactggccgcccgcgaacgtgcgaaggcgctgttgctggcccgctccgggtccgctgatgtacgtgacgtgcgtgccgctgccgccgcagcgccggacgatgtggaagcgcagttggctgtggctgatatcgacatgatcggtggccagattcaagacgctttcgaccgtttgctggactttttggccgccgggcacaaggccgatatcgagccggttcgcaagcgtctgctcgaatacttcgccatccccgaacccaccgacccgcgtctggctcgcgcccgccgtcgcctagccaccctcatgtactgattggttttggctcccctctttgaggggagctgtcaggcgtagatgactgagggaagcgcgcgaacgtacttgattgattcccctaaaccatccgattcttcccgaaatactgctggaaccttggcccctccagcgccagttcctcctcgaaatcatccgcccacttgcagaacggacggttggcgagaccatcgttattgaatcgcgcctgatcggtgatttcggtgatgcagaatttcggaatcgtcagattggtaaccggcccggatcgttcggcctcggctacgatcagcggcgcgttcggcccgccgaacacgtccacgctccagccgtcttccgcaatccacacggaataccggttcttgatgattaccgagccgccgcgcttgatgagttcggcggcgatgcgcgtgtcgatctcgcgctcgacctcgtagcgcgtgccacccacggacggacctttgacggtgacatacgcttccgagaaccggtcgcggtactcgtccagcacagccaccggatttacgtcgggcgtcatgtcgacgtgaaccttgtgcgagaccagccgcacgcgcaaggcgtaattgtcggcatgcacgtagtagctctgaataatgagggtcggggcgtcgccgtcgtcgtattccgccggcagctcgcggcagaagaagcggcgttcgtattcgaagtcatctgtaggttccgacataacctcattgtagagccgatgatggcgattttctcgttattttggcgacgtatgtgcctcatgcagcgtgatgtggtgtacagtaaagaagttgctcgggtttgtagctcagtggatagagcgtctgtctccggaacagaaggtcgtgggttcgatccccatcaagcccaccagcatggctttcggctagccgccggaagccttttgcatattcggcgcgtgatattaagcgcgtgcaaagctggtgctggtgctggtgctggtgctggtgctggtgctggtgctggtgtcggggtcggtgatgccggctcgcttgggtcgtggaaaaaccgcccggtttggcgagaacggtagtcgaatcgtctggaatcgtctggaatagcaaggaatagtctgttgatggccgtatgccgggcatcatgcgcgctaaacgcgacttcgctcagtagactgctacgtaatcggcattgccaatcgttgctgatcgtgcgattggtcgtagccggtggtgatgtgtaccggcgccggccgcagcaggtgggcgcccccaagatgagaaggagcacaatatgagcgaaaagatggaagccgtagccacttccgaggcgccggccgcgctgggcgcatacagccaggcggtgaaggccaatggcttcgtgttcgtatccggccagctgggcattgatccggccaccggcgaactggcgggcgagaccgctggagagcaggctgcacaggcgctgaagaatattaagcacattctcgacactgccggtaccggcattgagcatgtgtgccgcgccaccatctacctgaagaacgtcgaggacttcaaggaagtggacgcacgttacgctgaggcgttcatcggctccgtcaagcccgcccgcgtggcctttggcaacaacatgattcccaagggtgcgctcgtggagattgacgccatcgcggtggagtgattcgaacgtttccccggcggcccgtctgcgcgcatggtgtgtgcagacgggccgccgcgtattgtgcgacgcattccggggaatgtttcgctgggcgtggggtgcgaggtgtggttccgcggcacattcccgggaatgttgcgctggaatcgttgggcggtggtccgtgccacaatagagaccatggcatccaaaggaaaaccgtcgccgcgttcggccgtaagcccgctgagtgatgagcaggtcaagcgtctggccgcccgccacacgcttgtggactcgacacagtattacccgaccggccctcgcacgcccaatcagccggaaatcgacgcccagaatcccaaggccaccaaacgactgctgggaggggtgtccattgtgttccgcgccagctgcaagaccaaggcctggggcttggaacaggtgccggaaaccggaccgttcatcaccgccgccagtcatatcaccatgtttgatgtgttcgtgccgatgatgagcctgttccacatgggccgccgcccccggtacatggccaaggccgagatggcgaagtggccattgatcggcaagtggttccggttggtcggcatgcagccggtgcagcgtcattcgggcaaggccaagcagatcgaagagacctcgattgatattctgacgtccggccgcccgctgacggtctggccggaaggcaccgtgacccgcgacccgaaaaagtgggtgatgagcattaaggagggcgtgggatacatcgcccttgaatcctcgcgcagactggggcatcaggtgccgctgtacccggcggtgacgtggggtgccgcctccatcaaccactggtggccatggccgcgcaaaaacgtggtgatgtgctatgaccatgcgctcgattactccgatctgcttgccgacatggactcatggggtgaagagccgcctgccgaggccgtgaacgagctgatgtggcgcgtgctcaaacgcatgaacacagtactggaggaaattcgtggcgagcagttccccgctgaaggctactgggactaccgcagcatgagtcgcaagccttggccggaagccggcggcccgttcccggctgagaagtagccgcaccggttcccgtacggggagcctaggcgagtagcatggcacaagattgtaccgatgaagttgcgcgacaagcgaaggtaggaatttgatatgggtaaaaatataacggttctcggtgcaggagcatggggtaccgctttcggccaagtgctggcggacgccggcaacacggtgaccatgtgggccaaggagcagcggattgtcgaggacattcgcgatcgccaccacaacgccgtgcgcctgccgtccgtcgaaaagttgccggacagcatgaccgccaccggggatcgcgccgaagccgtcaagaacgcggacatcgtggttgtggccatcgccgcgcagttcgcgcgagtggcactcgtcgaattcaagggactgattcccgatcacgccatcgtcgtcagcctgatgaagggcatcgagcgtggcaccaacaagcgtatggacgaagtcgtccgcgaatcccttgacctgccggccgaccggttcgccgccatttccggaccgaacctgtccaaggaaatcgccgatcgtcatcctgccgccaccgtggtggcttgtacgaacctcgataatgccacgaaggtggccgaggcatgtaccacctcctatttcaagccgttcgtgaccaccgacgtcatcggcctggaaatgtgcggcagcctgaagaacgtgaccgcgctggccgtgggcatggcccgtggtgccggctacggtgagaacaccgcagccatgatcgaaactcgtggactggccgaactgaccgcactgggcgtagccgctggcgccgatcccaagaccttcttcggcttggccggtgtgggtgatctcatcgccacctgtggctctccgctgtctcgtaactatacgttcggcgcgaatctcggcaagggattgacggtcgaggaggctaccaaggtcagcaacggtgtggccgaaggcgtgcccaccacggatgcggtggtggctcttggcgagcagcttgatgtgccgaccccgttggcgtatcagatgagccgcgtgctgaacgaaggcatttcctgctcggagatgcttgccggactgttcgggcacgaggttaccggcgaataacgagagaagcgacgtatacgtggcgtatacgttgtacgtgcaaagtcgtgtggcgtatacgtcgttgacgtgcgcgagtagactggtgtgcgtctcttgtgcgcggcggtccgagcgcggttcggtccggttggcggtgcaaagcataggcttgaaaacggttgtagtttcaataaaaggatggttatggccaagaagcgtgttgtggtgctctatggtgggcgtgcagacgagcattcgatttcctgcatctccactgccggtgtgctgggggccatggacactgaacggttcgagccgattccggtcggcatcaccaaggacggcaagtggatcatcaacggcgaagatcctcgtggctggaatctggatggcggcgagctgccgaccgtaaagatcaccccggaatcgcgcccggtgatgcttgacccctctcgcggccaggacggtttcttcatcggcgagacccgccacatcaattccgccgattccggcttcggcaccagcttcgtcagcatgtccgacccggaaatgcaccatgcgctgacctcccttggccatgtggacgcggtactgccggtgctgcacggcccctatggcgaggacggcacggttcaaggcctgctggaaatgatgggtgtgccgtacgtggggtgcggagtgtttgcttccgccgcctgcatggataagcattacaccaaggtggtgctgggtgccgccggcattcccaccgcgcccggtgtgacggtcgatgcgcgcaacttcaccgccgccgatgtgcttgccaagatcgaggacgccggtcttacctatccgctgttcatcaagccttcgcgcgcaggctccagcttcggtgtgaccaaggtcgagaaagccgatgaccgcgagacccagcaggatcgtctggccgccgccatcgccaccgccggcgagcacgattggaaggtgctcgtcgaacaggggattgatggtcgcgaaatcgaatgtgccgtgctgtgcccgaaggccggtgacgagcccgaggccagctggcccggcgaaatcgtgctcgatcatcagaacgacgaccagttctacgatttcgactccaagtacatggatgcctccgccagccacgtggaagtgccggccaatctgccggtcagcgtgcttgaggacgtgcgtgacgtggcccggcgtgcgttcaaggccgtggatggtgccggcttgagccgtgtggacaccttcgtgacgcctgatggcacggtgatggtcaacgaaatcaacaccatgcccggcttcacgccgatttctatgtatcccaaggcttgggatgccaccggagtgagctacaccgaactcatcacgcgattgattgagggcgtgctgaggtaagtgtggtgcggaatcggctgccaaggaagaaggcgcgctgaacgtcatcgccttgccgcatgattggtccaactacggcgaggtcatcgagggcttcaagaagaagtacccggagatcaagatcaccgagctgaacccgaacgcctcctccaaggaggagatcgacgccgccaagaccaacaagggtaccgacgccgcccccgatgtcttcgacgtcggccaggccatcgccgccacctccaccgactatttcgccccgtacaaggtgcaggcctggaacaagatccctgatgctgccaagaacgtcgacggcgcctactacgccgactacaccggcatcatgtccgtgggctggaacgccgacaagtacggcgatgtcgcctccctgaacgacctgctcgatccgaagttcgccggcaccgtgtccctgaacggcaagcctaccgaggccggcgcggccttcaacggctatctgatggtcaaccagctcgccggcggcgacatcaacaacctgcagcccggtctcgacttcttcaagaagctcaaggaagccggcaacctgaacaccatcgatgtgaccaacggcaccatcgactccggccagaccggcgtggtcttcgactggacctacaaccaggcctcctacaagaaggaactcaaggacaagggcgtgaactggaagtacaagaccttccccaaagcccaggtcgtcagctactacaaccaggccatcaacaaggacgcgccgcaccccgccgccgcacgcctgtgggaggaatacctgtacaccgccgaaacccagaacctgtggttcaagggcggcgccaacccggtgctgctcgactccatgaaggccgacggcaccgtcgaccaggccaccctgaaggacgccatcaccatcgaaggccagccggtcacctacagcaacgatgactccacccgcatcaccgagtggcttcaaaacaactgggacaagacgatcggcaactgagagtccacgatgaccgccgcaatcgcacccatcgcaccgaacggacccgccgcctccaaggccgcgggtccgtccgccgcatcgacccccgcttcgtccgcactggcgaagcaccgtcaggagcttggcacgctcgccaccacgctcccgttcttcgcctacaccgcctgcttcctgctggcacccaccgtgatcgtgatcatcggcgcgttccaggatcgcagcggcggtttcacgcttgcgaacttccacaagatgttcgaagccaacaccatcgccgcgttcggcacgtcaatcctggtgtccgtggcctcatccctgatcggtgccgtggtgggcgcgctcgcctcctacgcgctggtgatcggcgccaagccgaacggaccgctgcgccgtatggtcgccgccatctcatcggtgctcgcccagttcggcggcgtgatgctcgcgttcgcgttcatcgccactcttggcatcaacggcatcggcaccatgctcatcaaaaccctgactggctataccgtgaacccgaattggctcagctccctgccggggctggtgaccgtctactgctacttccagattccgctgatgatcatcatcttcctgcctgcggtcgattccattcgtccacagtggcgcgaagcctgcgagtcgctcggcggcaacaccgtccaatactggacgcgcgtggcctgcccgatcctcgcaccccgcttcatctcggcgttcctgctgttgttcgcctccgcgttctccgcatacgcgaccgccgcagccctgttctcgcagcgctcgattctggtgccgttgatgatccaaggtgccatgcgcaatgagatggaccccaaccagcagggcttcgcgcaggtgctggcattcgcaatgatcatcgtcgtggccatcgtcatgctgctgagccacgccgtggaaaagagggccggacgttggcaatgaccgaaacttccacaaccaagccgccgcagctgcgtgccgcccgcgtgcgcaaacagagcatcatcaaattcgtgatcctgttcgtcaccctggcgttcctgttcgtgccgctgctggccatgttcatcttcaccctgcgtcacccgttgtccggtcgctggtcggccgcgccgtggacggcgattttcaccggcaacggcgaatcgttggacgccgatctgagcgtgctatggcagggcgtcggcatctcgctgtcgttgagcgccgtcaccgtcgtgatcatgctcatcctgctggtgcccaccatggtcatcgtgcatattcgctccaaagccttggagcgtgcaatcgaatgggtggccacgctgccgctgaccattccggccatcgtgctggtggtgggtcttgggccgatctaccgttggctttccgccgacgtgttgagcaccaacccgatctggctgtgcttcgcctatgtgattctcgtgatgccgttcgccttccgcgcgatcgccgtgggcctcaactccatcgacgtcaagacgttggtcgaagcctcccgatcgctcggcgcctcctggcccaaagtgttcttcaaggtgatcatcccgaacctgtggcagtcgatcctctcggcatccttcatctccatcgccgtggtactcggtgaatacaccgtcgcctcgctgctcggccgtatgaacctgcaggtcgcgctctaccagctcggccaatccaatgcccaaatttccaccgccatgtcgctgctggctctgctcttcggcgtggtgctcctcgttgcgctcgacctgatctccgacgcaatgcgtaagtcaagggaaggtaagtgacccgatgaacaacgattcaactcccacccgtcaggaaaccggtaccgcagtggacgccgccccggcgtccccggccattccggcagccgtgtcctccactgccgaggacgccttcaagaacgatcccaccgctaccctcgagggcgtgcgcggcaaggacgtgaccaaggccgccaaggccctgctcaaagacaccgccaagcgcggcggtggttccattcagatgcagaacgtcgtcaagatctatcccggctccaccgttcacgcgctcgacgacttcaacctggacatcaagcccggcgaaatggtcgtgctgctcggtggatccggttgcggcaagtccaccgcgctgcgatcgcttgccggtctcgaagacatccaaggcggacgcatcatggtcggcggacaggatgtcaccggtgtgccggtgaacaagcgcgagatggccatggtgttccaggcgtactcgctgttcccgcacatgaccgccctggagaacgtggaattcggcctcgaagtgcgcggcatgggcaaggccgaacgccgcaagatcgccatggaacagctggagctcgtggggcttgccgatcaggccaagaagtacacgcagcagatgtccggcggccagcagcagcgcgtggccctgtcccgggcgctggccatcaagccgcgcgtgctcctgctcgacgagccgttgtccgcgctcgacgccaaagtgcgcgtccagctgcgtgaccagattcgccgcatccaactcaccaccggcaccacaaccgtcttcgtgacccacgatcaggaagaggcgctggccgtggccgaccgcatcggcgtgatgaacaagggcaagatcgagcagatcgccgccccgcaggacctgtaccagcgccctgccaccgagtacgtggccacgttcattggactcaccaaccgcctgctcggcgcatccaatggcgacgaggccgtggtcttcggccagcgcgtgccgctgctcgccggctccgccaagggcgattccgtggccgtgctcgtgcgcccggagaacctgatgctggccttggctggcagcagcgattcgcacgtcggcgaacgcgcccgcgtggaggtcattcacttccttggctctttggttcgtgtggacacggtcatcacctccggcgaataccagcgctggaacaaaggtgaacagctcaaggccaccgtgcagctgcccgccagcgagctgccggccggtctggcggtgggcgatgacgtgattgtcgccccgcgtccggtcgccgcgctcgcctgctgaatggcgttgcgatgatcgtgcggttctgttctgttttgtgactgtacgatcgtcgaatggcttatcggcaatgatatgtgtgggacggcggcgatttttgggcgattatcgcgtgccgtcccacgccggtgtgggatggcatgaacgtcaaacgatgtacattcgtgccgtcccacagaatgtattgaggaatcgttgcaatgacgccatttcttcgtgcggcgtcatcagtcatatgtggagtggtgtgggccgccgcgaaaaaatcgggcaaaatcgcgtgccgtcccacaacaatcccgcagagtagaggactctctcggcatggggattgattgacgtagatcattccttgcccattgatgattttccccattcccaatgcaatcgaaacgccgtgccgtattcttgaagagtattgcacgtgtgatcggtccgtttgcggccagtgactatgggggataagtatgagcgaaccaatgccgtcggcgcagcagccgcaacaaaccccacgcgattggtggttcacggcccatcgccggttttcgacaatcggctcggcgctcgccattatgatggtgttctggatcgggctgaatattctggccactgaagcactacgaacgctgcttggcgccgatgtgcccgcttgggctgtgctgctcgcctcctccgggccgctgtatgtggtggccatgccgctgagtatgttggccttcactcgcgtaccggttattcgcacccggcagtaccccatgaaggcgggggagttcattcggattttcgtcatgtgcattccggtaatgctcttgggcaatatgatcggcaatatattgtctgccggagccactgatggtcaggccaccaatcgcatcaacgacgtgattcttggcagcgactggcgggtgaacgcattgttcataggcctgttggcaccggtttgcgaagaatggatttttcgcaaggagattatctcccgcctgcgccggtacggagaaaagaccgcaatcatgttctccgcattggcgttcgcgctattccatatgaacgtgttccagttcttctacgcctttggcctaggactgatgttcggatatgtatacacacgcacctcccgactgcggtattcagtggctatgcacatgctgatcaacctgaacggggcagtgctcgccccattggtgatacaacagatcgatccccgcatcctcgacggcacaatcagcgaggccgaaatcatgcgtatggctgaaaccggcaacatgggcggcatgggcatcatgatgttgtacggcacagtgatgttgggcctctgcattgccggtatcgtgctgcttatcaccaagcgtaagagctgggagttctatcttgcgccagaggagttgcctgcggggcttaaaatacgcaccgcctatgccaatcccggcgttatctcgtacctactgttgactgtgattcttaccggttggatgctgttcgcatgactgtcatagccggacccagagagg

SEQ ID NO: 3483 - DNA, 13398 bp, Unknown
  R85_18m  MAG No. k141_4856
gcatagcacatcacggctgccacaccgaggatttcccgtcgggggctagatatatgcttccggagcatatactttccggaaacctacaggtcaatccgtgaaaatccgcgattccggacacactttttgacccttaaccctgttcggcgatgccgatcccagccagctgaagtctctcgccaccctgagcaacgccaaggtattcgacggccgctccggcgacctcgccgccgtcttccgccaagtcaagggcttcaactgatgctccaggtaatctgtggattcgttgtcggactgctgctcgccgggctcggcttcgggctggccggcggcggagtgcccggcctgatcgtggccgtggtgctggccgcactcgggtatatcgccgcctccacgctcaccgagccggagcgacgcatcggcaaaatgctggtttccgccttgcccaacggtcagaagaccgccgatacgatcgacgcggcgaacgctcaactcaactcgatcgccatgctcaccaagcaagtacgtgacccagccgtcaaagccgaagccaacgacttcatcgccgctaccaaagattgagtgcaatacgtgacccgagacacctccgcctacccgacgttgcgccactacatcaccgtgtacggcgagcagaccgagaaactgttgcgctcctacgtggacgtggaaagttccggcgcacgcgatcagatagccacggtacgaatcgaaaccatcgaggcgctgcaagtgctcgaacagaccgccgccggcgaactcagccgggcggtaagcgccaagacgttgggcattacggccgactccgacgccatccaacggttggcccgcatggatggatacgacgacgtcgcaccttcgcctgtgccttcctcggctgctgatgaaggacggcatgcacccagtcagactccatctggcggcccggctcaccagtcggaccagaaaacggacgcacaatgaaactctccaaatcaaaaatcatcggactgatcgccctgcttgcggtagtgggcgtggtctgcggcacgctggtgtggcggcaatcgcaaccagcgccggccgaaccgaccgaacaggtgagcatcaccggctacctgggcggcgagaaaatcggcctgttcgatgacgccaagttcaaggcgcttgccgccaagcaaggcatcgccatcgactatcgcaaggccggatcgctggccatgatggatgcggaccggaaaggcatggattacctgttcccctcctcgcgcgcggccgtcgaatacggcaatgcgaaaggcgtcaaggccacccaaagcgacatcgtcttcaactcaccgattgtgctgtacacgcacaaggccgtggcggacgggctcgtgaacggcggacttatggccaaggacgattcgggcgcgtaccacatggatatggccaaagccgtggacgcgatggtcgccaacacaacctgggccgacgtcggatacacggcaggctacgggcagttccgcatcgactcgaccgatccggtgaagtcgaactcaggcaacgaatacgcggcgctgctcgccacggtgctcaatggcgggcagccggccacggtcgattcggtggcgcgcgacggcaagaccatcgcctccatcttcgccaaatccggttggatggagacctcttccgaggattcgttcaaccagttcctgaccttgggcgtgggctccaagccgatgatggtgggctacgaatcgcagctgcttgatttggccgtgaaccaaccggatgcgttcaagcagatcaaggacgacgtggtcatcgtctacccgacgccgaccgtgtggagcacccacgcgctgatggccttggacgagaaaggcggcacactgctgaacctgttgaaaacaccggcggtgcagaagctggcgtgggagcgccacggcttccgcgcggccaacttcgccggcaccgattcgatcagccgattcggcgtgcccggcacgctcgaccagatccccgccgtatccgaactgcccaacaacgacgccatgcaacaactcatcgccaccctccaatccacgcaatagctcttttgccagcccccaatcggtgtttttattaaccccctctgacgagctgagtcgtatagcaaacagcccagtgggctgtttgcagacgaaggcgagcgagagcgagcaaataagaaatcggctgtaggccgtccttaattgcgttcgggctcccggcaaagccgggtggggggagagacccaaacataactatcaaaaaaggaaccagaatgccccaaaacatcaccctcgcagacctcaccaaaagctccgcaacccccatcaccaacccgttactcaacaccaaccaagccgcccccaacaccaccctcgtccccaccgccgccgaagcccaagccgccgcggccctgaccccggaccagcagatcgccaaattgcccgaagccgaccaggccacggtcaaccagatggccggccagatcgacttcactcgcgacggcatcgaatccagctacggcaaggacgcccagcgcgccacctccaccttcgccgacgaaatcctctccgacacccgctccaaagacaccggcgaggcgggcgaactactgaacaccatgctggtcaccattgacgaggctgacctcggcggcttccgcaccattccgatcatcggccaggtggccgtcagcgtggataagctgcgccgccgctatcagaaagtcgacgcgcaaatcgacgaaatcatagtgcgtctcgaatccgcgcaagccaaactcgtggccgacatctccatgtacgacacgatgtacacgcagaacgcccagcaataccgcgagctgaaaatgaccgtactggccggcaagaaggcgctcgccgacttcaacgccaaccagctgccagcgctggaggccgaggccgccgccagtggcgacgccatgcaggcgcaagtgctgaaggacttcaagtccaagctcgaccgttttgccaagcgactcgacgacctcgaccgcatcagcgtggtcaccttgcagaccgcgccgcagatcaaaatcatccagaacgcggaccagaccatcgtggacaagatcgacaccaccatctccaccacgattccggtgtggaagagccagatggtgatcgcgctgggcctgtccaaccagcgcaaggccctcgacctgcagaacaaggccgacgatgtgaccaacaagctgctggcgcgtaacgcggccgccctgcacaagggtgcggtggacgcggaaaaggccaaccagcgttccgtggtggaaatcgacacgctggagaagatcaacgccgaactcatcgccaccctgaaggagaccgtgcagatccagaaggaaggcaaggccaaccgcgaggccgcccaggtcaagatgcgccaaatcgagtccgacctcaaaaacgccttgctcgaaaacgcccagcagatgtgagccgttcgcgcgccagcatgctcccgttggcggagtttgcgggaacgtgcaaccatgctcccgttggcacaggtatatgagtacgcctactggtgtgcgtatatatgctcccgctggcgggagctggcagccgtaagactggctgagggtggtcacggcgctcggctcggccggctttaccggcaaccattccccgccgcaatttctctgtgggcataatcccggaatgattgccgcgctcgggaattgggtgaagtgaaggttaaaggttgagagcccgggagggttccggaaccggccacgataaccgctgctagccccgcgatacgggttggcggccggcatccaagccgattctctcctaatcaaggagtaccgattatggcaatgtttccggctttgatgaatgacacgatgttctcggatctgttcgatgatccgttctttgagggttggcgcaacacggacaacacgatgagtgccgcaatgcctgccaacatgatgaccaccgatgtgcgcgagaccgacaagggttacgacgtcgacatcgatatgcctggctttaagaaggaagatatcaaccttgagctcaacaacggctatctgaccgtgtccgcctcgcgttgcagcgagcatgaggacaaggctccggccgctgagggcgaggcttccgacagcaagtgcgcttgcgcgtccgattcgggcaagtggctgcgtcgcgaacgctacatgggctcctgctcgcgtagtttctacgttggcgaggacgtgaaggagtccgacatccacgccagctaccggaacggcacgctgtgcatccaggttccgaagatgcaggcccagccgcaagtcgagtccaagcaccaaatcgcgattgagggctgacgatacttgattcgtcccgaagtcccgcttcgagtagctttgccccctctgacgagggagctcccgcgaagcgggtgggggagagataaatcgtaaccaaaccatgcttcccacgccgcctgccctacgctttcaacgccgactaacctgacagacggcgggaaacatagccaatgcaaatgccgagtagggatttaccctacccggcattttgctgtttcaatcaccgaaccccaccctgttcgcgcgccggtcgtgtgccgttctgcagctgtacacatccgatgagtagaatgccttcgaaacgaggcaagagaggcggacatatggcgaacggcgcacagaacgcaagcggcacaccggcaccggcggcaagccattccggcggccacgtcgtatccgcgcgcgccacgaccatcggcctgatggcgatcctgctgtggagcttcatggccggcaccgtgcgcatcgtctccgaaaacttcggtgccacgcttggttcggccctgatctacacggtcggcggcatcctgctgctgatgttccggcgcccggccccgattcgcgagttccccaagaaatacttgattatcggcggcctgttgttcgtattttacgaatcgtcgatatccctctcgctgggtctggcctctaccgacgcatcctcggtggaagtgagcctggtcaactatctgtggcccacgatgatggtgctgctgtcggcgggcgtatcccatcgcaagcacgcggtcgtcaaggtgctgccgggcgcgattgtggccactgccggcgtggtgctggcggtcggcggtaattccgggctcgactggcatgcggccgtgcagcatatcgccgccaaccctttgccctatgcgctggcgttcgcgggcgcgctcgcttggtcggtgtacgcggtgttcacgccagccatgagtcatggggtggacggcacttcattgttcttcccctgcgtggccgtggcgttgtggattatccacttcgcgtccgggcaggggtggccggccgagccgccgagtctggtcgcatggctgtttgtgttgattgccgcggcggcgattggcggcggttatgcctgctggggctatggcattctgcatgggtctatggagcggctggctattgcgtcctatgccacgccggtgctgtccaccggggccggtgcggtgctgctgggtttggcgctgtcgctgccgttttggtgtggcgcgctgctggtggccgccggatcggtgctcaattacttggtcagtgcgcgcaaatagcggggtggctttgctcatggggcggtaataatcccatggggcggtaaaaccctcatggggcggtatcccaaaatggctttattctgccgtttcacaatttcttcaaaccgccccatgggccttttaccgccccatgggtaaattaccgcccgatgggcagcaacaacttactcgccgcggcgctcggacgggcggcgaatcgggtcaagcagcgtattcggatcggagatgccgaacatgctgcgcccgccggtggattcagggtgcttggcgagaacggccagcgaaatcgcccccggaatcataatgatcaccgaaagggccgccaatccccagttcacgaagaatccgagccccagtacgatggtcaccacaaccaccaccgtgacgataatcgtcaacagtgctcgacgtgggttggtttccctggtccaagaggtgctggctgcgggttttgctgttgaactggccgcggcgtttgtggctgttgtgccatcagccgtgccggtcgtgggccttgccgccgcgctcgtcgcggggtcagtaggggcgtcagacacgttatcggcgacattgccggtcgctgctggacgttgttcgtttgcgtgagtcatatccaccaacatattccctgcttccggctaaagctgggacaagcctgcgcaccgctaatccagcgccgacactggccttgagctgcggacgtccaggccggatgtgaacaggagctgaacggagtctggggaaaccatgagaactcgcgacaatttttgtgaaattgggtgacgctctatgaatcgcgcgctagtattgcgtgagcttacaagacgaggagcctggagcgcggggacgaaggatgaagaactccgtttggaagacgttcatggaattgtcgctggtccgcggaatcgtgccgtggaccgtgttcggactgaccgcgatcgcggcaatcatactgattgttgggctggcattgagcaagaagcgcggcccggcagcagacggcctggcgccggacggcgaatcgtcggcccaatcgcccgtcgacccagataaccagccggccaaccagcctacgaacgcggctgctacggcgtcatccgcagcttcgacggaagagacgtttatttcccatggcctgcgtacgccgcaacgtcgtcacttgcatccgctggccgccgcgctggccgccgccgtgctcgccggcgcgggcggactactggccacatggctgatgtccgacgtgttcatggtgttcggcgtatcgttgggctggccggtgatcctcaccgtcgcgggaggcttcgcgggcctcggcttcgtgctggccgccgccgtgacgttacggggggcccgtcgcgcgctggccgtcgtgctggtgccgctggtgctggcgtccaccgcgctcggcgtggactcgatctacggcgaataccagaccatcggcagtctcgtcggctatacgccataccccccgctcggttcggtcaccgtgcgcaaagcctcgatgagcgtcggcgagtggcgcgacaaggcgcgcaaggacgctctgccatccatgcccgactcgggcagggtgttcgtcgtcagcatcccgaacaccgaatccaagttcaaggcgcgcaaggcgatggtctacctgccgcccgccgcgctgtccgaccgcccgccggccctgccggtgatggagctgctcgccggtcagccgggcagtcccggtcgcctcatcgacgccggcaacatcgccgccacgatgaacgcttacgccgccgaacatgacgggctggcgccgatcgtgctcgcacccgaccaaaacggttcggccatgcacaacagcctgtgcgccgacaccacccgaggcaacgccgaaacctacctcaccaaggacgtggtgaactgggccagggcgacgctgccggtagccaagtcggcccgtatgtgggcgatgggcggattctcgcaaggcggcacctgcaccacgcagctggtgccgcgtcaccccgacatctacggtgcgatgctgccggtggatggtgagctcgagccgaccgacggcagcgtcgagacgatggttcggcgatatttcgccggcgaccgcaaggcctacgacgggcaggtgccggtcaacgccatcgccgccaccggcacggccggccaggcgctgttcgccggcgccggcaaaggggatcggaagtcggtcgccaacatgcgcaccatcgccgcggccgcgcgcgcggccggcatgcagaccaccgaactggtcgtgcccggcgccgaccatgactggcatgcggtgcaggcggtctggaaccccggtctcgactggttcggcgcgcgaaccgggctgggcgaaatgacgaaatcgttggaggaatacccacaagtggaggtgttgcaatgagcgaagaacaacagcatgggaacgcgcggccggcggccatgccgcagacgcggcggcccttgcgggacgcggaaccctcgcggacgaagcccgccacgacctcccgcgccaccaaaccgcatacggcaaggtccagccatgcggcggaaagctggcgtgaactggccggtgacgtgcggcagtgggcggacgaccaccggctggccgtcaccgccacggcggcgctggtggcgctgaatctggtggcgtggctggtggccgcgatggccggattcgcgtttccgctgcggctcagcaccagcatggccgcattcaacgccggcaaactcatctgctcgctgttcctggcgcgcggcgtcatccaactcatggtcgacgccgtcctgtggctcgtcatgctgtcgatagccgaaccatggctcggccgtgtgcgcaccgtcgtcaccgcgctcgcctgcgcggccggcggcgtgctggcgggcctgaccctgtgcgcggcggccggatggatgttccaggactccctgttcgtctcccgcatgcggttcgcattgagcccgctggtgttgccggtcggcgcgctcatggcggccagcgcgttctgcagccacctatggcgcaggcgcatccgactcgtcggctatgtggcgatcctggtcacgttgctctacagcggcaaccccagcggctactgcatactcgccgccgcgctgatcggccatgccgccggccgtgtgatggccggtccgcccgcgcacgtcgaagccgaatggcactggctgcgcagcacctccttcgaggcgcggcgcatattcgcggccatcgccgtggtactggccctggggccggtcatcgccatcacctcccataaccatgcgggcccgctcagcacgatcggcctgctcatgagcccggtttccgtcgacaacggcatgctggccaaatgcctggccggtgacacgcacggcggatgcttcctgcagttcgatctgttgcgggcctcgatgcccggcgcggtgctgcgctcgttgctgcccaccgccgtgaccctggtgctggcgtggggcctgtatcgcggacgtcggttcgcggccatctgcaccgtggccatcaacctgttcacggtggccatcgccgtcgcctactatctggtcgtgccgctgagcttcgcgccggacggcatggcctccctgctgcagcacggcgcgatcgtggcctgcgtggcgaacgtcctgcccccgctgctgttcgccatcgccctgctggcggcgatgaaacacttcccgatccgcatcggctggtgcaggctggtcggcggcatcggcgccatcgtgctggcctggctggcgtgcgccgccatatacctgatatacggcatcgcccaacccgccaccttctcgccacgcgctacggcctcgtcgctgctggccgagctgccgggacgcttcctgcccatcggcttcctgagccatatgaagctgtcgttcgtgccgcgcactccgatggcctcgatcgtgtaccaaggcgtcggcctggtgttctggatcgtggtgctggccgtggtgatccactggatgggcgacgtgagcgaatcgaacgagcgagcccgggcgcgcgccgaacgtctggtcgaaaccggcggcgaatcgatgagcttcatgaccacgtgggaaggcaacagctactggctgtcccccacgggcagatcggccgtggcgtatcgcgtgctcaacggcatcgccctgacctgcaccggaccgttcggcgatccggcggaatggatggacgatctgaacggtttctcccagcactgtgcggaacgttcgctgtcgccggtgttctacggcgtgcatcgggaacagcgcgacgcgttgctggaagccggctggaactccatcgaggtcggcagcgaaatggtggtcgacccgcgcggctggaagacgaccggcaagaaatggcaggacgtgcgcaccgccatcaacaaggccaagcgcgacggcgtgaccgacgtgcagtccacattcctggaagcgtcgcttgatgtgcgcgaacagatcgaggacatctccgaggagtgggcgcagctcaaggcgctgccggaaatgaagttcacgctcggcggcgtcgaggaactgcgcgacccgcgcgtgcggctgctttacgccatcgacgcggacgggcgcgtgctgggcgtcaccagctggttgcccacctggcgcgacgggcgcatcgtcggctggacgttggatttcatgcgccatcgcaccgacagccccaacggcatcatggagttcctgatcgcgcgcatggccgagcggctgcgtgacgagggcgaagccgatcccacgcacgccgtggagttcatgagcctgtccgcggcgcccctggccggcatgaatcccgatcgggacaacgccggggaggacggggcaccggccagcgaaggcacgcaggtgctccaacacgcgctgcagatcgtggccgactggatggaacccgcctacggcttccactcgctgttcaacttcaagcgcaagttccagcccaccgaagcgccggtctacgtgtgctacccggacccggcggcgttgccgcagatcgggctcgcggtggtgcgcgcctacgtgcccagcgtgacgcccgccgaagtggccggcatgctcagcacgctgcggtcgtgaacggcgcgcgccgtcatggcgtagtaacgtgggacgcatgagcgaacgtaacgaacacaatgacggaaatacgcaaaccgcatacttcgccggcggttgcttctggggtctggagcgctacttccagaacgtcgacggcgtcacggacaccacggtcggctacgcgcaatccaccgtcgaatcgccgacctacgagcaggtatgcgcgggcggcaccgatgcggccgaaaccgtgaaagtcgagtttgatccggcacaggtcagcctgcggacgctgacattgctgttcctggaggtcatcgacccgttctccgtggaccagcagggcgaggaccgcggccggcagtaccgcaccggcatgttctacacggacgagacgcagcgcgccgtgtatgtggcggctctggagcagctggtcgaccgccagccgcagcgcccggccgtactggtcgaaccgctgcgcaacttctacccggccgaggcacaccatcaggactatctggtgaacaaccccggcggctactgccatgtaccgatcgccgcaatcgcgaacgtaaaacgccgtcaaaagtacgtggaacgcatctgggatctgacgctcgaacagttcgccgtcacgcagaacgccgctaccgagcgcccgttcgtcaacgagtatgacgaggagtttgagcccggcatctacgtggacatcgtcagtggcgaaccgctgttctcgtcgcaagacaagttcgattccggctgcggctggcccgcgttctcccgcccgattgccggtgacttgctgaccgagcatgaggaccaccgcattccgggccgcgaccgcatcgaagtgcgcacgtcggacacacagattcacttgggccacgtgttcaccgacggcccggccgaccgcggcggcctgcgctactgcatgaattccgccgccctgcgcttcgtgccgcgctcgcgcatggccgaggaaggctacggcgactggattgcggttgtggatggggatgatcaggcatgagcatggagaatatcgcgggcgctcgcaagcccgccaagcgtgaggatgagcacacggtcgccggcgagcatcgcatgatgcgccgtgcggaccgcgaggtgaccgatcccgagcggatcgccgcgatcatcgccgcctgcgacatcgttgaagtggcctatgcggatgccgagggcctgactatcgtgccgctgaatttcggctttgattacgacgaggcgactggcaagctgacgctctggttccactccgcgccgcgcggccgcaagctcgacgcgattcgcgccgccgccggtggccgactgcccgtggctttcaccatgcagaccgactgcgaggtggtggcgggccgcaccacgtgcaattggggtgaggcgttcaagtcgatcgtcggcaatggcacggcgtcactggtcgaggatctggatgaatgccgccacggcttgcagacgctgatggcgcagcaggcgcatatgccgaatgtggaattcactgatgcgcaggtccgcagcgtcacggtgtggaagattgagtccgactacttcaccaccaaagtccgcaccaaacccgtgcccgcacacatgcatcagcgttagccggggatagcgcgccacctccccactggcgggaggcagcgcgcagcgccggtggatggcccacgtccggacccgatagacttgccgccatggcagcagtgacagtggtaattaccagctacaatcagggcccgttgattcacgaggcagtcgagtcgtcattggccccagacggttcgtccggaacggatcatcatcgtgaacgatgggtccgatgaccacgcatccgtcgagatgctgaacgccactctcgacgattgccggcacggggcgatggatgcgaatggtgtggccatcgacctcatcggccagacaaacgccggtccttccgccgcgcgcaaccgtggcatcgccgccgccgaaacgccgttcgtagtggtgttggatggcgatgaccgtttgcggccggccttcattgagcgcacgttgtcgatgttgtccgccgacaaaacgatggtcgctgcatccggctggctgcagactttcggtgtcctggaatcagtggtccagccgactggtggcaatgccgccgcgttcgtgtcgcataattgctgcccggccacgtgcatgattcgccgtgtcgcgtgggagtgctgcggcggctacgacgagtcgatgcgcggcggcttcgaggactgggacttcttcctgtcgttgttggagtgcggattggcggtggaaaacgatatctgcggtgctggggttactggcggtactgagcatgtcggaggttttgggagtgcctgggatacagagaatcccgcaaaagacgcggcccatatcggcatcgcccccgagccgctgatcgagtaccgcacggccccggcctcctcaaacgtgaccagcatgaccaagcgcctcgatctcatgcgcttcctgatcgccaagcaccgcgatctctacgccgcgcacatcgccgacgccatcctcggcgttgaagccatctccatgagccgcttaaccatgtgggaatcgttgatgcgcggtgacatcgccgccagccaagccttcatgctccaccccacctacggcgacggcggaatggccgccgccgtacgcttgcggagttga

SEQ ID NO: 3484 - DNA, 6753 bp, Unknown
  R85_18m  MAG No. k141_5086
cggtcggccaggctcacatcaagtccactttcaacaacacgatcatttcgatcaccgatccgtccggtgccgtggtgtcctgggcgtccggtggtgatgtcggcttcaagggctcccgtaagtccacgccgtacgccgctggtatggctgccgagtccgccgcccgcaaggcgatggaacacggcgtcaagaaggtcgacgtgttcgtcaagggcccgggttccggtcgtgagaccgccatccgttccctgcagtctgcgggcctcgaggttggttccatcaccgacgtcaccccgcaagcccacaacggcgttcgtcctccgaagcgtcgtcgcgtctgagcactcagcaataccaaatccatccaaaaccgcctgaccggtgagtgcaccaccgagttcaagctgaaaggataaccacagtgcttattgcacagcgtccgactcttaccgaggaatctctgaatccgcagcgctcccgcttcaccatcgagccgctcgagcctggcttcggctacacgctcggcaactcgctgcgtcgcacgctgctgagctccatcccgggtgctgccgtgacctccgtgcgtatttccggtgccctgcatgagttcaccactctgccgggcgtccaggaagacgtcaccgagatcctgctgaacatcaagggcatcgtgctcaccagcgaatatgacgagcctgtggtcctgtatctgcgcaagagcggcacgggcgaagccgtggctggggacatcaccccgcctgccggcgtcactattgccaacccggagcagcacatcgctaccctcgccgacgatggcgaactcgagatcgagttcactgtcgagcgtggccgtggctatgttcctgcccagatgaacaagcaggacaacgatgagatcggccgtattccggttgattccatctactccccggtactcaaggtgagctacaaggtcgaggccacccgtgtggaacagcgcacggacttcgacaagctcattctggacgtggagaccaagcccgccatctccccgcgtgacgcggtggcttccgccggttccaccttggtggagctcttcggcctgtgccgtgagctcaacgcccaggctgaaggcgtcgaggtcggtccggccccggtggccgaggagaccaaccccgagatggccgttccgatcgaggacctcaacctgacgcagcgttcttacaactgcctcaagcgcgagggcatccacaccatcggtgagcttgtctcccacaccgagcaggacctgctcgacatccgcaatttcggtatgaagtcaatcgatgaggtcaaggagaagctgcagaccctgggcctgagcctcaagtcctcgccgatggccttcgataccaataatctcgaaggtggtacgttcttctcgccggaagacgagtgatctgcctctttgaccaatcgttcgttcactaggcaagcggatgttcgggcatatgcccacctgcttgcctgaagaacggacatataaggagtaaacccaatgcctacacccaagaagggcccgcgtctggcttccagccccgcacacgagcgcctcatgctggcaaacatggcgaccagcctgttccagaacggccgcatcaccaccacgctgccgaaggccaagcgccttcgtccgctggccgagcgcctgatcaccttcgccaagcgcggtgatctgcactcccgtcgtcgcgtgatgcgcgtcatccgcaacaagtccgtggtgcacattctgttcacccagattgccgagcagatggagcagcgtgaaggtggctacacccgtatcgtcaagatcgccccgcgcgttggcgatgccgctccggccgctgtgatcgagctcgtcaccgagccggttgccaagaaggctgttgtgaaggaagctgaagccgccgccaaggttgccgaagaagaggctccggccgttgaggctgaggccgctgaggctccggtcgaggagaccgccgccgctgaggctgaggctcccgctgaggaagccgctgacgccgagaaggccgagtgagctgaatagcgtttcgccaagctagctgaaagggctggaatccgtttgggttccagcccttttgcgttgtttcatagaaactacaacgtacgtacggctcgaatggcctcggctcttgcggccagctgatcatcgacggggtatgcgatatgctccaaagtcaggccctgcggcgcaatcggcccgcttgagccttcacgcactggctcggccattttgccggcaaaccattccagagatttgcgtcccgaaccaactttgatgcatgagccgaccaaggagcgcaccatattgcgggcaaaggcgtccgccacaatcgtgaacaccgccagtccggactccagcgacggagtccgatatgcttcatgcgatgccatcgcatccggcaccaggggagtgatcggcacccgccgccaataggcggtcttgacttcgcggatcgtagtgcctcccggattcggagtggcgaaggaaccaaaatcgtgcaggccgatggtcaatgaggctgcgcggttcataagctccagatccagcgattcatccacggtaagcacgcatccacgcaggcgcgggtcgatctcggacgaacgatcggcgacccgatacacataagtgcgctccaatgcggagaacctggcatcgaaaccggccggtgccacggcaatgccatgaatgacgatgtccgaaggcagcacagccttgagtctgcgagtcagcgcctcggtgaccggaatggtcatgtgacctacgcagcgattcagtacctcatcggatacatccaaatgcgccacttggtgggaggcgtgcacaccggtgtcggtgcgcccagccaccgtcagacgcaacggttcggccgcatcatcggccggcacccgcagcaccttgtgcagcgcatcttcaatggtgccttgcaccgtacgcagattgggctgtttggcccagccatagaatccgccgccgtcgtaggccaagtcaatgcgcagtcgtgtcatagccattcattgtaacgagtgcggtcggcgagatgcgcgcggtcggcgagacgagtgcggtcggcgaagtgacctgcctgtaacattctcgcgcgtttgctgaaacggggccgccttaggttgtaaccatcaaacccggttacggcttgcggcgtcagcgtgcgctcgaaacgcctaaccgcttgaggccacagaagccgccacagcaaggagcaggcacgatgatcgaatccgcagcacgcagactggcccatgaactggtaaaccgtcgcgaggcgatcaaccgcgagctgtcccgcaacggcgtacgcttcggcatctacaagaacggcgaataccatgaccggctcttcccgtacgatcccgtgccgcgcattatcgaatccgacgaatacgacgaattggagaagggcctgaagcagcgcgtcaacgccctgaacgcctatctgaaggacatctactccgacaaggccatcatccatgacggcgtcgtgccggaggaatacgtatacacctcggccggctacttcccgcaggtcaacggcgtgacccctcccggcggcatcttcgcgcacatcgccggcgaagacctggtccagggtgaagatggccgctggtgggtgctggaagacaacctgcgcatcccctcgggcgccagctacccgctgttcgtgcgcgacatcgagcgccgcatctccccgcgcctgttccgcgacgtgcacatccgcgacaatcgcgaatacccgcgcctactgcgcaaggccatggactttgtgtccactgagggcatcgccgtggtactgacccccggccgctacaattccgcgttcttcgagcacgcctatctggcggagaaaaccggcgccgcactggccttccccgaagacctcgaagtggtggacaacaaggtctacttcctcgactacgccggcaaacgccaccgtgtgggcgtggtctaccgccgtctgtccgacgaattcctcgatccgtttgccttcaatcctgattcggtgatcggtgtgcccggtatcctgtccgcctaccgcgcgggcaacgtggccatcgtcaacgcgccgggcaacggcgcggccgatgacaaggccatctactacttcgtgccgcagatgatcaagtactatctcggcgaggaaccgattctcaacaacgcgcccacgtatatgccgatgttcgaggccgaccgtaaggaagtcctgaatcgtatgggcgagctggtcatcaaggatgtggccgaagccggtggttacggcgtggtgttcggttcgtcgctggatgctgccgcacgtgaggagcttgccaaccggatcaaggaggagcctcgtcgattcatcgcccaagaggtgattcagttccgcgatatcgatgtggtggacccgaagaccggtgagatgtcgccgcgcaaatgcgatttgcgtgcctttgtggtcaccggcaaaaacacgcacgtgtggtattcgggcttgactcgatactcgtcggtgcccggccagatgatcgtcaactcgtcgcagggtggcggattcaaggatacgtgggtgttggcacccgaatccggcgtggagcatgaatacggtgctgaagtgcaggtggcgaacctgctgagccagtcccgccgccactcgttgtctctggtcaccgcctccaaggcagacaacctgtattggctgggtcggtacaccgagcgcgccttcaccacgctgaaccagttcttcccgttctacgatcgtgtgatggacaccgatgtggacgccttccgtccgttcgctcacgcactcgacctgcccgaagatttcgaggacttcgacgggttcgtgaacagcttcctgtacgacgggtccaaccctgattcggtgcggtcggccgtaacctccgcattcaacaacgccgtgattctgcgcccggaattgagctcgcgtctgttgcagtacgtggagttggcgatgaccaatatcaccgatgccgccaaatacgcggccgacgccgaggacatctacaagcagcgcgatattaccgatgacatgctcgccttctggggcggcatcgagaattcgccggtcgaccccacgctgaaggcgttcatcttcatcggcaagtatcttgagcgcatcgacctgtacacgcgcttcggcctgacgatggaggagatggaagccccgcttaggaagctcgcctcctactcgatgatcctcgacggcatgccgttgcctagttgcttcgccgatgggctgagctggctggtcggtcagctgccgtctcgcgggtatcaggaagtcgccgacctgctgaagaagtaccttgacgattattccggccgtgtcagcgccctggccatcaaagacatgggctcactgagctccatgaacatggatgccaagcgcccctaacccgacgttcgccctgacgggttcaaatgctatggtggtatggcgaaaaaccgtgcgcccgagtgccggccgatgcgtatcggcgaattgccggaatatatgcgtggactgtgagcgcgcggaccatacctcagccatggctgtagtgtcgttatcccgagaatgtgccggttgccggctcgtgtgtaagtgcaggagacgttgtgaaaaaactcgtgttcgactatgagatgaagctgtccttcagcgcaccggtcaccgatcacaggttccagcttcgctgtattcccgccactggccctcgccaacaggtgattgacgtggaagtgaagattcagcccgaaaccgaactcgaaaccaccatcgactcctttggctccgtggtgatgaccggattcatccccgagccgcacgacatattcagctattcggtgaccggcatcgccttcgtggacaatgcgcatatccataaggaagcctataaaccgctgtaccgattcaattcagcgctcaccattcccggcccgaacgtggaggcgatgatcgacgtatgccgcgaacgcttggctgcgttgcctgccgacgccactccggtgcagcaggccgccgaagtgatggatgaggtctacaaggcgtttgtgtatacgcccggttccaccacgattcgcaccaccgccgaacaggccttggcccagcgcaagggcgtatgccaggattatgcccatgtaatgctgtccgtgtgccggcatgtgggattgaccgcgcgctacattgccggtttgcttgggggagagggcgcgacccacgcttgggtcgaggtgtatcaggatggccgatgggtcggactggatcccacgcataaccgattggtggacgacagctacatcaccatcgcccacggccgcgattaccgcgactgcatgctcgacatcggcatcttctccggctacaacgtccagcagacccaatgggtcaatgcctccgtccacgaacaggtggcgtaaacaaaattccaagccccctctggtgagctgagccgtgaagaaaacgccggaggcgtttttaggcgaaggcgaatgacagtgagcaaataaaatggcagctggaaagctgtccttaaattgcgttcgagctgtcgagcgtagcgagactgagagagaccgctcaatgcagagtggccccgtcaccgcttctaccaccaccaatattcggattttcgtcgttgcaacattcggattttggtagttgagaaattcggattattgtagttagaaagttcggattttcgtcgttgcaacattcggattttggtagttga

SEQ ID NO: 3485 - DNA, 15517 bp, Unknown
  R85_18m  MAG No. k141_5101
catgaggcggtaattaccccatggggcggttagcccaaaaccgcattccgcggaataaagccattttaagccaccgccccatgggaattttaccgccccatgggccacttaccacccaatgaaggttttaccgccccatggagggcagcctcacaccaacacacacagcacacccggccacacagcaccccagccacaaaaaattaggcacactgcccagcgacacacgataagccgctgggcagcggcgttattccgccaaaaccatcatcaatcaccccaataatctccggcagccgtattacgctactacaaccgtagcgctacgattaacgtatcgctacggaaaacgtagcaaccaagcaacaccaagctccggaggtatcagtgggcaatatcttcaaggtcctcaaacgcgacttcctgcgcctgttcaaggtgccggccgcatgggtgatcctgttcggcatggtgtttatcccgccactgtattcgtggtacaacatcgtcggcttctgggacccgtacggcaataccaaaggcatcaccgtcgccatcgccaacaatgacgacggcaccgacaacgcgctcatcggcaagcaaaacctcggcgatcaaatcgtcaagcagctgaaaagcaacgaccagctcggctggaccttcgtcaccgaagccgaggccatggaccaggtggaatccggcaaggcatacgcagccatcatcatccccaaagacttttccgacgatctcgccggcgtggtgaccggcggcaagagtcggcccactctggagtattacgtcaacgaaaaagccagcgccatcgcccccaaagtcaccgacgtaggcgcgtccactgtggaccgcacggtcaattccacattcgtctccaccgtatccgaagtacttaccgaagtcatcaatacggttggcggcaaagccatcagcaccgaagacaccaccaaagccaaggccctcacggcccttgccgaggcctccggcgacgtgcagcacacacgcagcaccatcgccaagctcaccaccaaactcaccgataccccggagcagacacgcaccgcacgtcaggcgctggacgacgcgcgcgcacttggcatcgacaccgcggaaggtctggccggcgtctccaccctgatcggcactacccaagccagtctgaacggcttcgtcacctccacgtccgaagcgcttgaccaaggctcaagcctgctgagccaggccgcagcacaggccaaccaaagcgtgggcacggtagccggaaccatcagcgccgccaatcagcaggtaggcggactgatcaatacggcggaagacatcaaccaagcgaacgccgacatcatcgaccaactcaaagggctgccgaacgccgatcgagaaccgctgcaatccgccattgccacactggaaagccacaatagcgagcttgccggcgcactgggcaacctcgatagcctgaacaccactatcggcaacgcctccacagacaccgccggattggcgcagcatctcaataccgccacccaaaccacggtgcgcgaggccaataccgctcgcggcaccatcatctccggcgccattcctcagctcaacaccggcctcaacaccctcagctcgaccgccaacactctgtcgaccggcatcacgtcgcaaggctcactcatcgatcagtcgaagagcaccctcgatcaactcgacaaagccgcctccaccacggtgaccgccctgcacgacaccgataaggcgctggccggcatgcaaaccaagctcgaaacgctgaccaccgacatcaaagccctgagcatctccagttcactcagttccctgatcggcaccgacggcaaactggatgccgccacaatcgccgacttcatgctctcccccactgttatcagcgaacgggccgtctacccggtcgcctcctatggttccggcatggcaccgctgttcaccaccctgtctttgtgggtgggcgcgttcgtgctcgtggtcattcccaaactcgaaaccgacgacgagggcatcgacgatctcacgccaacccaaggctatctcggccgtttcctgctgctggccacgctggccgccgtccaaggcctggtcacggccatcggcgatcttgtcatcggcattcaatgcgcgagcgccccggtgtttctgctcacctgcgtcatcacctcactggtgtatatgtcggtgattttcgccctctccaccacgttcatgcacgtgggcaaaggcgtgtgcgtggcgctggtcattctgcaggtgccgggcgcctccggcctgtacccgattgaaatgatgcccgcgttcttccgcgccatctatccgctgctgccgttcacctattcgattgacgcaatgcgtgaaaccatcggcggcttctacgacggcctctggttcgcctatatcggcaaattgctggttttcgcggttctggcctttgtgcttggcctcggcgcccggccgaaactggccaatctcaaccgcctgttcgcgcgggaaatcaaggaaagcgacatgattatcggcgagccggtgcacctgcctggcagcgaataccgtgtcactcaggccattgcggcactggccgaccgcgacgaataccgtcatgccatcgaacgtcgggccgccaaattcgcctaccagtatccccggctgctgctgggtgcgcttatcgccggattcatggtgccggccgcgctcattatcgtgtttgtgctgaccaccagcgagaaaatcgtggtcatgggcacatggctggcatgggtgctcatcatcatgggcttcctgatggtcgtggaattcatgcgcgattccatccgccgccaaaccgagctcggcaacctttccgacgagtcgatccgcgccatgctgtacgggcataaggccaagcgtcgcgacacctccgccgaacgccacgaagaagcggacccgagcgccgccgttaccgcaatcatccccactattccgccgaccaaggaaggcaggcacgcacgatgaacaccatgtggaaactatttaccggcgacatcaaacgcctgaccagcaacgtggtctccatcatcatcgtgatcggcttggtgatgattcccggcctgttcacctggttcaacgtggccgcatgctgggacccgttctcgaatatgaagaacctgaaattcgcggtggcgaatgtggatgaggggtatcgttccgacctgatcccggtgaaagtcacggtcggtgatcaggtggtgaacgcgctgcgcgccaacagtcagctcgattggacgatcacgtccaaagccgatgccgtcgagggcgcacgatccggcaaatactacgcggccatcgtaattccgaagtcgttcagcaaagacatgatgaccttcttctccgacgatgtgcagcatgccgaactgacctattaccgcaacgagaagaagaacgcgctggcaccgaatctgctcaacgagggcacggacgaggtggcggcggaaatcaacaccacgttcgccaagaccatcacttcggcagggctggaaatcgcgtcttcgctggccgatcagctgtccaagcccgaagccaaagagcaactgaataccttcaacgccaatatcgccgatttcgccacacggcttgacgatacggcggatttgcttggcacatacagcgcattgaccgatacggccggcgccttgctcgacacctcgaactcgctgatcacgcaggtttcctctgccgccaaacaaggaggcaaggatctcgccagcgccaagcagggagtcaccgacgtggtcggagccctgggcaccaccgctgacgcgatgagcagctcactggacgcgagcgcctccagtttcggcgcggtgtccgattccatagacaagctgtattccgacgcgaatgatggtgccaccacggccgccgacgaattggaccgtcaagccacggccattggcaagcagacggagaaatacactgaaattcgcaacacgttggccggcatactgggcaacgactcatccatcatcacggcgattgaccgttcaatcgcacggcagaacaggctgcggcaagcgctgaatacagcggcgaccaatattcgccaaggtaatcaggacgcgcaggatcagcatgcgcaggtcaaggatctggccgatcaagcgcagaacagtatcgccaatatcaagtcggatttcacggccacggtgaaaccgcaaatcgactccctgtcgtccaccgtctctgacgcctccggcatactgagttccggcgccacccagttggactccacgctcggcgacctgaaaaggacttccgacgacgccagcgatatgctcggcgacgctcgcaccaccttgggcaaggtgtccggcaaactgcgttccgccggtgccgaactggcttcgttcaacagcacactgagcgacgcactaaacagtggcgatatgagcatggtcaaagaggtgctgggcaatgatcccgaaacgctggccagtacgttggccgcgccggtgcagctcaggcgcaaggccgtatttccggtggcgaatttcggttcgtcgatggcgccgttctacacgctgctgccgttgtgggtgggcgcgctgctgatggtggtgacgctgaaaaccaccgtgtctcgccggacgcgcaaagccttgggcgatccgcggccgcatcggctcttccttgggcattacggggtgttcgcgctgattgcgctgctgcaatccacggtgtcgctcggcggcgatctgctgttcctgcgcgtgcaggccgtgcatccgctgctgtttatgttgtccggatggctggcctcgctggtgttctcgttcttcacctatacgatggtggtgagtttcggcaatgtgggtaaggcaatcggcgtgcttatgctcatcgtgcagatttcgggtgcgaacgccgcctacccggtgcagatgttgcccgacttcatcgccaaagtcagtccgttcttgccgctcacccatgcggtgacgatgatgcgtgcggccatcgccggcatctacgacatggattactggcgggccgccggaatgctgctggcgttcgtgccgccgctgctgttgcttggactgttgctcaggaagccactggtgcggttcaaccagtggtatgtggccaaagtcgagagcactaaagtgctgggctagtaggtattatccgggggttgcctacaaacggcatggacttaccaccctcagtctggctttgccagccagctcccgccagcgggagcgtacgggagcatatttcgaagagaagagatgacggagatgacaggtacgacggcgacaccgcgcggtgagcgcacgcgcgaggcgacggatcgcaagctcatgcgagccacgctgcagattgcggtggaccgcggcatcagcggcgtgaccatcgaggaggtggcccggcgctccggtgtggccaaaaccacgatttaccgtcgataccataatgccgacgagctgctgcgcgagatcagcgcgatgtatctggccatcccggattccgacccagtgcccagccccacgcgtgagcatttcacgcaactattgcagcgattggtcgattgggtgcgcgacaacgacatcgacgtcaagcgcgtgggcattgtattgtccagcgaggccgagttcttccagcacatcgtcgaccaggtggtgaccccgtggctggagcatgtgggggcgttcctcaagcagggagtcgcgcagggcgtgtttcgcgaggacgttgacgagaagttgctgttgtccacgattatcgggtctttggtggcgtatgaggccatcgagggcaaagcgatggacgacgacaccgcctgggcctcgcgcatggccgatctgctgtggccagcattgctgaagtagcggtcttactcctgaatcgaagcctcctggcgggcgacttcgagggctttgttgaaggcgtcggaggtccagctggcaccggcgaccttgtccactttgagtcccttcaggggcttgccgtccactacgccgttgatggctttggcgaagtcgtcctgatggttcttggaaatcgtggtgaacgggtgcccaatgattttgacggtctcgacgttgccgtccttgatggtcagatggacgtcgatggaatcctcgccgaccgggccgtactggccgttgatcgagtagttgccgtccttgtagttgccggtgtccttcttgtcggacgtggtggtggacgggtcgttgtgcgatgagccggaatcggagccgtcggagctatcggagccgttcgactgggattgcgactgctcttcctgcgacttctcggtctcgcccgagttgccggcgtacgcatcgtccatcggcgtggccttggattcgccgcacccggccagcagcgcgccagccacgaccagtccggccgccgccaatgtcgcggatttcttcaacgtattcttttcggtcatattcacgctccttaagccccctctgacgagggggctgtcagtgaagctgactgggggagagaccatcagcttgccatgtattcctcacatactgctcgatgcccctgacggccctactcctcgccgccggttttcgcggccttggtggggtcagcgaaaccaatggcggtctcgccgttctgcgcgccctcgacctgtgcacccgtggaggcgggcttgccgccggccgcctcgtaggccttgcgcgcatcctcgtcattccacttctcaccgacgagcacgccatggttgagcatgatctcgcgctgcgcgcagctggcgacaagcgcatcgtgggtgaccacgataatcgtggtgccctgctcgtgcagcttgcggaacaggtcgagcacgattttctcgttcttctcgtcgaggttgccggtgggctcatcggccagaatcagcttcgggtcgttgatcagcgcgcgggccacgcacacgcgctgctgctcgccgccggagagctggccgggcaggtggtgggcgcggtccttcaggccgaccttttccagcgcctccatggcctgcttctcatcgaccaccgaatggtagtactgggccaccatcacgttttccacggcggtcaggtgcggcaccagatagaacttctggaacaccagtccgatgaggttcttgcgcacgtcggccagctgcgtggcgttcaggtcctccagcttgcggccttccagcttcacggagcccttggagggcgtgtccatgcagccgatcatgttcatcagcgtggtcttgcctgagccggaggagccgacgatggcgagccattcgccttccggcacggtcaggttgaggtcgtccacggcatgcaggtcgccgtagatcttcgagatgtggtcgagttcaagtagcatgacgtttctctttctttattcttcgcgaagcacgacggcggggtcgatgcgggtggcgcggtggacgggcgggatggaggcgacgatggcgaccagcgcgctgaacagcacggagatcagcgccagccaccagttgaatccgatggagcgttcgaacaccgccacgcacagccaactggcgagtccgtagccgattgcggtgccgatgaggccgccgatcaggccgtagagcgatgattcgatgtagaactcggtgccgatggcacgcgagctggcaccgagggccttgcgcaggccgatctcgttgcgtcgctgcgagacgatcgagctgattgtggtgccgacgccgacgagcgtcagcaccagcaccaccaacgagacgatccagaacagcgtctgcagcatggtgatgatgcgggtgtcggaggcggtgatcttggtgacctgctgcgccttgacgtgcatggaggtcatgtcgttgatgctggacaccagacctgcgaggtcgctggcgccggccgaatactcgatgacgtccacgccgcgcgtgatgccggtgagcttgttgacgtcggcgttggtggcgtagatgatcgagtcctcattgccgccggtgtccacgatgccggccacgcggaattcggtgccggaggtgtccatgatgtcgctggaaacgcggccgtctttggtttgctggtcgatcgaggagttcgacgaagtgccgttggtgctggcgttatcggatgcacggtagccgatggtgatggcggagccgattctcagaccgatggcgtcggcgatgtcacgtccgaccagcaccttgccgtcggtcggccacgagccgtcgaccacccagtgatggttgaggttcttgacctgcgccgcattcacgccggccatcacgtacggcgaggcgttgacgcgcacgttctcgtatcggtaggtggcgtatttcgcagaacccttggccttgaccatttcagtggtgtgctgcaccatcgccttgtcgatgccggccttgccgtcggcattggtcgattcggtgggtgtgacaatcaggttcgcgccgtacgcacgcatctcctcgttcatctgctgcggcacggcgaggcagatcatcgccaggcagaacagtgtggccgcgccgaccagcgacgccaccacggccatcaccgcgcgcgaacgccggcggaacacggcgctgaacagcattctgaagaacataccggtgttggtcatcggtttcctccttccacacctacgtagataaactcagcggccatggagcacctccgcgggcttgagattcagaatcgaacgaatcgaggaggcggacgccagcagcacggtgacagccagcagcacgaacaccagcacgaacaccatcggccgcatcgtgatgccggaaccgaataccacccggcctatcagctgggccacgccggaaccaagcaacgcgcccacaatcgcgcccagcagcgagattgccaccgtttcggccagcatcaggcgggataccgcggcatcggtggcaccgagcgccttgagcagcgccagctcgccagaccgttcgccgatcgaggcgaccatcaggttggccacggccacggctgcggcgatcaggctcagcacggtcatcagaatcatcacggcctgcgtcttctgcagcacattgccctgcaacgcggcgacctgacgcacctgcttggccaccgcgcccggaatcacctcttcgatctggtaggcgatcgagctcgggtaggcggtgcagtaccaggtctcccattcctcctggctcagcgcggccgggttcgcggcggccttacgggccaggtcgttctccggcgtggtcagggccttgacctcgatcttgtcgaccgaatcgggcaggtcggcgagcacctgggccgtggaggaggcgatgtagagcgagccgttgtcctcgtcgccggaatcgtagacgccggtgagcttgattttctgctcgttcttcttgcccgaggcggtggtcttgttgagggtgatggtgtcgccggtggtcacaccgagttcggaggccagcgtcttgccgatcacgccctgatcggaatcgtccttgggccacttgccgtccagctgccaccacgagcgcatgccttccacgcccacgacggtggtctcgccggtggaaatcttgaggtccttgttgaaccacgtgccgacgaccggcacgttggcaccgttcaccgtggcgtggatgttgagctgcggcgcgaagttggtgatgttgaacgaccagaagatcgtcttgatcttggccgcgtccgactccttcagaaaagcggtcgggtcgctggtggacgccgcgccgcccgactcggtgttgtacaggtcggaaacgaccgcgtccgccttgggctgcacggtgatgttcgaaccgtaggtggacagctcggcgttgagcttgtcgcccacgtcgaacacgacgcccagcatcgatacggacacggtcgccgacaggcatacggtcagcgcgataagcaggcgccggcgcagctgtcgggtgaacgagcgagtaatcatacgcagaaagaacatgattcttgtctcctgcctgactcactggaagtgggcgctcagcgcgtccagatccgtagtctgaatggtgatcttgccgtggccggtcttgtacgggaatggtatcgggttgcagccacccttgaagccgatggtcgccaggttgatggccacctcgcacttcttgcagatgatcttgccgtccttctcgtagtagccggcgtcgccgcagttctcgcaggcgtccaggccgatgccgtacgcgccaccgttctttcggatgatgatgaagcgcatgacggtgccgtccttggccttgtattcgaagcggtgcaggtggccgtcctcgacctggctgaagggaatggtggccacgccgtccttgagcgagtaggcttccggcggcgaaagagtgatggtctgatgggtcgcggcgacgccgacggtgagggtcagcgtgacgccgatcatggccacgaggctccagacagcggaggccacggcgcggcggcggaacgccttgtgcttgcggccgatggcttcgttcgcgccggtcagcggtatacggaagccggccaccacggaggcgacggccggaatcaggaacacgaacgcctgggccatgatcatccagtcgttgtggttgatcgaccaggcgagggccacgaatcccgtgtggcctatcgggaaaccgcgtgcctgcaggatctgcatgacaccggtcaggtgccggacgaacagaatcaccagcaccgcgagaacggcggcggtgaacgaggcacgcaccgcggtcgaacgcatcgtgcggaagatcgcggccacgatgatcgacatggccaggcccagcgcgaagccgagcgcgcgcagcaacatgtcggacgtgaagatcgggtcgccgggctccacccagatggtcagctgcagaatcacgtccggcagcgcgtagaacagggtgagcgcgatgtcgatggcggccacggcgttcgcaatgtgcatgaacaccttgtgctgctgccaattggtggtgatgcggcgtgcgaacaccaccacgacgatggtgaggatgtcggcaatgatcgcgcaccacagcaccggatagttgacgaacgtgcgctggttgatcacggccgaggcgcgcaggccggcgaatgtgatagcggcgatcaggccgacggtcaggccgatgagacgccaatgcgagcttatcggcttatctcgcccctcgccgaccgtgagcatcacgctcaggctcatcaccagcaatgcgggggccaaggtgcccggcatcactgccacgaattgttcaagcattcgcgtcctttctctgttcatcttaggctcccctccctgaggggagctgtccgcaaagcggactgaggggagtttttagaccgtcctaagaattatctccctaaagcggcgtaaagccccctctgacgagggggctgtctgcttagtcaatcaccactgacgcggggtgtagtcccagttgtcgaaggtgacctcgatgggctcggtccagaacttgtggttcttgacaccggtctccgggtcaacgtggagcatccagccgttcttctcaggggactcgatggagagcttgagttggtaggtgccggccttgtcgagcttgacgttggcgccgtagtgcgggccgtcggaggcgttcatctgcatgaaggtaccggaggtggcctggccgccctcgacttccttgccggtggacttgtcgatgatggtgtagttcacagtaaggtcagggacgaagtcgcccttgccgtagccgtagtcggtgccttcctgggaggcgtggatgtcggcttccaggtggaaggaagcgtcagcagccttcagacccatggaagcagggtacatgtcgatgggctggaagtagacggcacccacggtcagcgggccagcggccttgtcctgctccttggcggtgccggaggggccgaccgggacctcttcgaagccggaggtctcagtcggggcgtcggccttcttggagtcgtctttcttggcggtgtcggaggagctggtcgaggacttggtatcggaagcgttgttggtggaaccgcaagcagccatcgaaacagccatggagccggcgagcagcacgccgagcagagcggcaagcttcttgttcttcatcatttctcttattccttctgttgtggtgaatggattattcacgacttatctgtttttagttgtggcggcgtgggctggaatcgcttccattgccatgtcgcaagttgtgttgcgcgagatggtcgcaccgggcgttgtgctacgcctgcgcgctctcctcgtcagccttcgcgtccgacttgctcgcaccggccgcaagccgggccttggccttacgctgtttggcaaagccaaccacaaacagcgcgatgacggcgatggctgccagtacctgggcgatgatgcattcggtgtacgggtagaatccgagccagtcgttggtgggaacgcccggcaggtagttggcgggcagcaggtcgccctcgatgagcgcgtgcacgccgccgccggcgaagacaaccaccagcacggacatgaggatcgaggtgaccaggaagaacgggccaatcggaatctttacggaggtgaagcgaatcaccaggaagatgatcacgagcaccacggcggcggcgagtgcgccgaccaccatgccatgcgtatcctggctcatcgtgtagatggactggtagaagatcacggtttcggcgccctcacggaacacggcgaggaagctcagcatggcgagcgaaatcaccgtgcgggaagccaccttctcgccggattcgacctgcgaggagacagaggccaccgcggcttcggtcttttccctgatgtagcggttccacgcttccaccgaggacttgttgagcatccagttgctggtccacagcagcatgcacatggcgacgagcgcgcacacgccttccatgatctcctgcagcgggccggagccgccgaacgcgagcatgaagatgaccgccacgatgcctgcgccggccagaccggcgagcacgcccacgtagatccacttggtgaagcgcttgttgccggacttgacgaggtaggccaccacagcggcgaccacgagcagggcctcgagaccctcgcggatcagaatcaggaacgcctggccgaccgagctggtgatgaacttgaggaagccaccctcctcatcggccacgccgccgtcgagcttggcggcatcggtggccagcatgttcttcaggtcgtcgatgtacttcttgacttcggaagcaggcttgccggtgttcatcgaggagcggcacagcttgaactggtattccacctgggagacgcggttgccgctgatggcgctcagcacggtcttctcgaagccgagcttctcgtagtgctggtagtaggcgtcgttcacgagcgtggcgcccttggcggcgtcgccaccctcataggccttgtaggcgttgtccaggatcggaagcatcgcatccgcgacttccttccaagtcttggccgtttcctcggtgcgcttcttcttggcgtcgagctccttgcgctccttggcgatctgcttctggaggtcttcggagtactgcttcgggttggcgaggctggtgttggcgtcgagctgctgggccgtggcgtcgaggtcggcggtcaggtcgttgaccttctgggtaagctgatcggcctggtctgacgtgaacacctggctttgcaggtcctggaaggcctgctgctgcgcggtctgcttgtctgcgccgatggtgtcgctcaccactttgttgaagttggacgtcacgtagacggtggtgtatgcagccccgaaatcggacttggcacccattgggttgccgtccttgtattccttaaggccttcctgcaactgcgcttcgacggccttggcaacgtcggcccaggtcgcgtaatcgacgctggtggtgtcgtcgctcttgacggtggcagcagtggcagtggttgccggcgtcacggcgaacgcggactgcggaatgatggcggaggggaggaaggtcgcggcgatcatcgcaaacagaaaaacgatgaccgcaaatgcacgagccgagaccgtggccgactgcagacgaccggtgctgcccgacttcgcgcgcacgcgagaaacggcaacgcgcgtatcacgttcccgcatcgtgttcatttcagcggactgcgcgcaggcgcgacgaaccatgctgaattcctctcacttcaagtactcgaatggtccaaaaacaactatgaactctatagaaaaaaattcttgaacaacagtcttgattttttgacgggtgcgaggtaatagaaggcgttttagtgcttttcaaccccgcaattatttcactatctgagataactatgctcagagaggatggctttcccggaatgtgaacggcaacaccacaaaaagcggcaacgtgaggaataccggaatcggataccaaaatagtgccacgggtgaggcatacagcgacagcaccgtgaatgccagcaagccgtaagcggccagtgcggggccgtagcgtcgtcgcgcaggccgcaccgccagcgcaagaccagcagccagcggaatccacgtgacgtacagggccatcgaagtcagcggattgcctttgcgaacaccgacatgaccatccgaacgcacccaccgatgaatcgcccgcaatatgtttttctgccattgcggcttgtcggaggtacccctcagcggcgcaaggtcatgttcgatggcggcaagtcgttcggccgccacggtatcggcatcgccgtcggaagtatgcttccaagcaccttcagtcaggaaagacgcccattgcctgagatagctaggcgtgaacaggtagtcggaatcagtggggtacgcgaaattgacgcgcgggtcccaccatccgcgagtcaccccggcataggccgtggcatattcaaccggatgcgcgaggccgagctgcacccagacctgcagggccgcgagttgttgcgccgcggttggcctagggtgctcgcgcagagtgcggaaggtctcatcggtgcggtgcgggttgatgccggcggcggcccagttgaggtccatgattgcgttcagccgctgccgctgaatcttgtctatcgcgctgggatcatcgtgcgcgagccgggccactggctgggtgaccaggccccacacctcacgtccgggcgaccgattcgcatgcgtggcggccgcgcttaatggcgcccacacgccctgcgccacaacgatggcaaccgcaagacacgcaaacgcacgacgccgcgcgcctttgggcgtacagacaacgagcaaacagcagccggcgcatagcacgattatgagcgccgtccgcttggagacgatggtggcgaacaacaggatgacgaacgcgaatgccaccgggcggcgtgccagtaccgagccgcgcgtcagacaagcctccacgaacagcactgccaacggcagatagaacacggcgtgcaacgagtccttgcccatcgtggtgattgcgccgaccaccacatagttggtggcaagatagacgaggccgagaccgatgagccagcgcggcga

SEQ ID NO: 3486 - DNA, 2966 bp, Unknown
  R85_18m  MAG No. k141_5470
cagcacgccgccgcaggccatgatggccgcatcggtcagatcccagtcataggaggtgcggcacatgaacgccacgccgtcgcccttcttgatgccgtagtgcagcaggcccttggccacggcacgcacttcggcgaggaactcattggcggtgacggtcacccattcgttgtcggacttgtaggtatacagcggttcgtcacccatgcgcttggcgcgatccgcatacaggtcgtagatggacgtgccgtcgtccagaggcggattgccggcagtggacgtggtgagcagtccggtttccgggtcgatgtcggtgacggtcagatggccgtcatcccaatcgtcgctgtgcggcagttcgatgttggcttcctgcggcacatcggcattggacagataatcgggctcgtccggagtgtcgtcgtgaaccgggtgaacgaagtcggatcccaacctgagtgccttgcgggtcagattgatggtgtgctgcgtaaaggaattgataaccgacaactcttgctcctgtaaaaacctttcagtgccgttcgagcataagccgaacgctctcaaaccttagattgtaatcgttcacatcgaactcgtcaccttacgcaaccgtaggaaaagcctacgcaaccgtaggttttgggaggttctatgtggtggatggacactggcgctctgattgttgggtaacggactgtcgatagtggttggagatcgttcgactactgcctagatgtcatccaatcgagttgacgcagtagggatgcgaagatgaaaaatgcgggtcttttgccccgattgttccgcctaacgagtcgaatcgcccatatccttcactcttcggctacaattgcgcctcggataaccatgtccattcaaagtagaacaagaaagggctctcatggcgcaaaacccagaagccaccgtggtgttcggcgttttgaatgaaacgtctgaaacggaatcccgcgtcgcgttgacgccggatatcgtcacccggctgaagaggagtggagtctcctcgattattgagaccggtgccggcattgccgccgaatacaccgatgaggattacgaaaaggccggcgcaagggtgaccagccgtgacgaagtgctcgctcaagccgacgcgctcggtttcgtggaccgtccgtccaccgatatcgtgagcaagctcaaggcaggccagtgggtgattggtatgctcggttcctttaccgacgccgattacgtggccgcactcgagcaggccggtctggttggtatcgccatcgagaagctgccccgcaagctttccagcgcccagtccatggatgagatgacctcgcagaactccgtcatgggatacaaggccgctatcaccgccgccgatgcctatggcgcattcctgccgatgatgaccactgctgccggcacgattcgcccggccaaggctctggtgctcggtgcaggtatcgccggtctgcaggccatcggtacattgaagcgccttggtgcggtcgtcactgcatatgacgtgcgtcccgcttctcaaggtgaggtcgaatccctgggcgccaagttccttgatctgggacttgacttttccaagggccaggacgagggtggttacgctcgtgcgctgacccccgaagagcaggcccagcagcaggcggctgtcgatgagaaggccgctggcttcgacatcatcatcaccaccgccaaggttccgggccgcaagcctccggtgctgctcactgcggccggtgtcaacggcctcaagcgcggtgccgtgattgtggactgcgccgcttctgatcttggtggcaacgtcgagggggccgccgtaggcgaacaggtcaccgagggtggcgtcaagctgattggcgccccgtacctggcctccggtgtggccaccaccgcgtccaacctgctttcacgtaacgtggctgacatactcgtgcacttcgtgcgtgacggcaagctcggccaggatcttaccgaagagctcgacgacgcactggtggtcgccggtcgcgcaggggctccggctgctgccgccgagtccgagcagtccgagaagtaaggaagaaggaatattatgcctactctcgttgtttccattaccctgttcgtcctcgcgctgcttatcggtatcgaggtcatcggcaaggtgcccgccaccctgcacacgccgttgatgtccggcgcaaactccatccacggcatcgtcattgtcggtgtggtgattgtggccgccgaggccaacaccccgctggcttacgtgttcatcttcctggccgcagtgctcggcaccatgaacgtcgtcggcggttatgtggtcactgaccgcatgctcgagatgttcaagtccagcaagaacgagaagaagggggaggcgaagtaatgacctccgcaaccgttggagccatcgacatcgtcgcatggttcgtctacctgttctccgccgtcctgttcgtggtcggtctgcatttcatgaactcgccgaagaccgcccgaaagggtaaccaaatctccgcgttcggcatggtcgtggccgtgctcatggcattcatcgtgctcttcgccaagggcttcgtgaacgtcgtggccgtggtggtgctggtcgtcggcatcctgatcggtgccgtggccggtgtcgtctctgccaagaaggtgaagatgaccgacatgccgcagctggtctccgtgttcaacaccgtgggtggtggcgccgccgcgctcgtggccctgaacgacatcctgaccaaggaaggcactccggacatcgtggtgctcatcaccgctggtctcggtatcctcattggttctgtgaccttcaccggctcgctcatcgctgccggcaagctacagggcatcaagtgggtcaagaagctgaacctgccgggcaagggcgtatggaacattctgttcgccgtgctgtctgtcgcctcgctggtcatgctgtgcgtccagcccga

SEQ ID NO: 3487 - DNA, 3096 bp, Unknown
  R85_18m  MAG No. k141_5509
ctgtcaccatccgggccggcggactgctgacacgaaagtataaggcatgtccagcaaaggctcaggaaatacaaaattaacaaacggatgtttgcccaatacacagtaagtgttttcgcagttttctgtacaggaaaaagtcggaaaagtcaatacccatattccatatattggactcaatttgtggttttgagcgggggggggtatcactttcccagttatctgggaggtggttgggtgttcaagtacatcatcaagcgcattgtgaactacgtgatcatgctgttcgtggcagtatcgatgacgtatttcctggccagcgcattcatggatccgcgttcgaactacatgtcgcgcaatccgcatccgccgatcgcgtcgattaaccggtcgctcgatctggccaacatcaacgaccagacgccggtcgtcatccgctatttccgctggctcaagggcatcctcacccagtggaactggggcctgagcccggaccagtcgccggtggcgccggccatcgcctcccgtatctccgcttcgctgcagctggtgacgctcgccaccgtgctctccatcctcttcggcgtgagcatcggcgtgtacacggccatccgccagtacaagtggcaggaccgcgtgctcaacaccaccgcaacgttcttcctggtggtcccggccgccgtcatgggcctgatggtggtgctgctggccatcaacttcaacaacatcgtgggcagccgcgcgttctacgtgaccggcctgcactcctaccaaggctccaacccggtgctttgggtgtttgactatctgcagcacctgatcctgcccaccatcgtgatgacgattccgggcatggtgggctaccacctcacccagcgtacgtatctgctcgacaccatgaacgccgactacgtacgcaccgcccgcgccaagggcctgacgctcaacgcggccattcgccgccacgcactgcgcacctcgctgattccgaccgccgtggatgtggccttctccatcgccggcgtgttcaccggcgcggtgatcaccgaaaacgtgttcgccatcaacggcctgggcatgtacttcacccagaccatcgccaacaacgacatcaacggtgccgtggccgtggccgcgttcggtggcgtgtgcacgctgtccggcgcgctgctggcggatatcttctccgcctggcttgacccgcgtatccgactgagctgagccccgcgcaaaggacgatctaacatgatgaacgacaacgaaaacatggtctccgacgccgccgcccaggatatggaactcaccgatccgcagggcagcgaaccgcagtccgccgacgccaggaacgcccaggaggcttccagcgccgacgacttccaccgcaccggccgcatgcagctgtacgtgcgccgcttcatgcgccgcccctcggccgtggtgggtctggtggtgctgattctgctgattcttttggcgattttcggctcgaaattctcccagtggagctacgatgagcccgatttcgccgccctcgcctcgccgccgtccgcccagcactggctgggcaccacggtcggtggctcggatatgtacgcgatgatcatccgcggcctcggccgttcgttgaccatcggtatcttcagctcgttcggcaccacgatcatcgccgccctggtgggcacggccgtggcgttcttcgaaggctggttcgagcgcgtgggcatgtggctgctggatatgctgctcgtcgtgccgtccttcctgctcatcgccctgatcgtcggcatggcggccggcggcagcgactggctgtggctggccatcggcctgaccgcattcggttggatcggctacgcccgtacgctgcgcacgctgaccctgagcctgcgcgatcgcgaatacatccgcgcggcgaagttcatgggtgtgccgtccttcaccatcatcgtgcgtcatctggtgccgaacctgggttcggtgctggtcatcaacaccgtgctcggcgtgatcggtgcggtcaacagcgaaacctcgctgagcttcctgggcctgggcatcaaggcgcccgacacctcgctcggtacgctgctcaacgccggccagtccgtggtgcagacctcgccatgggtgctgatcttcccgtccgtggtgctggtcgtcctgaccttctccgtgcagctgatcggcgacggactgcgtgacgccatcgacccgtactcccgttctggcggcaaggccgagtgagaggggagacgggcatcatgagcgacgaacgcaacgcaagcaacgtaacaaccaacaccaaccccaacaccacaggagcgcaaggcatggcatccgaaccggtgatttcagtacgcgacctcaccgtcagcttcgcctccgaagccggcaccgtgcacgcggtgcgcggcatgaacttcgacctgtaccccggcaagaccctcggcatcgtgggcgagtccggctccggcaagtccgtgacctccatggccatcatgggcctgctggacaagaacgccagcgtcaagggctccatcacctaccacggcgaggaattgctcagcaagtccgatcttgagatgagcgagatccgtggcaagggcatcgccatggtcttccaggacccgctctccgctctgaccccggtgttctccatcggcgaccagatcaaggaagcgctggtcacccacaatccgaagatgaccgaacagcagattcacgaccgctccatcgagctcatgaacctggtcggcatcccggacccggaggaccgcctgaagtccttcccgcacgagttctccggcggcatgcgccagcgcgtgatgatcgccatggccattgccaacgacccggacgtgatcatcgccgacgaaccgaccaccgcactggacgtgacgatccaggcccaggtgctcgaagtgctgcgcaaggcccagcgtgaaaccggcgcggccgtcatcttcatcacccacgatctgggcgtgatcgccggcgtggccgacgacatcgtcgtcatgtacgccggccgcccggtcgagaaggcggacgtcgactccatcttcgaccacccggccatgccgtacaccatgggcc

SEQ ID NO: 3488 - DNA, 3417 bp, Unknown
  R85_18m  MAG No. k141_5870
catacaacggccacccccagtcgacaaaccgacagcccccgccagcgggggcaaatttgtagctgctggccccgccaacgagcggggctcattcatatctatgcccgtgtgccggtttcaggcacggcagcagatagcttcgggtgcgcagccagatattcgtgcagcggctgggtataggacatttccagttcgccatagttgctgcctgcacggaatgccgaatagttgtcgccgccctgcagcaggtaggagttggaagcgatgatcaccagatcgtcgtcagcgatcggcctgccgtcgatggtgaggtccacgatgccgacggtggccttaacccctgtatgctggttgccgtttccgtcggaatccccgagtgtgcatgtggcgccaccatctccgcactggacgtaccggtatcgcacattcgaggagatgccgagccatcggtgttccaattcaccgtcatcgttgcgatgaaactgctgggcgagcaccgccttgagtccgagtccggtgagggtttcgtgcgcggcgtggaactggagggccatcagactgtcgacctcacgaatcgtgaccttgccgtcctcgtccatatccagctgtttggttctcaggctgccattgtttgagaatccgaccacgggcaatcgggtgccggcatacacattccgcatgatcgactcccggttggcgtccgccacaagcatgcccaccgatccttcatgtccgacggacgtgcgcttgtcgaaattcgttcccggcgccagagtgccgatcaccgcgttccccgcactggccgcgtagtccttggccttcgtgtagagctgccgcgagcgcgctacgctgccgttcgacaccacgccggcggacatccaggcggcctgacgcggatgggcgtccagcccctccacgttgagcacgcccggaaccgcagtggcctcggtgccgttgccgaggttcacatcggccacctgaaccttggcatgacgaccatggccggtgacgatcagatcctgcacggccatgttctgtccgaagctaccggcctcatagatcggcgcccctccgtcggtgacgccttgttttacggcgtgggtgtggccggtgtaggcgaggtccacatcacgtccgagaccggttgccgccgaggcgtcggcgtgcaacaatgcgaccaccgcatcgactttgcccgaacgcttcagttcaccggccacgcggttgagcgcgtcgacggcacgttcgctcagatcggcgtcttcggtgatctgcggcgtggccaccgagccaagcgcgtccgtgagcgcgcccacgaaaccgatgcgcttgccattcaccgtgcgaatcgtatagtccttgacatggctcagtttgccggtagctgatttattggccgaggacacgttggcgcagagccagtcgatgccgttggccggagcggccacacgattgttgaagtcggccacgctgcgatcgaattcatggttgcccacggcagaaaccgtcagcccccacaccttggccatgtcaagggtgggtttgtcttgcttcacggccgactcatagggcgatccgcccaccagatcgccggtggagacgggaaccatattgtcggggttgtgactgtccgccaaggtgaaggcggccgcgacatcggccccatgttcgatgtgaccatggaaatcggtgatgtcggcgatggtcaccgtgcgtgtgccggtggccggatcctcgccggaaaaaggaacggctcctgcggcacccgcgatattgggtgccacaagagccgtaagaacgacgcataatgctgtgccaatggcgactccaggccgcccgccggccctgcgccggcgcttcttcatatctctgttcacgccattcacgctagggctgctgattgaacaaccaggcgaaaacaagcaacccgtgggtgaattcttagcggcgccttggttcagcagaagcggaaagctattcgccgaattcttcggcgcaaatgtctgctaccgcatctacgcaggcatcggcgatgagctttcctctctcggcactggaaccagccggattggcgagtccaccgtgggcgggaacatcgccttgacgcaccgggtagcgcacgtatgacttcgcactggctccggcttcctcgaccatgcgatccatgtgcaccatttcaggcgcataatggagcatcagcgaggtttcggttactgcggcgtgttccagtgcccagccggggaacaccaatccgtcgaataccttgtcgatcaccgactgaggaaccggatcccaccaattggtttctacgatggtggccactcccccggtctcgcgagtgaccaaatcgatggcctcgacgatgaacgcctcgttttcaaagtgtgcgttcatgacgacgattttggtgaaaccgtccgcaatcagctcgttcagcacatcatgcatctggttgatgacggtcacaccgttcatgtcgatggttccggggaacagcggaccgccgccggacagcggcttggacttgtaaccgtagctcaaggcgggcagtaccgtgccgtcgatgcgctcggccagatcctcggccacgcacgtggcgagcactgcgtcggtaccgataggcagatgctggccatgctgctcagtggatccaatcggcacgataacaggacgggctttcgcctccttgaattccggccaagtcatgtgatccatacgacggttgcttcccattgcagtactcctttgggttggtgtgatattgaacagtgtgcgcgccggctcccctctttcagggaatctggccgcatggcgagccaaggggagccggtggacacgaatcagatgtggttcagatccttgtccgtgttttcgtgggagagaatcattgccaccaaggcgatggcggcaacacccaccatgtaccaggccggagcgatggacgaaccggtcagtgcaatcaggccagtggcgatgaacgaagcggtgccgccgaagatggcattggccagattgaagctgaaggcgaatccggtgaagcgcacggaggtggggaatgtttcggtcaggtagctggacagggtaccgtcgttggcggtaagggtggcgcacattgccagctcgacgatcagcacgggccagaactgggaggtgttgagaatgaggaaggcgggaacggtaaacgcgatgaatgccacgcaggcaccgataagcaccttcttacggccgaacttgtcggaaatatggcccatgccgaacaccatgaagacgtaagcgaccaggcagatggtggtgatggtgccggactgggtggcttccatgccgacggtgtcggacaggtaagtcggcaggtaggtcagcacggtgtagaagccgaccgcgttgagcacacaggctccgaagctgatgaccagcgcc

SEQ ID NO: 3489 - DNA, 4887 bp, Unknown
  R85_18m  MAG No. k141_5962
ggacgggataatcgaatcgaacgtggaggagacggtgttttccttcagtccgaacactgcggccagcgccttggacaggtcgacatcaaagccgaccggggtcttgccgtcctcggccaggaactcggccggggcataggaagtatcggcgccgacggtcagcgtgccgtcgccggccacggaatcgggcagcagtgcggcaatctcgtcgtccttctggatgctgctggtgtcgaagccttgaatcgaagtgctggacgagtccttggatgaatcgccgctcttggatgcggtgtcggtgccgtcagtcgtgccacaggccgccacggcgatcagcatggccgcgctcagggcggcggccgcagcggattgtattcccttgcttagagacattggatttcctctctccggatagtcagctgggcgggtatgtttcccagatggttccagagcgtaggagtgcaatgctacggaagcgttaatcgtgggcgaaatgacccacaacgcggacatcctacccttggctcccctccggaggggagccaagggacgggactagtggcgcatgttggcgtagcgcatggcgcgtagggcttcgcgcttgtcctgctcttcgcgcagggcctggcgcttgtcgaattccttcttgcctcgggccagtgcgatctccgccttgacgcgaccgtccttgaagtacaggctcagcggcacaatcgtgtatcccttggcctcgatgccgcgggcgagcttggtgatctgcagtcggtgcagcagcagcttgcgcttgcgcttgggcgcatggttgttccatgtgccgttcaggtattcggggatgttcgcgccctccagccacatctcgccacggcggtcgatggagatgaacgcctcggacagcgatgcgcggccttcgcgcaacgacttgacctcggtgccggtcagggccagccctgcctcgtacttgtcttcgatggcatagtcatgccgggccttcttgttctggacgatgagtttctcaccggtttccttgggcatgtctcctcctttcgtgggcaataactcgtgagtagcaactcgtgggtagcaacgcaacatccgacgatatcacggaccggcctcgaatacgaaaaagggttcctcttcaagaggaacccttcaaccgcatatatcggccgaaccaaccggtcagtggacgaaccagtactgacccaaattggtcaaggtgcggtcgtgcatgttccacggaccaccccagttcatttcggagatctggaatgtgccgtcgccatacacggcttcgactacggcaacatggccataggtaccgtcggcaccatcctgaccaggcaggaaggagagcgccgcaccgacctgagggttgtggtccacgcgcaagccgtacgagggggcgttgcgccaccagtcgccgccattgccgagataggacggcgtgccaatgcccatctgcttacggcgttcatacgcccaatacgtgcactggccggcggcataggcgttgccgtaatcaccgttcgacgtgccttggccgccgacgctgggagcgggggcgggggccggcgccggagccggagccggagcgggcgccggagcgggggtcaccggagtagacggcgtaccgccctggttaccggtatccacccggttggcggcgtcctgctgttccttctggtactgacgattgtaggaatcgacctgggaagcgatcagtacggtctgggccgcctgcttggcggattgggaatccagactgtcgatcatggaagacagttcgtcacgccttgtttcgccctcctggcgtagcttgtccaaagcgtcacgttcgctttgcgcggtttcggcggcggtctgtgcggaagcggccttctcatcggactgggtcttgagcacagcgatctgcttttcgatggccgccagacgttcgccacggttcttcgacgtgctcagtgaggtcgcggcggaggaagccgcattcgcctcgttgcgggacaacgcgtcccgggactgcatggagttgacgaagtcctgtgtgctggtggcacccgtcaccacgctcatcacgtcggaagcattcgagccgtgcatctcgtcacgggccagctgggccacggcggcgtgcgcgtcatcgtagtccttgccggtctgcttgatccgctcctcgagcgtctccttgtctttctgcgcggcggaaagacgtttggatgcggcgtcggcctcgtcctgagcggtggcggcatcctcgttggcctgcgtgaccttggcctgcgcggcgacaatcttgttgttggtcagatcgtccagctcaagtaccttattcgccaggtcctggctggcaccggccagctgctgcttgagttcggcctcgcgctgtaccgacgcggcgtgctggttctgcgcattgatcaggtcggaataggtgtctgcctgggcaggctgtgccgagctgaacgccagacctcccacacaggctgcggcggccaccagtgccgccagtgcgggcttgatcacacgtacgttcgtcatatgtgaatagtcctttcgctcacttaagccaataccataacatgcgaacctgagaggcttgcacacgatgtcatcacatttctcgcgggtaagccggtcgcgttacgccctcaaataacgccgcaacgagatggttgaagcgatgatggacagcagtatcgcgcccacaaccaggaacggcgatatcaccagtaccgtgagctgattcacataaggaatccatgtaacggatttcgccagccagccggtgacgaacacgttgacgatagccgaaagcatcaggcacgagagcaccgagccgatcagcgaggcgatggtgccctccagaatgaacggcagacgaatcgtccagttcgaggcacccacgtacctcatgatttcggtttcggttcgtctggatgcggcggacatacgaatggtggttccggtcagcaggatggcgaccaccaccatcacgccggcgagcacagccgtaaccgccgtggctcggttgagcacggcgaacaccgggtcgaagatctggcgctgatcggtaacgtcttccacaccctccttgccagagagcacttcggagaccacctgatatttggtggggtccttgagcttgagccagagggagtcctgcatatcgtccgcggtcagcgtacggccttggaattcaccgttcgggtactgcttggtgaaggtgttgtcgtagaaatcctgcttgctgacatagtcgatgttggagaccacgtcgttgagttcatcgcgaatggttttctgcagtgccgtgatctcattggctgagggcgatttgccggaagcacagttcgcggactggctggtgccgtcgggacatagccacaccacgacctcgaccttgtcgtaccagtcgcccttggctttggtgatctgcgcctgagtaagcaccgaagcgccgatgaacaggaatgagatgaaggtgaccagcgtcagcgacagcagcatcgacaggttacgggtgaggttggcccacgtttcggacagaatgaatcgtgctcgcatgatgatcccccttactccttcgcgccctcagcgggttgatcgtcggatgtttggtctgcggcggactgctcgtcggcggactgctcgttggccggcggtgcgggcggttccggcggtgcgggcggctccggcggggccggcggctcggcggcggatgacacggacgtatcggcaaccgcggcggtcgcggcggactcgtccttgaacgggtcgaacgcctgggtgctttccagggcggcggcctgctcatccaacgaaatgcccttgccccaggtcagcgtgtcttccagcggcgcaaacgtctcgccatagcggccggtgcggccggaatgcacggaattggccaaacgggcgatgccttcagacggctcgtcactgccctcgatggccttggtcgccgccgccagcacatgatgggcggtgtcggacttggcttcgacttcggcatccgggaagaacagggcggaatcgtaggagccatgagcctcgtcacgcacgatcttgccgttgtgcagttcgaccacgcgcttgcgcatcgagttgacgatctcttcgttatgcgtggccatgacgatggtggtgccggtgcggttgatggcgtccagcacttccatgatgcccagcgaagtggtcgggtcgaggttgccggtgggctcgtcggccagcagaatctgcgggtgattcacgtaggcgcgggcgatggccacacgctgctgctcgccaccggagagctcatgcggatagttcttttccttgccggtgagtcccacggtattcagcaccttgggcaccaacgatttgatggtggaccgccgcgtgccgatcacctcaagggcgaacgccacgttctcccatacggttttgttattgagcagcttgtaatcctggaacacgaagcccagcgaacggcggtactgcggcacttgacggttggtgatgcgccgcagatcgttgccggccacgcgaatctcgccgctggtggcctcctcctcgcgcaacagcaggctcaagagcgtggtcttgccggagccggacgcacccacaaggaacacgaaatcaccgcgttcgatatcgaggttgatgtcgtcaagcgccggtcgggtgcctttgggatagatcttggacacattgtccagtgagatcagtgccataatgctgtttactcctcggtttcggcggcgcggcgctgttcatggcgccagcggatgccggcctcgatgaacgcgttgatgtcgccgtcgaacacggcctgagtctggctggtttcgtagccggtgcgcaggtccttgaccatctggtaggggtgcagcacgtaggagcgca

SEQ ID NO: 3490 - DNA, 2707 bp, Unknown
  R85_18m  MAG No. k141_6239
tataatttccttagaggtcctcatgccttgggcattattaaagaccgcttccacagctcttgccgtgccatcgtccgcaccgctttcgggaaaggcgtccaatccaaagcggataatgtcaggagatgaggcacgagtcagcatggatacctgttcgcatagtaaggcactgatactgtcatcaccatcaacgaagtatacatactgtcctttggtcgccaacgcaccagttcgccgggcaaggtgtgcaccttcattttccgattttgcgattatatggaaccgctgatcatccgctacttcacgagtaatgcattccagcgtaccgtcagtactcgcgtcatctactacgatgacctcgaaatcatccaaagtttgggccttgacgctttgcaaacattgaataatgtagggctgcacgttataggcaataacaacaaaagacagcaacggcacagcaaccacgacccaacaacatcatcgagcgtcgcgcggcttaacaataatcttgttctccgccacatccttcagatgcttgccatacggcgacttaccgtacctcacagcggcctccatcagctcatcacgagtaatccaaccgttctcaaaagcgatctcttcggcaacggcgatcggcaggccctgagcacgctgcacggtgcgcacgaattcgcctgcctcatacagggagtccatggtaccggtatccagccaggcatagccgcggccaagcgtctgcacgttgagggtgccgtcttccagatacatcttgttcagatcggtaatctccagctcgccacggggggacggcttgacctgcttggcgaactcggtgacgcgttcgtcgtagaagtacaggccggtcaccgcataattgctggccgggtgctccggcttctcaacgatggagatggccttcttgttctcatcgaattcgaccacgccgtatcgctcaggatcgtcgacgtagtagccgaacactgtggcaccatgttccaccgtggcggccttgcgcagcgtcctgcccaaaccgttgccgtagaagatgttgtcgccgagcaccagcgcgcacggctcaccatcgatgaactcctcgccgaggatgaatgcctgggccaggccatccggggaaggctgcaccttgtaagagaagctcacgccatactgggagccgtctcccaacaaacgttcgaagttcggcaggtccttcggcgtggagatgatcaggatgtcacggatgcccgccatcatcagcacgctcaacgggtagtagatcatcggcttgtcatacacgggaagcagctgcttcgaggtcaccgtggtcagagggtacagtctcgtgcccgaacctccagcgagaataatgcctttcacgaaaaacctgctttccacaacgttttactcgttattcgtctacaaacatattcagcttagctaactcttattcaaaatgaaaaatcgcacagagagcctgcgcggttttatcacttgaagtcaactgttatgaacagctatcagccgagttccttctgcacgtaggccctgagggtctcttcccagtcggcgggcacgtatccggcttcaccgatcttggcaagatccagtgcggagttgaccggacgcggagataccgggttggtcgcgttcgcgaagtactcggcggtgctgatgggcttgaccttgctgccgttgccgttcgtcaggtcgaacacctcggccgcgatatcagcccaggacttcacggcgccggagccggtcaggttgtaggtgccgtagggggcgtggctgtcgagcaggtggaagatcgcctcggccatgtcgcgggtgaaggtcaggcgaccgtactggtcgtccaccacggtgacctgttccagcttgtcggccgggtcggcgaccttgttggacagcatcatcatggtcttcacgaagttgtgcccctcgccgatcacccagctggaacgcaggatgtaatgctcgggtgcgttggccacggcgatgtcgcccgcagccttggtctggccgtacacgccaagcggggcgaacgcctccgtctccgtgtgttccttggcggtgccgtcgaacacataatccgaactcacgtgcacgagggtgatgtggtggtccttggccaccttggccagcagagccggaccctgggcgttcgccttccacgcgatcggacggccttcggcggtctcggccttgtcgacggccgtgtaggcaccggcgttgatgatcgtgccgtacaggctccaatcgtatgcctcgtatgccttcgggtcggagaagtcgaactcgtcgatgtccgtgtactcgaagccctccagaccatgcgcttccgcgtaggcgcgaatcgcgtggcccagctggccgttgcagcccgtcaccagggtgcgcttgggagccatgggcttggcgtccttgagcatcgggtggtgcagatcggcctcggagcgctcggactcctccagcggaatcggccactggatgttcagttccggatccgcaaggttcacgaacgtgtaggtcttcttctgctcgagcgaccagtgcgcgttcaccaggtctgtgtacaccgtgccgtcctgcaatgcctggaagctgttgcccacgccgcgaggcacgtagatcgccttggacggatccagacgggtcgtgtacacctgaccgaagctctcgcccggacgcaggtcaacccatgcgccga

SEQ ID NO: 3491 - DNA, 17104 bp, Unknown
  R85_18m  MAG No. k141_6780
cccgttgaggtgagtggcgttaaaccgattcgatgctcgattgtgcgggtttgttcatttcattaactccccttacaaagcaacgtacttttggtccaccggtagacctaatgagatattggatagcggcaacaatccaaggcgttagcttgcaatcgtccaccacaaattgcaagcacttgccaacattatcggttttcaggttgccggcgcactacccgactaggggggcaccgcgccttaatgagacgctacacgagcagtctcagcaactggtagagctgccacaggctacgcacgttgaagcgcgtgccgtcaaccgtggcgttcgcctcgccatcgcccacatggacgatcacggtgcgcccgttcacggtcagactaccgtgcatcgtgatatgattcatcttgcaaccttgttgattaaaggcgcaagccggtaatcaacgcaaaggcccgatgccgcaaacgtcgggccttttcttatcggctcacgccgattggcccgtcatatcaacggggacaccgcatgttacggcattacaaaccaatatatcagcaccccggtggcgatcaagaagacaggttccagaaaaagaaaaagggcctgggcatgttgcccaggcctcggttcgcggacagggcgagattcgaactcgcggagggttgcccctcaacggttttcaagaccgtctctttaggccgctcagacacctgtcctgatgcgcgttcacacgcgcaagtattcattatacagaagggagggatgttgatattcggcagtgcggtcggtcttggattcgcctgctggctattagcgatctctccctcagtcagctacgctgacagctcccccattaaagggagctaaagcacgatgagactcaggcctcccacttagtgggctcgatgacttccttgccgcccatgtaggcgcgcatggccttcggaatctcgatggagccgtccttctgctggtggttctccatgatggcgaccagccaacgggtggtggccagcgtgccgttgagcgtggagaccggacgggtgccgccatcttccatacgctcgcggatgttcagacggcgagcctggtactcggtgcagttcgaggtggaggtgagctcgcggtagcggccctgggtcgggacccaggcctcgcagtcgaacttgcgggcggcggaggagccgaggtcgccggctgcggtgtcgatgatgcggtagggcacttcgaccttggcgagcatctcctgctccatggccagcaggtgctcgtgctccttgtaggagtcctcctgcttggcgtagacgaacatctccaccttgtcgaactggtggacgcggatgatgccggaagtgtccttgcctgcggcgccggcctcgcggcggtagcaggaggaccaaccgcagtagcgcagcgggccgttgccgaggtcgaggatctcgttctcgtgcatgccggcgagcgccacttcggaagtgccgaccaggtactggtcgtcgggctcgcgcagacggtagatctcgtcggcgtgggagttcaggaagccggtgccgcgcatgacctcggggcgcaccagcgtcggggtgatggccagcgtgaagccgtgctcctcggcctggtccacggccatggtgagcatggcgatctgcatacgggccacctggccacgcaggaagtagaaacgggagccgccgaccttgacgccgcggcgcatgtcgatgccggccacgccggtgccgagggtcaggtggtccttgggctcgaagccttcggccgcgaagtcgcgaatctggccaaccttcttgacgaccacgtagtcgtcctcgccgccttcgggagcttcgggctccacgatgttggagagcttccacatggcggtggtgtattcctcggcggcggaatcggccttggacttgtattcggagaccttctgggacagttccttggtctcggcgatgagcttggccttctcgtccgccggggcggaggcgaccttcttgccgatttccttctgctgggcgcgagcctcttcgaaggccttcagcgcctcacgacgtgcggtgtcggaggagagcacttcgtcgacgagttccacggactcgccgcgcttgcgctgggattccttgacgatatcggtgtgttcacggatgaattgaatatcaagcatgggcaccagactagccgcgtaagcagacaccgacaatggccgaatgcgcgggagtcacgcggaaatcacagggaagcccgggaaagtccgcggacgggtccacccggccaatttcgtcagatgagacgcgattgaaccataatcgcgccccacggggctgttgcgtgcaggaaatgttcacgtacggcgcaccatggccgcaaacgacctccccaccgataacaataggagccatgcctcagcctgccctcaccgtgtttctgatcatcgccgcaatcgccattgtggtggtgctcatcgccgtcatcgtcatcgccctgcgcgcgcagcgccgccgcaagctggctcagacgctggagaagcgccgggacgacgaggtgcagtacgccttcatcgtgaatccgtccaaaccgcaggccgaagcccgccggctgcatatccagaggttctgcgaggccaaggggctcaatcgcatccgcttctacgacacccagcttgacaaggacggcagggtctgcgcgcttgaggcgctggaggacggcgccgacgtggtgatcgcggtcggcggcgacggcacggtgcgcacggtggcgagcgccgtctccggcaccggccatgcgctgggcatcatccccatcggcaccggcaacctgtttgcccgcaatatgggcgttcccgtggacgatatcgacgccgcgctgaccgtggccacctcccacggctcccgcctggtggacatgggccgtctcaccctgctcgaccacccggaggacgaccacggccacgccttcctcatcatcgccggcatcggcttcgatgcggccatgatcgacgacaccaaccccgagctcaaggcgaacatcagctggctcgcctacttcgtgggcggcgtgaagaacctgttcgcgccgaagttccgcggcacgctgacagtcaccagcgccgacggctcgacccacaccatcaagaatctcgatttccgcacggtgatggccggcaactgcggccagattcccatgttctcgctgatgccggcggcatcctatgacgatggtctgctggacttcgaaatcatcgacaccaccggcggcatcctcggctgggccaacctgttcggcgacgtggtgcaccagacgatcatcggcaagcccgaacagaacccgctgtccacgaactcgaccatcgaacaggtccagggtgtcagtgccgaaatcacattggaaaagccggccaaagcgcaggtggacggtgacatgctgccggaaacccgccacatccgtttctcggtggatcaccgcgcgctgatcgtgcgcgtgcccgacgcctccgcgctggaaaagaccgcgcaggccgctgcttcaaatgccacctcgaatttcgccgaaatgaccggtacactcgagccgattcgctgattcgccaatccgctaatccgttactacgatgcgtggccggtgactcgggcgacatgcatcgccaaataagcgatttcgtcgtcgctgatatccgtgtcgaggcgcagttcgagcagggaggcgatggttcgcgcgcatcgcagcgcagcggggtaggactcacgaatcaccttcatcaccggtgccggctcgtccgtcagttgctggtgctggtggatgcgtacgaacaggtagcgcaggtgggtgatgaaccggcccacgttcacggaactgcggtccaacgtgatgccgtagctgtggtcgatgatgtcaagcagttgctggatcacgcccgtcatcgtgtacgtataggacaggtcgccggtggcgaagccggcgttgaccagatgcatggcaagcgcggtggcctcgccgtccggcagcgtgacgtcgagccgtgcattgagcgatgcgagcatcgcacgcccctgcgcgtattcctgcgggtacaggttgctcacctcgccgagcagcgggtaggtgatgtcgatgccgcgccgcacccgctccaccgcattcgccacgtggtccgacagggccatgaccagcgtggtgctgccggtctcgcgctcccccagtccggtctcctgcatggattcgacgaccacgcggatgatttcgggcggaatgtccgccagcatctgcgccagatggtcagggtcgcgcccgtccgatggcacgaaggtgcgcacaactttcgactcgtcgaccgtctgccccggcttggcctggaaccccagtccgcggccggtgagaatcacctcaccgccgtcgccgcctttggcgagcacgacgttgttgttgaacactcgcagtatttccatggcatcctttcgcaacgtcattgttccacatcgatgatcgggctgccggctgatacggttttgcagtcgccgccgttgtcgtcgctgctaccgtcgccgatcaacggcgtgaccacggtcagttcagcggcgttgaccaccgtcaccaccaccacaacgctgtgcccggccgccgcgactttgccgaaatccacggtggccagtggctctcccgccgcgatccgctcgcctttgcccacggccacgacgaatccctcgccatccatattgacggtgtcaatgccgacatgaaccagcacttcgatgccgtcatcggttttaatgccgaaggcatggccggtccgggccacggttttcagcgtgccactgaccggtgctagcacggccgtctcgccggccgtctccggcacgacgcctacaccctcccccagcgcgcgggaggcgaacaccggatcgccagtcgcttccagattcatcaaccggccggcgaccggcgacaggatggcgttggagtcaggagtccgatcggaggcaggccgcgatggggaatcttccgcagactccgcatccgacgatgtcgcgccaatccctctcaccgcatcctgcgagcgtacgttctcgcccgccgagaccatctgcgcctccgtggcgcgcggcggcgtacggtacccgaacagcaccgtcagcaccatcgccattacaaacgcaacggcgatggacagcgcgtacacccatattctgtcaaacaccggaatcgtcagcaacgaggagaaggcgaacgccgtagtcgtgacgccccggaccatctgaccggatggcagcacggacgggaacagccagccaagcaccgcgctggtcacgccgccggccgcgcagccggcgagcagccagcggtagacgcggcggtgatgcagatggatgccgtacaggctcagttccgaaacgccacccagcaatcccgcgagcaacgcccccaccgcggtctgccgcatggccgaatccttgccgcgtacggccagcacgagcacgccagcggtggcaccgaagcaggcaaagttccatacacccatcggaccttggacgaaatcgtagccgagcgcctgaatgttcatcagcatcagggcattcaacggccagtgcagaccgagcggcacgagaaacgggtagagcatcgggatgatgagcgcgaataggaacggcacgtgcgcgttaagccatgctgtggccgctcccagcccaccgccgagccatattcccagaggcccgatgaccagtatggtgagcgcaaaaacgacgaccagtgagaggaatggcacgaacaccagctgtacgctgtcgggaatgacgcgcttcaacccgtggtagaccacggcgagcacggcagccatgagcaacggcacgaagacgttgccgccgtagtcgttgagttgaatcggtatgccgaacgccgacacggtgcaggtttcggcgccgaatacggcgttggccgagcattgaatcgccccggagagggcgctggatacggacgtcccggacattccggacattccggacatcacgccagtaaactgcggggtcatcagcgcggccataatcgcgccgccgagccaggggtcgacgtccagtttcttggccgcattgtaggcgatcataatcggcagaacggtgaacacaccctcccaaatcgccttgagtagtatccagccggcggaggtctcgccgtcaggcacgatgccgagtgcaacgatcacgttgacgatggcgatgaccagcgaggcaccgagcagtacacccagaatcgggcggaacgagtcagacaggtagtcgaaaaacgcggcagcccaagcgcgggcggcactgccccactcgcggacggtacgaggcgtgaagtgacgggatgtattggatgggccgcaactttgttcggcgtcggtggcagtatcgcgcgatggtgcggcatcgtcggaaaggtacggcgcggactgcgcgggttgcgtgggctgtgtggattgcgctgactgcgcgggctgcgctgactgcgcgggctgcgctgactgcgcgggctgcgctggctgagtgggctgcattgactgagtgggttgcgttgactgcgacgctgactgcatcactgccgatggcaattgcgctgccggcatcaatcgcgccgtccgcagccgaacgatctgctcgtacaccgaggcgaccgctccgccgatgatgacctgataacgattgccggctcgcgggaatgcaccgaggactccggggatggattcaagaccgtgctggttgacatggccggcatcggccagttcgaagtgcagtcgcgtggcgcaatgggtcaggctggtaatgttcgcggggccgccgacggcatcgacgatgcgcgccgcaatcactgcaggcgttgcgttcgatgcgttcgccacggttcctccttgctgccgtatgccactgtgttccattatcggcgctgggtgccccaaaagcacggcaatgccggcaaggcatcgcgaaacggcaactatgcgctacggtgctccgcgatggtgtcccgccataatgttccgcgatgatgcttcgccacacccgttctccgtatttgccgcagcgcccattccgacatcattccaccatgcagaatcctgcaatcgttgtcaaaaatcatcgttttttgctgcctattcggagtgtcgcgactgcggaagtcgtattctatctttcacacacgttgcgtagcagggttgttactcaaaacgaggcaagacctggagcgacgtggaatttgcgtatcgtaatatgcgaattccacgttgttccaggtctttttttgttttcgggcgacttcagacaatcgaagcctgaccttgcacgcggcagaggggccacgcaacaggcgcggtccgtcaacggcgaaaggacaaggcaatgacgacgacaacggcatcacccgtatcgaaacagacggcatccgcggcgcaggaaaccagcgcaaccggtgcggcggccaccgcaatcgaaaccatcgaaaccggcgtggccggagtggcgggcgcggccacaaacgcggcagccaacgcaatcgaggacctcgaagccgccgaatcgcacggcttctccacgcgcttcccgctcaacagcgcattcatcttcaccttcggcgcgctcggcggcatgctgttcggtttcgacaccggcatcatctccggcgcctccccgcttatcgaatcggacttcggcctgagcgtctctcagaccggcttcatcacctcctcggtgctgatcggctcgtgcgcaggcgcgctgtcgatcggcgcactgtctgaccggttcggccgcaagaagctgctcatcgtctccgcgctgctgttcctgctcggctcaggcctgtgcgcctcctccaccggattcgcgatgatggtgtgcgcccgcatcatcctgggtctcgccgtcggcgcggcctccgccctgaccccggcgtacttggccgaactggcgccgaaggagcgtcgcggctcactgtccacgctgttccagctcatggtcaccttcggcattctgctggcctacgcctccaacctcggattcctgaaccacaacctcttcggcatccgcgactggcgctggatgctcggttcggcgctggtgccggccgccttgttgctgctcggcggcctgttgctgcccgaatccccgcgttatctggtgaacaagggcgacacccgcaacgccttcaaagtgcttacgctgattcgcaaggacgtggatcagacccaggtgcagattgagctggacgaaatcaaggccgtggccgcacaggacaccaagggtggtgtgcgcgaactgttccgtatcgctcgtccggcgctggtggccgccatcggtatcatgctgttccagcagctcgtgggcatcaactcggtgatctacttcctgccgcaggtgttcatcaagggcttcggcttccctgaaggcgacgcgatctgggtgtcggtgggcatcggcgtggtgaacttcgtgagcaccatcgtggccacgcttatcatggatcgtttcccgcgcaagggcatgctgatcttcggttccatcgtgatgaccgtttcgctcgcggtgctcgccgtgatgaacttcgtgggcgacgtggccgtgctggcagtgccgacgatgattctcatcgctttctatatcctcggctttgcggtctcgtggggcccgatcgcctgggtgcttatcggcgagatcttcccgctgagcgtgcgcggcatcggctcatccttcggctcggcggcgaactggctgggcaacttcatcgtctcccagttcttcctcgtgctgctcgatgcgttcggcaacaatgtgggcggcccgttcgcgattttcggcgtgttctcggccctgtccatcccgttcgtgctgcgcttggtgcccgagaccaagggcaagtcgctggaggaaatcgagaaggaaatgaccaagcgctagacaaccggcacacgattcgcacaaaagttgacaactcttaacataagagtacccaaagtggcgaaaaacgtggcagaatagggaacatggtagcaaacaatgcgggtcagcccgccaccccagcagatctgattaatgtcgatgaggttatcggcaagtactatgacctcgtccccgatcccgaagtccccgagcagcgtgtcatcttcggcacctccggtcaccgcggatcgtccctgaagacctcgttcaacgaggcccacatcatcgccatctcccaggccatcgccgaataccgcaagaaggccggcgtcaccggcccgctgtacctcggctccgacacccacgcgctgtccggcccggccaagaagaccgccatcgaggtgctcgtcgccaacggcgtgcacgtgcgcgtcgactcccgtgacgacttcgtgcccaccccggtggtctcccaggccatcctgacccacaaccgtgcggtcgacggcacccagcgcttcgagggcgagggcctcgccgacggcatcgtcgtcacgccgtcccacaacccgcccaccgacggtggctttaagtacgaccccgtcaccggcggcccggccccggccgagaccaccaacgccatcgccgctcgcgccaacgagctgctcggcgacttcaagtccatcaagcgtgtgccctacgaggaggccatcaagtccgagtacgtcgagggcttcgacttccgcgagcactacgtggacgacctggagaacgtcatcgacttcgacgtgatccgcaactccggcgtgcgtctgggcatcgatccgctcggcggcgcttccgtgaactactggccgctcatcaacgagaagtacggcctgaacatcggcgtggtgcgtcctgaggtcgacccgacctggcgcttcatgaccatcgaccacgacggcaagattcgcatggacccgtcttccccgtacgccatgaagggcctggtcgacgagctcaacgccggcgcttgggacaagtacgatctggtcggcggcaccgacccggacgccgaccgtcacggcatcgtctgcccgaactggggcgtgatgaacccgaaccactacatcgccgtgtgcgtggagtacctgttcggcggcaaccgtccgggctggcctgagggcgcagccgtgggcaagacgctggtctcctcttccctgatcgaccgcgtggccgcatcgatcaacgcgaaggtcatcgaagtgccggtgggcttcaagtggttcgtggacccgctgttcagcggcgaagtcgccttcggcggcgaggagagctccggcatgagcttcctgcgcaaggatggccgcgtgtggaccaccgataaggatggtctgatccccgacctgctggccgccgagatcactgccaagaccggcaagaacccggcccagcttcaccaggagcaggtcgagcgcttcggcgagtcttggtacaagcgcgtcgacaccccgaccacactggagcagaaggccaagttcgcggcactgtccggcgacgacgtgaccgcctccaccctggctggcgaagacatcaccgccaagctgaccgaggcaccgggcaaccacgccaagatcggcggtctgaaggtcaccaccaaggacaactggttcgccgcccgcccctccggcaccgagaacatctacaaggtgtacgccgagtccttcgtctcccccgaggctctggacaaggtactcgacgaggccaccgtcgtggtcgacaaggccctgagcgagtgaaatcgctgcgttagtcgcgttcaccgcaaccaataaggctctgcattggattcatgcaatccactgcagagctttttttagcgcatatgcagttcgcgaccactgaaacacgcaggtcaacggttctcctcatgcaccgtgactgcattttctcaacatcactgcagggcaggacggccatatgaccgcgaaacgttcgcctgcctaccatcatcattgtggggtcacagcggccagatgaccgccgaagcgttcggtcggcttgcatcatggtcgagttttaacatcgttgtgggacgccacgacgaatttgcccattccagagctgccatcccacaaaagcgtgggacaacagctaagtcaatcgttttacatttcccccatcccacacactcaaactggaaaccccggaaagacgccattcctgccacacccgtcacagccattacccgaggggccgtgggacgccacgcaaaaatcggcaaaacatgcgtagcgtcccacacccattggcgcaaatccacgctcaatgcaccgacaacacccccaatcgaccactatgacacatttccctccacaatcgaacactagtcattcacgaaatccatcactacgaggcatcgcaatcgaacggcatgcaatatcaagcacacaccacaacaacaggtcgtacaaatattgcctttacatcagtccgtttcgaacatcatggtcacagcaggctctgcgccaactcttcaagagacatggcaactacatgaaactcgaatacggcaccgcgcgaagcaagcgccctcgccacgttgaaagcgaattcagcacgagcgtcctcgttagcgatacttgccgccgtggcgacgaagaccagccatctccgcccgaccagcacaccccttttctcttggtcacggcgccattgagtcttactcgtacgatgatgatcgccatcatattcaacagcgaccttgaactccggccacgctaagtccaacgttatgggagctccagatgcaaaagccgcgtccggcaccacatagttcgcaaccggccgtggaatcccatgcgctaccagagagagtcgttcttctgattctttgggcgaatcagcaccaggtgatatcagaggcaatgctcgaacgcaggacgggcgccctctgaatcgggtaaattgctccacgaacttcaccagatcctgatagattgcagcagcatcacgatccttggccaatactggctgtttgctcgtagcagcgatgacggcatccccgagcacaatcagggactcaaaagaaacatacggggcaagttgggcccatacgtgaaacaggtccagcgcaaacacgtgttggttcatttccacattggcggctttagccgcatgtttccaaatatgcgtttgcagtggtgcatggcgtgtacggaaccgcttgctcttaacgctggatacagtgtgcagcttggccgagtcgaggtcgcaatcggcgggaatcggtacggattgcagagcgagggaagtggtcatgccgaaaagcagcttcttgcccgcccgtttcgcttcctcagtgcagcgtgcgaccatgtcgcgtctgcgctgggcgaggctttcgctcatggtcggtgtcgctgcagaatcatgtgcaccactgttcggcgatgacgagtcgcgagaagtcgggtatttcgagtcagtagaaaatgaccccgcaaattcgggcggaacaaaaactgcctccgattcttccggaggctgatcgtatatagagcctggcagagctccatagttggtgatgccgtcggtcatcctgttcatgacaccaccatatgggtagtgggtgcggaaacggaagccgatccgaggtatgtggtcctagcttcacttacgcacattcattgtggataaccatgtggacacctcacttatacacatagtcatccacctcttcaaccccgatttgacacactaactgtatctgatatgattacagtatcataactgtacacatcatagttacagtatcgactcggtaaggaggtcgtttcatgaacggcgaccattcactggcagtgcacgcattggtctaccttgaccatcgcgccacacacctgcccagtcagatcctggccgagaacatatgtaccaatgcggcgcgcgtgcgcaaagtaatgcgaccgctcgcctcagccggactcatcgccactaaagagggtgctgaaggcgggtacgctctggcccggcccgccgccgaaatcactttgcgcgcggtagcggaagccaccggcaccacttttgtgaaagtgaactggacaccgggcgacgtacacgaggactgtctggtgtcatcttcaatgggcgcagtgatgaacgacatctatgccgggctcaaccgcacttgcctcgaacaactcgaacacaccaccatccacgacatcaccgaacagatattcagcgagcgcaaaggctaataatcccgcgcgtttcccctagccagcatcagtcgataacgcttcggcagtcaaagaagaaaacagacgccgcacggcacacaacacatcagcacaacgcactcttatcactcgaatacgtaaggaagtaaccatgtccatcagcacacccaatgccatcagcacacccagcacctcccccactatcaccaccgacgccctgatcattggattcggcaagggcggcaaaaccttggctgccaagctcagtgcagccggccgcaaggtcgtcgtcgccgaggcaagcgccgacatgtacggcggcacctgcatcaatatcggatgcttgccgtccaagtcactgattttgtccgccgaacaggcgcggcgggatggcgcgaacagtactcccgaaacccgcgaagcagcgttcgaggctgctatcaaggagaagcgccgcgtcacttcgatgctgcgcgacaagaactatcacaagctcgccgaccaagacaacatcaccgtaatcaccggccgcgctcacttcaccggccctcatagcgtggaaatcgccaccgctgagggcccggtcgccgtgaccgccagcaagatcttcatcaataccggtgccacgccgcgcattccggatattcccggtatccacactacgcccggcgtctacaccagcactggactgatggatctcgacgatatgccgcagcgactggtgattatcggttcaggattcattggacttgagtttgcctcgatgtttgccgatttcggcacggcggttaccgtgctgcagcacaatgccgagttcctgccgcgcgaggatgcggatgtggcggccgcgattcgcgcacagttggaagcgcagggcgtcaagttcctgttcaacgcggataccaaggccatcgcgcctgctgctgacggcggcgtcaggttgtccgttgcggtgaagggtatgactcgcggcgcatcgcaagcttgcgattccacccccgccggcaccgggaacgctcataccgatatcaccggtgccaccgacgccaccggcgccaccgacactacaacaaccaccagccccactagcaacccgaccgatcacgccacgatgtcacacgttcaaacgaaaccatcagacgatggcgagccgcggttcgccgagccggctgaagcccgattctgcctgaccaccgacgcggtactggtggccaccggacgtacgccgaacgtcgagggactgcatcttgaggcagctggcgtggagctcaccgaacgcggtgccgtgaaagtcgacgagcttctgcgcaccacagcagccgacatttgggctctgggcgatgtgaacggcggcccgcagcacacgtacatttcgctggatgactatcgcgtggtgtggtcgcagctcaatggttccgaccgtccgtacacggtgaaggaccgcaagcatgtgccgtcgagcacattcctcgccacgccttactcgcgcgtgggattgaatgagcgcgaggcgaaggcggccggattggattatgtggtcaagcgattgccggtggccgctgtgccgaaggcccaggtaatgcggcgaccggatggtctgatgaaggcgattgtggaacgcaatactggccgcattctgggtgcgatgctgctttccgtcgagtcgcacgaggtgatcaatatcgtcaagttggcgatggatcttgacgcgccggccagcacgttgcgcgatatggtgttcacgcatccgacgattgccgaggcactgaacgacttgttcgcgtagtttgtccgcatagcacgcccgcgcagcatgacccgcgtagcgcagcccgcaacagactcccctaatgcgcgcgaaggtcctcatcgacgtaaaccgatgaggaccttcgcgctgtcgtcatgatccgtacgtgacagcaatcacgtccgaaccagccgttacttcaagccgagcttacggtccagaatgtcggaggcatccaatcccaagcggcgtcggatgaaccagccaagaccgagcggcaggccgggagccaaggccatgccgcctggaccgagtgccatggttttggagttgcctgcgataagcatggtgcccttggatgcggccgtggccgtcgaaccatcgccgtccgcctctggtttgaggatttcgatgttgccgtcactggttttgtacagtcccttattctcattccagataccggatgcgccattgttgccggcctcacccgcagagaggaaatgtcttgtttttcttgtgagcgctcacctattcacgcgcgatggcatgtttttcaagcaaagtcaataggtgtgatgttattcacactcttcactacgttgttttgcctcgcactggacaaccccacttcagcaagagattgcacaacttgcgttagggtggagaacatgactatcacagtatccacagatgggtccgcattagggaatccaaacgggccaatgggctgggcctgggccgatcatgagcagaacgccggcggcaagcccggccataagcacgacgaccatggttatgatgcgggcggcgcgaccaacggcaccaatcagattggtgagctgtgcgcagtgctggaagctttgcgagcgcacccgggccctgagccattgctcatcgaatcggattcgcagtacgccatcaattgctcgaccaagtgggtcaaaggctggaagaagaacggctggaaaaattcgcagaaaaagcctgtgaagaacaaagagcttattcaggcgatcgaccgtgagatctcacaacgccctggcccggtggatttccgatgggtcaaaggtcacgccggcaacgagggcaatgagttggtcgatgaactggcacgcacctatgcgggcgattgccgttcgggtgcgcgcgacggctatctgccgattgaaggctggcagtcgctactgggctccgaatacgcacatggcaccgatgtgcctccagacgtgcagttggtgctggatggcaaggcggatgcggcaagtttgcgcaagccggctgcggcgacggattcgacggatgccacaaggccagagaccaagtcttcgtcacccttagcgacacaatcagcgcaacctgtacaatcagcgcaccccgtacaccccgcaaagccaagcggactgacggtatccggtacgctgaccttctcccccgcgccgaaaacgagcccgtatttcaacgggcagccgatgccgatcaaaggcagcatcgaaatcgaaggctatgtggacggcgacggcaacctgaccatcaccaacgcaccattcgtacgacactaacacccaaacacacgaatatgtaccgcaatcggacacgatgacacaaaatcgctcattcgcgttaggataggagataaggcttcacgccgttgatccatgcggcggaggcaaggatggcaaaggagaaaccatggataaggcacagcaggatgcgctgaagaaggcggccggcatcgaagccgccaagctcgttgaaaacggcatgatcgcaggcctcggcactggttcgaccgtgaagttcctggtggacgagctcggccgccgtcatcaggaggaaggtcttgagttcactggcgtaaccacgtctcgccgcacgcaggtccaggctgaaagctacggcatcaagatcgtggacatcgacgacgtggaccacatcgacgtgaccattgacggcgccgacgaagtcgacaagaacttcaacggtatcaagggcggtggcgctgctctgctgtgggagaagatcgtggccaccaactccaaccagatcgtgtggattgtggacgagtccaaggttgtggacaccatcggcaagttcccgctgccggtcgaggtcattccgttcggcgctggccacgtcatcaagaagttcgaggaccgcggctacaagccggtgcttcgtcttgccgccgctggcaaggaagtgcgcaccgacgaga

SEQ ID NO: 3492 - DNA, 13901 bp, Unknown
  R85_18m  MAG No. k141_7193
ggctcgctgtagtcggtgcgggcgtgggcgcctctcgactcggtgcgggcgagcgcggcggtggcggccacatagcctacggtgagcatgttgcggttctccaaagcctcaacgctgcttgcagcaccatcggcgtttacatcagcctgggcgtttgcggcggcgaggccttggccgagttcggcgatggcggttttcagtccggcctcgtcgcgcagcacgccgacgccatgccacatggtgttctggatgcgggtacggtcccagaccttgtcggcggcggtatcgtcagcagcagccgtagtggcaggagcggccagcgcgatcggcgcatggtcgaacacggcaccggtggcggagttcaggaacggttcgggtgcccagaccgcgtcgtcaccgtccgcgacggcggcaagaccggcgcggcgtccgtagacaagtccttcgagcagcgagttggaggcaaggcggttggagcccatgacaccggtacgagcgcattcgccggccgcgtacaggccggggatggaggtccgggcgtccagatcggtgcgaatgcctcccatgtagtagtgcgcggcgggcgccaccgggatcggctccttgctccagtcgaagccaagcgaacgcgtataggcgtcgatggtcgggaatcggtgggccaggaagctggctaggtcggggttctcgcgggtcatcggcgagacgtcgagcatcacgggcttgccaccttgcgcctgcatcacgcggaagttctcgcgggccacgacgtcgcgcggtgcgagttcggcgcgcggatcgatgtccttcatataccggtggccgtgttcgtccagcagcaccgcgccttcgccgcgcacggcttcggagacgaggaagtgctcgcccacggccatggcggtgggatggaactggtagaactccagatcggcgacctgggcgcccgcacgccatgcggcggcgagaccgtccgcagtggagaccggcggattggtggtgtacgggtacatacgacccgcgccaccggtggccaagatcacccggccggcggccagatccttgtcctgcccgtcgatcagcaggcggacgccggcgatgtggccgtcccgcacgatgaggtctttgaggaaggcgttctcgatgatgtggatgcgcgggttcttgcgcaccatggcggagacgtccagttcgagcactttgccggtggcgtctcccccggcatgcaccacgcgggcacgcgaatgagccgcttccaggccgcgcagcatgtgtccctgcgcgtcgcggtcgaagtggacgccggccgcggcgaactcgcggacgcgctccgcaccctcacgggtgaggatgtccacggccttcgggtcgcacaggccatggcccgcggccatggtgtcggcggcgtgcagcttcgggtcgtcgtcggagaaaatggccgcggcgatgccgccctgcgcatgataggtgttcgattccaccagtccggccttggttaccaaggtcacgtcgtgtccggtgccggccacggccagtgccgcggacagtccggcgacgcctgcgcccacgacgacgatttcagtgttgctcattgtgttgctttcctctgtttttgcgtcatctgctcccctcagtccgctacgcggacagctcccctcatgtacgagggcgccagggacggatcacgggtgaacgcgcagcatgcgctccagtgccaccttggcttcgcgggcggtgtcttcgtccacggtgatgcgattgaccacgttgccggcttcgaggttctccaaagcccaagccaggtaagccgggtggatgcggtacatcgtggagcacgggcagaccaccgggtccaggcagaacacggtcttgtccgggtactgcgcggccagacggttcaccaggttgatttcggtgcccacggcaatggcggatccggcgggtgcgttggcgatctccttgacgatgtacgcggtggagccagtaccgtcggcggcgtcaaccacctgcatcgagcactcggggtgcacgatcaccttgacgcccgggtatgccttacgggcacgttcgacctgttcgacggtgaagcgctggtgcacggagcagaagcccttccacagaatcatcttggcgcgggcgtaatcggccggatcggcggcgccgccctgtgccttgaacggatcccacagcggcatctcgctcagcggaatgcccatcgcgcgggcggtattgcggcccaggtgctggtccgggaagaacagcacgcgcttgccgcgggcgaacgcccattccagcacggcgtgcgcattggacgaggtgcatacgatgccgccgttgcgtccgcagaacgccttcagcgcggcggatgagttcatgtaggtgaccgggatgatctgctgcaagccatcggcgtcgggctgggtgccgcagatctcgccgagctggtcccagcattcctggacctggtcgatgttggccatatcggccatcgagcagccggcggacaggttgggcagggtcacgctctgttcgggcgtggagaggatgtcggcggtttcggccatgaagtgcacgccgcagaacacgatgtggtcggcgtccgggcgttcggtggcgttcttggccagctggaaggagtcgcccacgaaatcggcgtgcttgatgatctcgtcacgctggtagaagtcgcccagaatcaacagtttggagccaagaagctgcttggcgtcggtgatgagctgctgcagctcctcgtcggaggccttgcggtactcgtccggcagcacctgctggcgcggcgcgttggcgggcagacggtcgagcatcgaggcaccgggaccgtagctgggtgcggtggtgtcgaagtgccatgggtcctgggtcagtcctgcatcgcaggtgctttgcgcgcccagcttggcgatgatctcgtcaacggacggcgcagtggatagtgcggtcatagtggttcctttccctatatacgtctgtgatgccggcccgaagcgggtcggcgggaaaaatcagatgcgcgcggatgggatcagcgcgtcgagagcgtcttcacgctcaccttgtctggacagttccacgatgtcgtcgccatcggattcgtggggcgtgccgttctcgacaggtcgtttggggatgtagcggtagacggtggccggtcgttggcggccttcgcgcaccttctccccggtgtcttcaagatcgcccgaggcaagcattttgcggcggaagttcgccaagtcgagggtttcgccgccaatcgcctcatagacgccgtgcagttggcgcagggtgaacgtggggccgagcagtcgggtggccacgtcggagtattcgattttggagcgcaggcggagcagcgcgtagtcgatgatctggcgatggtcgaacgccagctcgggcagttcgtcttcggggaaccatcgtacgttgtcaccgtcctcgaagcccgcggcctcggtctggccgacgagcgcccagtacacgacggataccatgggcaatccgccatgggaccgggtcgggcctccaaaggtgtacagctgttcgaggtatcgcgggtgcaggtctgtggtcgattcgagggccgcgtaggcggactgttccaacgaccgatcggagcgcaggtcgccgccgggcaacgcccagcagcccaggaacggctgacggacgcgcttgaccaggggcagccagagacgggaatgagccgagttcgcggcgttgccggaatcggcggcactgttgccggtatcgcctttcgggccgagtgccagaatcaccactgacacgccgacctgtggcggtgcgctgcggcgctcggacacattgccgaatcccatgccatgcctctttccataccggttgttctccctgcattgagagcatagcactacttatagtcacaatgaccataaatcacatattggatggtctagcgcacgaatattggtcaggtagcgggccccaatcgctacgaaatcacgtccgtgtcttccgatttcgactgtgtcatttcggcgacgggcgggaggaacggcgctagggagggtagttcgtcgagactcttcaggcccatttggtcgaggaaggattcggaggtgaccaaaagggccgcgcgggattcggggtccacgccgtcttccttgataaggccgcgtaccgtgagcgagcgaatcacgccatcggagttgacaccgcggatcgcggccacttgggctcgggtgacgggctggcgataggccacgatggcaagcgcctccagtgcggcctgactgagtctcgcagtctggccgtcggtgacgaatgatgagacgaccggctcgaacgcggcgcgactggcgaactgccagccacgagcggtgcggcgtagttcgaagccgcgcgggcggatgccacgggattcatcgccctcatagtcatcgtgcagggcttgcaatgcctcttcgactgtgttgcggtccaatgccaaaatgcgggccagctcggtggcggtctgcggctggtcggcgaccatcagaatcgcttccagacatgcgggcagcccgccgggaaaatcgtctaccgtgaaatccacgtattcggggcgcgtctcctccactcccctcacctcggcctttgcggatccagccgtcgattcggcatccgccatgtgctcggttgcattcgttgcgtcaatccgttcagtcaccagtcgccgtccttacgcaaaatcgccttcggaaatgttcacgtcgttcatcgtttcgtctacgccggatacccacctcaggtgcagttcggcaaacggaccatcttgctgatactgcagcacaccttgtttgaagaacacgagcacggccatgaaccgagccaccacctcaatacgagaagtgcagtcccgggtcaattcgctgaacgacatcgactggtcgcccttggattccagtgctgcaatcagccggtcgcgcaccaccagcgattgggcccgcagatcgaccagcggcacgtgcagctggtggatcgatacttcggaggcgggcgcgttggcgatgacctgggcggccagttgggcgagttcgagcggggtcagcgtccataccagctcaggcaacatggcggcaatgccctcgtccatggccgccggatgcgggaatcggccggcattggcggcgatacgcgcccggaaatcaccggcggcctgcttgtaggcgcggtattggaggagtcgggcgaacagcaaatcgcgttcgcgcagcgcctcgagactttgctcgtcgtactggttgtcttcgccgccgggcagaatcgccacgcttttggcctcgaccaaaatagaggcgatgtcgagaaaggcgctggcctcatccatgtttttcgtgaagtcgagcccgcgcacgtatgtcaggaattcctcggtgatcgaggagagggaaacttcggtcagctcgagtttgttgttggcgatcatgccgagcaaggcatcgaacggaccggaatagacctcgaggttgacccggaagccggaagtggcggattcctccgtgctgatttcggcttccgcggagctcccctcagtctcgctacgcgagccagcttccctcagagaggggagccgagaaagggaagtctcattcatcgtttatcgaaacaatcgttacgccacgatgccgcgagcaatgagctcacgtgccacctcacggtattcctttgatgtcttgtgctcaggtgcatagaccaccacgggcgcggcggcaaccgtggaatcgggcagtttgatggagcgggagatgaacgtgtggaacaccttttcgctgaacgcctcgtaaatgcgctggcagacctcttcgcagtgcagtgtcttggtgtacatggtgatgagcacgccatccacttccaatgcgggattgatgcgggactgcactttttcgatggactgcataagtagggccacgccacgcaaggcgaagaattcggcggccacgggaatgatcacgccatcagctgcggcaagcgcgttcacggtgagcaggccgagcgatggctggcagtcgacgatgatgagatcgtattccgacttgagcttgcgcagcacactgttcaggatctgctcccggcccacttctgtgaccagttggacctcggcggcggacaaatcgatgttcgccggaatcacatcgatgttctcgaatgcggtgtgctgcaccacatcatgtggatccacggaaatatcgaacagcgcggtgtaaatcgtgttctccacggtattcgcgttgacgcccagtcccacagtggcggcgccctgcggatcgaaatcgacgataagcacgcggcggccatactgggccaacgcaccggcgatattgatggagctggtggtcttacctacgccgcccttctggttgcacatggcaatgacacgcgccggaccgtgctgttgcagcggttcgggtgcggggaaggtttcgtattcacgtccaagcaaatcggtaggcatactgtctaccttatcaacatccgggttcgctgggggtgcaacgacatacgttcccgccataggcagcgttccttgacggaatgcgctgtctttatcgcggatgtctcgccagtcgtccatcgttgcccctcgccccctttgccgggaatacctgctcgcctatcctaatgtactcgccgggctcgcctcggaacaccgttttgcagcgggcattccagtgttccgaggtttatggatctcgtctcgtactatgtcgatgcgcttactcggtgcgcagtgcggtggccgggtcttgcttggctgccttgcgcgagggaatcaggccgccgatcagcgtgagcaccacgcttaggatcaccagcaccacgccgccggtcaccggcagggcggcattgacgtccgcattgccgatgaagtgatgcaacacggcgttgatcggaatatcgagcagcacggtcaagcccacgcccaacaggccggagcataggccgatgatgccggtctccgcattgaacacctgggacacgttgtgcttcgaggcacccattgcgcgtaggatgccgatttccttggtgcgctccagcaccgaaatgtaggtgatgatgccgatcatgatcgaggaaacaatcaacgagacggacacgaacgcgataagcacgtaggaaatcacgttgacgatggtggtcaccgagctcatcatgagccccacataatccgtgtaggtgatcttgtctttcttcgagacggtgttgttgtagtcggtaatcgcgtcggcgatgtggtccttgtcttcgaagctgtcggcgtagacgttgatcgagctgggcgcgtcacgactcaccacaccgaatgcggcgaggttgtcgtcgtaggtgccggtcgacacgtactggtcgtagatcgcgacaagcacgtcgttcgaagccgtggcgatatacgagtcgaaactgtcggcgagctgctgttcgctcatcgcggccatcgcgtcggcctgatcgcccgtaccggaccgctgcccggcactcatcatcgacttggccatgttcgccttctgcgtcacgcccagcgaaaccacgtaggtgcgcgcgtcggccgccttggtggcgtcgtccgagggcgagaacgtcatgccgttgagcacgttcgtgttcgggttggccttctgatcggtgacgatggcgctggaggccgcacggtcgatcagatcattggtcagagcgcgcgtgtatcccacgccagcggccaacggtgtggccgaagcatccttcttcgccttgacgacgcccaccaccttgagtttggtggccgtttcgaggcgctgttcgattacatccttgtcgttgccgatgaatcggtagtggccgtcatcgcccttgacgtactggtcggatgccggaatcatgtacagcgtctggtcgagcgccttagcatagtcgatcttgtcttgtggagtgctgaccttgtcgccggcgttgagcttggacatcatctcgtggtagtcggaggcgggcagcaggccgagctcgtacagcgtggtcagcggcacgctgttgttgtcgtcgagcaccagcaccacctcgtccttggacttcggccatgaaccgttgaccacttggtagttgtcggtgatgaccttgcctacgagcttgctgtcgtccgctccaggcatgatctcattgaacgagtcgggcgcggcgttctcatcggttttgccggtcagcatcgacatctgctgcgaggtgatcgacgaggtgccggacatgccggacgagcttgtggacgccatctgcgaggccattgaagtggagtcgctggcaccgatcgtcacgccgtccgcattgaccagcgtgccatcggggtcgtggtcgaacacggagaatttcacgtcatacgtgtactggataccggcggaacccacatactggtgaatctcgctcttggaattatccaggtatttcttgaagcgggtcaggttgttttcggtaatcgaactggtcaggctggatgcctgcttgacgctgcggtcgtccgggtagatgccgtcggttctgtgcgtcttgccgccgtatccgtcatcgccgcccatctggccgcccatcatgctgctcaggtcgaaggtctgggagtcgatggtgatcgggtaggcggtcatcgtgtcacgctggatgtcgctgatgtatgcgttcacgccagtcgacaccgatagaatcagcgcaatgccgatgatgccgattgagccggcgaacgaggtcagcagggtacgcgccttcttggttttcagattgttgaagctcaacgccagcgacgtgacgaacgacatcgacgcgcggcccatcgtcttgtgcacggccggctgttcggccgtctcatccacgacaaacgggtcggagtcggagcggatcacgccgtcgcgcaggttgacgatgcgcgtggcatattgttccgcaagttcggggttgtgggtgaccatgaccacgaggcggtccttggccacgtccttgagcaggttcatgatctgcacggacgtgtccgaatcgagcgcgccggtcggctcgtcggccaggacgatgtccgggtcgttgaccagtgcgcgggcgatcgccacgcgctgcatctggccgccggacagctggttcggctttttattgatgtgttcgccgagtccgaccttctccagcgccttgcgcgcacgttcgcgacggtcggccttgccgatgccggaaatcgtcagcgcgagttcgacgttcgacagaatcgtctgatgaggaatcagattgtagctctggaacacgaagccgatggtgtggttgcggtacgaatcccaatcgcgatccttgtattggcgcgtcgagatgccgttgatcaccaaatcgccgtcgtcataccggtcgaggccgccgatgatgttgagcaaggtggtcttgccggaacccgagggacccagaatcgcgacgaattcgctgtcgcgtaggttcaggctgactttgtcaagcgcctgttgaacgaaatcaccggttttatagcgcttcgagatcgatttgatctgcagcatgaatacctcttcctggctgacggttcgctgttatgtactgtattgtcacgccttgaatttccggccgactttggtgctcccccccccgccgcgattccgctatgggcggacgcgtcgcaaaatggtgtgtctcaccgcgctctggggtgtgaggtcagatacgtttcgatcagggtttcggggcttacgtgcgtgtagatctgcgtggtggtcacgctggcgtgcccaagcagttcctgcacggtgcgcacgtccgcgccgccttggatcaggtgcgtggcgaaggaatggcgcaaggtgtgcggatggagtggtttggtgatgccggcccgctccccggttgctttgacgatttcccataccgattgccgcgagatgcgcttgccgcgtttgttgagaaacagtgcgcgtctctcgggaatcttggcgctggagcgccgttccagctcgccacgccccgcattgaggtatgcggtgatggcccggcatgcgtagctgcccaatggcacaagccgctgcttggagcccttgcccatgagtcgcgcgatgtgctcgtccaggtcgatgtcgtccagattcacaccggtggcttccgagacgcggcagccggtggcgtacatgaattcgagcagggccttgtcccgcaataccaccggatcggttgagccgccggctgccgccgcgtcgagcagacgggttacctcgtccacggtgagtacgtcaggcagggtgctggcacctttgggtgccttgactgcggcagaaacgtcggcagtcaccgcgtgctggccgagcgcgaagcgatggaattcatggatcgaggccagtcttcgggctttggagcgggcggactcccccgcctggtcaagggcggcgatgtagtcttcgacgtcttgtttggttatggcgtccggttcgtggatgccgcgggtttcgagccaatcaatgtatttggcgatatcggattcgtaggcggtgacggtggccgtggcgagtcctcgctccacgccgatgtggacgaggaactgctctgtgagtttggtgaatccgttggtcatgtgtttgttctcttccccacccgctgcgcgggagcccccctcgtcagaggggggctaataataggaaaccccgctcggaagcggggtttctagtgtgaagtcacgacttcaagcaatcaggcctcaaccggagcgttgacgtcctcaggcagggcggccttggcggcggccacgatggtcttgaaggtgtccgggtcggagacggcgatctcagccagagcgcgacgatccagctcgatgccggcgagacgcaggccctggatgaagcggttgtaggtgatgccctcagcgcggacggcagcgttgatgcgctgaatccacagcttacggaagtcgcccttgcgagccttgcggtcgcggaagttgtagttaaaggagtgcagcagctgttccttagccttgcggtacaggcgggagcgctggccgcggtagccggaagccctctcgagaacaacgcgacgcttcttgtgggcgttcactgcgcgcttgacacgtgccataatctattcctcagctttctaaagtcttgtttgttcctgtaagccctaagctcacttctgcagcagctggtgcagcttcttggcctgaccaccgcgcagcacggcatcggcggacagagcgcgacgcttgcgagcggacttgtgctcgaggttgtgacgcatggcggaaccgacatgcttcaccttgccggtgccggtgatcttggcgcgcttggaagcggcggaattagttttcatcttcggcattgctgccctccttgctggtttgcttcttgtcggaagtcttctgagaaatcgcggactgcgcgtcggccgcggcctgagcctgagactcctgcttggccgcgagacgagccgcctggcgagcctgacgctcggcgcgggactcggcgccacgacgacgctgctcggactgggtgtggaccttcttgcccttcggcgcaagggtcatgatgatgttgcggccctcctgcttcggcttggactcgacggtgccgtattcctcgacatcgtcggccagacgctgcagcagttccacgccaccaatcgggcgggagatctcacgaccgcgcaacatgatggtgaccttgaccttgtcgcctccgttaaggaagcgggtcacatggcccttcttcacgtcgaaatcgtggtcgtcgatcttcaggcggaaacgaatctccttgatttccgcggtgctctggttgcggcgagcttcacgagccttgatcttctcgttgtacttgaacttgccgtaatcgatgagcttggcgaccggaggcttcgcgttcggggccacctcgacgagatcgaggtttgcctccttggccaggttcagcgcgacggaagtcgcgatgacgcccacctgctcgcccttcgggccgatcaggcgtacctgcgggacgcgaatctcgtcgttaatacgtggttcgtcgctgatgatgactccaatcctctacttcaattccgtggcggggcctttgctggagtcctgttcaatgctttgggttcatggcaagccaaaaccagcgccaatatgcgctcagcttctgcagacgcatatcagttctttgcgtcattcctgattgcgcgttgtatatcgcaatcgctaggctgtttgccttgaacccgaggccttgaaaggcttccaggtggggttgccccgctttcttgatttctcaagccaaataggaatcttaccacatgcccggacattcgcggaccgtgtgtcgatgggtggataccggctacagtaggcataatgactcaggtatgcgtgatttttggtgcgggcgaatactatgcgggcacgcccgtggttcccaccggtgcgtatgtgattgcggccgatggcggactcgaccatacgcgcgagttgggcatcgtgcccgatgtggtggtgggcgacttcgattcgctggagggccggccgccccgcaccgatgtgcgcaccatcgcgctgcccgcgttgaaggacgacccggacatgctttccgcgctgaaggtcggctggtcggcgggttgccgcgagtttcacgtgtacggcgggcttggcggccgtattgaccatacgatttccggcattcaactgatggcgctgctggcccgacacggggcaagcgggtatctgtatggcgacgggctcatcgtcacggccatcaccgatggcaggctttcgttccccgcgcatccggtgcccgaggacggccgcatggtgtcggcgttctcccactccgatgtttcgcttggcgtgaacgaaccggggctgaaatatgagcttaaagacgacacgctgaccaatacggtggtgcagggggtcagcaacgagttccgcgacggcgtggacgcggccatcagcgtgaaacgcggcacactgatcgtcaccttccccatcgaagtggcgttgccacaggtgagcagattccatgaattcggcggcgatatcggcgagctggacaccgaagtgtccaagctgctggttcgctgacttgcatgccgcgcgcttgctcgtgatgattcgagacattcctccaaaggagaggaaaatcacatgtcggttgcgggcaatccaaattgtgagcgctcacaaaaaatacggcatttttacccaaaacgcacgctgaaacgttgccatgtgtacagagtcggcattacagtagcaactgttggtaaacaatggcccggtgtgccaaagcgcgccaaggccaccctacaagggagaattacatgacagttaagattggtatcaacggcttcggtcgcattggtcgtctcgccttccgtcgcatcttcgagctgcaggctcgcggcggccaggctggtgacattgaagttgccgccatcaacgatctgaccaccccggctaccctggcttacctgctgaagtacgacagcacccacggcaccttccgtcatgacgatggcactccggttgacgtcaaggccaccgaagactccatcatcgtcgacggcaaggaatacaaggtctacgccgagaaggacgccaacaacattccgtgggtcaagaacgacggtgtcgagtacgtgctcgagtgcaccggcttctacacctccgccgagaagtcccaggctcacatcaacgctggcgccaagaaggtcctgatctccgccccggccaaggatgacaccaccccgaccgtcgtgttcggtgtgaaccacgacatcctcaaggcttccgacgtgatcgtctccgccggctcctgcaccaccaactccatggccgccatggtcaagctgctggacgagaagttcggcatcaaggccggcttcatgaccaccatccacgcctacac

SEQ ID NO: 3493 - DNA, 5165 bp, Unknown
  R85_18m  MAG No. k141_7411
aggagcgccaaaaatggcagcaactatctggtacgagaaggacgccgatctgtccgtgttcgatggcaagaaggtcgccatcttgggctacggctctcagggtcacgctcacgcgctgaacctgcgtgactccggtgtcgacgtggtcgtcggcctgcgtccgacctccaagtctgtcgagttcgccaaggagcagggcctcgaggtcaagccggttggcgaggccgtcgccgaggctgacgttgtgatgatccttctgcctgaccagtaccaggccaaggtctacaaggaagaagttgagccgaacctgaagccgggcgctgccctggccttcgcccacggcttcaacatccactacggctacatcaagccgtccgaggatcacccggtgttcatggttgccccgaagggcccgggtcacatcgttcgtcgtgagtacgccgctggccgtggcgtgccggtcgtcgtggccgtcgagcaggatccgcgtggcgatggttgggctctgaccctggcctacgccaaggcccttggtgctctgcgcgccggtgccatcaagaccaccttcaaggaagagaccgagaccgatctcttcggcgagcagaacgtgctcatgggtggcgtgaacaagctcgtcgagatgggcttcgaggtcctcaccgacgccggctaccagccggaaatcgcctacttcgaggtctgccacgagctcaagatgctcgtcgacctgatgaacgagggtggtctgaacaaggctcgttggtcctgctctgacaccgctcagtacggcgactacgtcaacaccgtcatcaacgaggactgccgcaagcgcatggaataccacctgcagcgcatccaagacggctccttcgccaaggagttcatcgacgatcaggatgccggcgccccgcacttcaaggaactgcaggagaagtactccaacgagcgcatcgagaccgtcggcccgaagctgcgcgccatgttctcctggaacaaggatggcgtcaaggatgccgacgaggccaactccttcaccggcaagatcgcccgcgcccaggttcagtgagcccctgtagctcccgctggcgcataagcgcctgaggagagtacccagcacgtaccaaaaggccgccgctccgattcattcggaacggcggcctttcgcatggtcccaccatatagtcaaacctccaccacgtagtaaaatccccacgacgtagcaaactacccaccacgtggtgacgcaaaacggctttattccgcggaatacaaaattacgctgacatcgtggtagaagattcatcgcgtggtgggatagacagttgatatacgccggctatcaaatcaatgatgccttgctgtgttccccgtatgccgagctgctttatcggaagcgtttcatgggatattttcccaagaaaatcagcgagatcatggtaggcctcgtcgttgagagacacgcgatcctctggagcaagtagttgagccaaacggaatacatcatatttatgcttcttgagatcttttccgtctacgtgctcgccatgttgttctcgggcgttgagatccaaccatgctttcgccttgaaaggaatgagatatttctcgttaagcacgctgatgccttgtattgattcgcggccttgctgcagtagccgatagtagctgtcgttcagcatgatggctgacaggctggaaacatcgtttgcaatatgcaatggcgtcagggacgagttcggcacaatagggaagtcagggtgacgtgaaaatagctcgatcatagtgggatacccgtacgtactggggtgcatgaaacggtacaggtgaggctgtgcggagttcttcgtgatagaggtgtatccgccatcgcgaatgaaagaccacaatcgttgtgcaaactcgcgaagatgtccctcggcaatcagcaccatgtcaatatctttggtggctcggaagtccaggtcgttgtcggtcatgatgatgtcacaagcggtgccgccgatgattacgtaagaatcttcgtagccggcaaaggccgttctgatgagctgcaggccttgtgtcatattgtcactcctgagaaagtattgcggatggatccttgtatggcgtcttccaaacgttcgtcggcaatctcgccaagagtcagggccgtggaaatggggtcggcaaggtagtcttcctgcgtatattgagcaagtaggcggggatcgtacctccacagctccagaatatatgcattatctggcaccttttccaaagcggggtcgataatgcatagttccttgttgtgctgcttgagccaatgacgttcaacggcatagattcgcagttttggggtggccagttgcgtcctgcgcgaaagagcaaattcgccggccggaatcagctcgtcggcaatcatctggcgattgcgattcgtgacggtatatttgctgaatattggtgacttcaggagatgccaagatgatttcagtaaatcaagtcggctggtctgccttgaagtcagtagttcgacgctattgctgcggccttgcttggtgcggtgcacgaatgccagctgttctaacagcgtcacggcaacgctgacctgagcttcggtaaactgaagcgctcgggcaatatctgattggactttgctctcgttggagtagagcaaatacagccagaccagctgtgttgcgggggagaagggtcgcacctcgatatcctgtgcgttctccagcggccgtgaggagatgcgctgggtgaacaccatgcccagtgaagggatatacagttgggtaccgggcacgatgaaaggaacgtgattctgaatcaaggcttttcgctggtatgcagaaagccggggaaactgaaagacaatgggcagatccgtccgctgctcaagcctgctggcgtcggcggtgacgcgtgtgatgctgaatgggtgagcctctccgctcgcgattagcatgctcgtgttgtcgatggtgagtttgctgaatgtccgtccgttggtcagaaatagcggcagtgaggcagtgccatcccaagaagtgatttggcagggcagaccaagtgtctcgcgaatgtaatgctcggcatccatgtcgacctcaatccttaacgaaaatctgtaagattcacatctcttgttaagtatatagaatattattaagtatttcggggttggcatgtcgcgaatggaaagaaagggcagtcatccccgaaatggagacagcttagccgggaaaaaggacgacgccagcatccggagaagatggatgactggcgtcgggtaagctcgcaaaagctctactgaataacccacgcagaagtgtcggtggggagctggccttcgggggtcagcgggccggacgccagcaccacggagccatcgggcagcgcgaccggggcattgccgaagttggtgattgaggtgaacacccgcccgccaaccgccgcgcgggtgtacgccaccacatcgtcgcccatgtccacctgctcggccgtggtgtcgcgcgtggcggtcagcgactcctggcgaatcgccagtgcggcgcgatacagcgcgagcatcgagtccgggtcggcttgctccacgtccaccgcgtaatccttgaaccacagcggttgcggcaggtgcgggtcggcggccggcgtcacgccctcagcgcgcgtagccggcgagaagccgaaggaagcgcccgtgccgaactggccggcggcgcacagcggcacatggttctcgccggtaccgtcatcggccggagtcggacggctgaaatcggccaaggccggctcatcggcggcggtccaaggcagaggcacgcggcaaccgtctcggcccttgtccatcgtggcctgagcggtgtggaaagcggtcggatcctccagatggtcccactgaatatcggccacctcaaacaggcccagctcctcgccctgatagatataggcggcgccgggcaggccgagctccatcaaagcggcggcgcgggcgcggcgagtgccaagctcgcgatcctcgggataggtagtgccgttgcgcagcagccagtcgtgcggcagctggtggtagggcgcgcccttgatctgcggcaggccgtaacgggaggggctgcgcggcacgtcgtgattgttcatgacccacgtggtggtggaaccgccggtttcggccgccgccttgagtccggcggcgatggcctcgcggaactcgtcggcataccagttggcttgcgcgaagtcgaagttgaaggactggcccagctcgtccatcgaagcgtacaggtgctggtgctcgggcaccacccacgcctcggccacggcaaagcgcggcgggttgtactcgttgaacaccttgcgccattcgcggtagatatcgtgcacctcgcgacggtcgaacagcgggtggctgaagtcatgattcagcacgccgaccacgctgtattcgcggccgagctcttccaacggcttggattcgaggtccttggccaggccgtgcgccacgtcgatgcggaagccgtcggtgccgtggtcggaccagaaacgcagggtcttcttgaactcctcgtggatgtccggattcttccagttgacgtccggctgcgccttatcgaacaggtgcagataccactggccgtcggccacgcgcgcccaggccgggccgccgaagaaggattgccagtcgttcgggggcagttcgccatgctcgccgcggccgtcgcggaagatgtagcggtcgcgcgccggggagccaggctcggcggcgagggcctcctggaagaacacgtgcttgtcagcggtgtggttgggcacgatgtccacgatcaccttgatgccggcctcgtgcgcggccttggccatcgcgtcgaagtcttccatggtgcctaggcgcgggtcgacgttgcggtagtcgattacgtcgtagccgccgtccgccagatcggaggggtagaacggggaaagccagatggcgtccacgccgaggctcttcaggtagtccatcttctcggtgacgccggcgatgtcgccgatgccgtcgccgttaacgtccttgaagctgcgcgggtaaatctggtaaacgacggcctgcttccaccagtcgtcattgaggttatttgcggtcatgccgattccctcctgttccgggtgcgttgtggttgggttgttccggtcgcgcc

SEQ ID NO: 3494 - DNA, 5402 bp, Unknown
  R85_18m  MAG No. k141_7513
cccttatctgcggaacgggcgaaggccgcgtaggccttcagcgcctgggagaccttgcggtcgcggtgcgccacatagccgtcgccagcttcgagttcggcgcggcgctgggccagctcctcatcggtcagctcgcgcagtccgacggattcgtgcaggaattccccgacaagtacgacacgtacatcgagcagggcggtaccaacgtctctggtggcatcgcccgtgctgatcctcgacgaggccacctcgtcgatcgacacccgcactgaagacggcatggacaacctgatgaagggccgcgtggtcttcgttatcttgtacaccggcgctgtcgaactggagtagtagtcggtaaggcagtccgattgaggtaacgtaaggccactgattcgcaggtaatgcgagtcagtggccttactcgtgttcggggtatcactccgcgtcgctgatggcgcgcagcacgttgaccatttcgatggcgccaagtgcgcagtcgaagcccttgttgccggccttagtaccggaacgttcgatggcctgttcgatgttctcggtggtgatcacgccgaacagcaccggcacgtcggagttcagtgacacctgggcgatgcccttcgcggtctcgttacacaccaggtcgtaatgggaggtgttgccgcggatgatcgcgccgaggcagatcatcgcgtcgtaacggcccgtggacaccatgcgcttggcggcgatcggaatctcgaatgatccgggcacccacgccacgtcgatgtcgctctcggtcacgccgtggcgcttgaggccgtcgagcgcgccggacagcagcttcgaggtgatgaattcgttgaatcgtgccgccacgatgccgatgcggatcggcttggctgcgcttgccgcgtcggcgtcggcattggcattggcagtggcgttggccaccagctggccttcaaatatggtcatgtcagttctccttgttgcgttgtgcgaggacgcccagcaggtgccccatgcggtgttctttggtggacaggtagcgtgcgtcgaattcgttcggcgcgatgacaatcggcacacgggactcgacgacgatgcccgcctgttctagttggccgatcttgtcggggttgttcgtcatcagctcgatgcgcccgatgccgaggtcgcgcagtatcgcggccgccgtttcgtattcgcgtgcgtcggccgggaagccgagtttgagattcgcgtcgagcgtgtcgaggccctgttcctgcagctcgtaggcgcgcagcttgttgagcaggccgatgccgcgcccttcctgactcaggtatagcagtacgccgcgcccggcctcggcgatgcggcgcatcgcctcgtgcagttgcggaccgcagtcgcagcgtagggatccgaacacgtcgccagtcatgcactgcgagtggatgcggcacagcaccggtgcgagatcgttcgtgtcagtcgtgtcggccgcggaagtcccgttcacggaggccgttccggcggtggcggcgcgcgtcgtcgcggcgagcacatcgctgcccatcaccagcgcgacatgttcacccccgtcgtcctccgactcgtagccgatcatcgtgaaccgtccatactcggtgggcagactcacccgcgccacacggcgcactgtatgcggaaattcgtgcgtacggcggtactcctgcagctgcgcgatcgtgatgtaggccagatcgtgttcggcggcgaagcgttcgaggtcgccacggcgcatcatcgtgccgtcggccttcatcatctcgcagcacaggccgcacggctcgagaccggcgagacgcgccagatcggccgtcgcctcggtgtggccgttgcgttccagcacgccgcccgggcgcgccaccagcgggaacatgtggccggggcgtcggaagtcctccggtcgggtgttcgggtcgatgcaggccaacgccgtaagcgaacgatcgtatgcgctgatgccggtggatgtggtcacatggtcgatggatacggtgaacgccgtctgatggttatcggtgttcgtgatgcacatcggcggcaggtcgagccgatccgccagttcggcgctcatcggcgtgcagatcagtccgcgtccgtgcgtggccatgaatgcgatattgccgggggtggcgtggcgggcggcgcagatgaggtcgccctcgttctcccgaccctcgtcgtccgccactaccacgatgcgccccgcggcgatgtcgcggatggcgcgggccaccgggtcggagccgatgatgaaatcggcgttacgggtgccgtcgttcgtgatgtcgttgtcgtttgatgctgtcatattgtcgtgccttcgactgcgatattcgtttgattgcgttgttcagaatccgtgttccatcaggaaacgttcggtgatatggctcgtgaacggtgttccggccggacccgttgtgcccgccgacatggacatgagccgcgccacgtatttggcgatcgggtcgttttcgagattcaccacgtcgccgggcgcacgttcgggtagaaccgtgtgcgcggcggtatgcggaatgatcgccacgccgaaacggtcctcgtcggcgaatgtcaccgtcagactgatgccctcgattgcgattgaccccttctcggcgacgaaccgcatcaaatcatacggtgcgcgcaccgtgtacacctgggcgatgccgtcggtcgtgaccgactcgatcacgccggtgccgtcgatatgaccggacacgatatgcccggagaaacgcccgtcggccgacatcgcgcgttccacgtcgacatgggagccgcgccggagcacgcccagactggaacgacgcaacgtctcgtgcatcacgtcggcggtgaacattgtgccgtgtacggccgcgacagtcaggcatacgccgttgacggcgatgctttcgccgatcgccgtgcgatcggtcaccaccaccggcgagttgacagtcaatcgcgcgaagtcggcgccgcgctccaacgcgacgacgctgccgaggtcctcaacgattcccgtgaacatacgccacgctcccctcgatgacgatgtcgtcgcccaccgtggtgagcgaacggttctcgatgcggaaggcgccgtccggcgcggccacgccgtcgccgccgaccggaccgggtgcgtgcgcgccgccgaacagctttggtgcgatataggtgctcaccttgtcgaccactcgcgcttcgagcgcggaccatgccagtgtgccgccgccctcaatcatcacgctgtccacgctgcgttcgccaagcgcagccatgacctgtgcgatgtcggcgtggccatgctcgtccttggtgacgtgcaggatctcgcaccccgcgtcgcggtaacggttcgccttggcttcgtcatcgctcgcggtggcgagaatcgtgggcgtctcgtttgcggtggtgacgagcttggcgttcaacggcgtgcgcagatcggtgtcgagtacgacgcgaatcggatcgtgaccgccttcgagacggcaggtgagctgcgggttgtcggccagcacggtgcccacgcccaccataatcacggcgaaacgaccgcggtcctcgtgcacgcgtcgtctcgccgcttcgccggtgatccattgcgacagacccgcggcggtggcgatcctgccgtccagcgtcatcgcgtatttgagcatgacgaacggcgtgtgtgcggtgatgtaatgcaggaaaatctcgttaagcgcgtcgcattcgctacgcagcacgccctcgacgacctcgatgccggcttcgcgcagttggcgcacgcccttgcctgccaccagcggattggggtcggaggagccgatcaccacgcggaccagtcccgcgttgataagtgcctgcgaacagggcggctgcttgccggtgtggctgcagggttccagcgtgacgtagatagtggcgcctcgcacatcgacatggtcgcgtttcgcggcttcgagcgcgctgcgttccgcatgccaaccgccgaaatagtcatgatggccggtggcgatgatacggccgtcgcgcacgatgacggcgcccaccatcggattgggattgaccttgcctgctccgagcttcgcgtggcgtaatgccacggacatgaagtccctatcgtccatgtttcccctttccgtgtgatagggcatgtccagggtgtatggcgtgcacgagatgcacgggttggcggcatatgctcccggatacacaaaaaccctgaactccatcggaatccagggttttcgaatatcaggcaggtgtatgggtacgtacgaacatcgacgtatcgatacactgaccgtgactgtacatacatcgccatgttcccgcgcatatcgcgccgccgcaacttcttccatccagactatgactgtcggtaccggaatcacaccggttcatgaacgcttgcgcgttcccacattcctgtcgatccgttatgcggatcgtgatgctcgcggactgtaccgccgatcgggaatttcaccctgccctgaagatgcatattgaattattgattcgcgagtgtagctgtgtacgcgcggtaccgtgctcctccgttccatgatgcggactgtgatgttactcacacgccgatgcttatttcgcggcgttcacgaaggcggcgagtatggctcgttgattggcgccgaccttatgggagaacttggggtgccattgggtggcccagacgaaacgtttgccgagtagatatacggcttcgacgatgccgtccggggcatgtctccacggttttcgtcctcggcctctcgtcgtaactcttcaggcacatgtcgtgctcgccggccacgatgacgccgtcgaaccggtccgcgagatgtgcgatgcgtgtgtggtcgtcggtgaacgacagcatcaccggtgtgccgctcgcctcgatcatcatgtccgttatgtccggcatcgtctccgccgtcaccggcgaataatccgggcctaaacacacgaaattcgcgatttacagcgtcaaacggacgcttttgggcgattcgtgtcctattttgtgctgtaaaaatggtggatgcctgactcgcaagtgcgcgaatcaggcatcctttataggtgtgacccttgattaggcgagaccggaaagcttgttgatcagctccggatcgcgcgtggcacccttatctgcggaacgggcgaaggccgcgtaggccttcagcgcctgggagaccttgcggtcgcggtgcgccacatagccgtcgccagcttcgagttcggcgcggcgctgggccagctcttcgtcggaaagctcgacgttcaccgtacggttcgggatatcgatgttaatgatgtcgccgttcttgatcagggcaatcgggcccttgtttgccgcctcgggagcgatatggccgatggccagaccggag

SEQ ID NO: 3495 - DNA, 7997 bp, Unknown
  R85_18m  MAG No. k141_7746
aggaggacgggtaatccgggttgttgggccgctcgaagacatgggccagcgattcggctttgccggcaccggcggcgaagaaccatgtacggcgcgagcgggcaatcagcggcgcggtcaacgagacgcgcaacggcggcatcttgggggagtggttcacacccacggtgagcctatcggtaaccttgacctcatcatgacccgggaacagcgacgcatagtgaccgtccggtcccatgccgagaatcatcagatcgatgaccggttccggccccaattcattcaccaactcgcgctcatagtcgctcgcggcatcgtccagcagcgcatcattcgcggcatcggcggcggcgcgaacggaagcgtcatcactatcggcctgatccatcacatcggcgatgtcatcggctgaacgggtatcggccgccatctcatgaatattcgattcaggcagcttgccatccgccaccagctggtcaagcagcaggcgacgggcctccagagcattgcgatcggtgtcgtaagccggcacaaaacgttcgtcgctccaccagaaatgcacgcgcgaccaatcaaccgcatcagccagtggatcgttcagcgccaaacccaacggctgtgcggccgaaccgccagacagcgccacatccacacgtgtgcgatgcgtgccatcaggcaatcgttcggcgagcaaatcgagtagcgccaagacaaaacgttgcgcgccagcctgaatcatcagatctttattcggatacacaatgagttttcgagttgccatgtatggtccttatatggggtatgtgtcgtactttgcaatgtggattgtgttgtcagttgacaacgcataatacgggtggcatgccgggaatccagccatttgcagcaatgaaatgtgttgtcagttgacaacacaatgtacattgtgcgacatcgcatatgtcactttattactccgcggtcatgagcttcggcatcgcatgaggtaggaaacgatgagcaacggcgttggcatggctcgaccacaattgccgaactcatgccaacgccgctgtggcaacggttctaccgacttcagtgacgaatcagatcccagccttcgttgatgacctcggcgtagatctcatcgggatcgatgcggcgcagttcctcggtcagacagtcctcgatggtgcgcatcggcacggacacttcctgcggagtctggccgggcagcgagattagcgcttggtcctcatacgggcgttccagtgagatcacaccgtcctcacgggtcaggtacacgccggtcacggcctgcgcgtcgggcacgaactcagtttcgactggtacgccgagtttcagacgcagccatgcgcacagcatttccagaggcaggaagtcggccttgccggtcaccttcacggcggtgatgggcaggtgcggcggctgatcgagcatcgaggcgagcattgcgcgccagacggtcagtcgtgtccaggacaagtcgatgtcttccggtgtccaattgcggcgcaaacgctcgatcgtggcctccggattattggagtgcagcgcgtcggtgatgcgactgcgggccatcgcacccatcagatccttggccgggttcgacggcggtgtggtcggccaccacgccactacaggcgcatccggcacaagcagcgggataaccagcgtatccgggtggttgataaggccaccgcgcggacgcaagatgataatctcaccggcaccggcgtccgcgccgaatcgcacttgggcgttcaggttggaatcgttcggatcgttcgggccgtcggtcaaatcgacggccggattatcgcgattcgcgctcacctcggcggccacttcggtctcgttcggttcgccttcgccggactgatcggcaggattggtatccggtactacggcaatcacgcggcacgggtgctcacggctggccgagttcgcgatttccagcgcatgctctaggtccgcgtcctcggtggcgatgagtagcgtcagcacgcggccggtcgccgattcgccgcgctcctcgtgcagctgttcgattttgtgcgcaatctcgcgggtgcgggtgttcggcatatcgatgatcatggcatcctccagtggcggccgtcgcgcgccagcatttcgtcggcctgtgccggaccccacgtaccggcgcggtaggcctgcggctggccaagcgtggaccagaattgttcaatcggatcgaggatctcccagctgaggttcacctcttcggtggtcgggaacaacggcggatcaccgagcagcacgtccagaatcagtcgctcataggcttccggcgagttctcggtgaaggagcggccgtagctgaagtccatgttcacgtcacggacctccatggtggagccgcccggcaccttggctccgaagcgcatggtaacgccctcgtcgggctgcacgcgaatcacgatggcgttcttgccgagttcgcgcacggcggtctgctcgaacggcagatgcggggcgcgcttgaacgccacggcgatttcggttacacgcttgccgaggcgcttgccgcaacgcaggtagaacggcacgccagcccagcggcgggtgtcgatatcgaggcggatggcggcgtacgtttcagtggtgctcttggggtcgatgcctttttcttccaagtagccgaccacttcgtgcgagccctgccagcccttggcgtactgaccgcgcgcggtgttggcggcgaggtccttgggcaggcgcacggcggaaagcaccttggtcttttcggcggtcaggtccttggcggtgaagctcaccggctcctccatggcggtcagagccatgagctgaagcaggtggttctggatgacgtcgcgtgcggcgccgatgccgtcgtaatagccggcgcggccgccgatgccgatgtcctcggccatcgtgatctgcacgtggtccacatagttggcgttccagatcggctcgtacatggcgttggcgaaacgcagggccagcaggttctgcacggtttccttgccgaggtagtggtcgatgcggaacacggagctcgggtcgaacacttcggataccacgctgtcgagttccttggcgctggccagatcatggccgaacggcttctcgatgatcacgcggcgccatgcgccctcggacgagcgcgacaggccggaggcggccaactgcttggcaacctgcgggaaggcgcgcggcggcaccgacatgtagaaggcatggttaccctgtgtgccgcggtcgcggtcaagctcctgcacggtggcgctcagacgctcgaaggcctccggatcgtcgaacgtaccctgcacgaagcggatgccggcggccagattgcgccaagtcgactccttgaacggcgtacggcaatgcgcccggacggcggccttgacgaattcgatgaaccgctcctgtgtccagtctcggcgggcgaagccggtcaggccgaagctcggcggcagtaggccacggttcgccaggtcgtagacggccggcagcagtttcttttgtgccagatcgcccgtgacaccgaaaatgacgaggctgcacgggccggcgatacggggcagtctgaggtcgcgcgaatcgcgcaggggattgctccaattgggggattcactcataatgtacaagggtagccgccggcggctatctatcgctagaggcgatatgcgatttgggctgcgatttgggccacattgcgtgtgctgtgccgtgcgttgggccaatcgcgtacgcaaacgtgtacgcaacgccgtagttgaaatatcccaaaacggtgtgtattttagaagagttgcccctttagctcaacggttagagcagcgtccttttaagtcgtgggttgtgggttcgaatcccacagggggcacaacagatccttggaatcgcaatggttccaaggattttttgtttcgaccagcctggctcctagagtggtgccccatgtcatgcaccacgattcttgtcggcaaaaatgccagttacgacggttccaccatcatcgcccgcgatgacgattcgggctcgggccgttacgatcccaagcgcttcgtcgccgtcgcccccgacgaccagccgcgccactaccgcagcgtgctgagccatgtcgaaatcgaactaccggacaatccttgccggtacaccatcgcaccgaacgtgctgaataatcgtggcattctggccgaagccggtgccaacgaacacaacgtggcgatgagcgccaccgaaaccatcgctgtcaacgagcgcgtgctcggtgcggacccgatggtcgagttgcggccggctgtcggcgggccggacagcaccgattatcaggccgagcagcccggcggtatcggtgaggaagacatcatcacccttgtgctgccgtacgtcaccaccgcgcgcgagggcgtcgcgcggttgggcgaactgctcgaaacctacggcacctacgaatcgaacggcgtgattatttcggatgcggacgagatctggtacgtcgagaccatcggcggccatcattggatcgcccgccgagtgcccgacgactgctatgccacgatccccaaccagctcggcatcgacgacttcgacctcgccgatgcgttcggcgagcagcgcgaatacctatgcagcgccgacctgcgcgagttcatggccacgcatcaccttgaccgcacaatgggaacgtcggtctcttccaacggccgtcacgtgcatagcgccggattcggaacaaccgttgcccttcccacccgcttcaacccgcgcaaggccttcggcaccgcgacgccgaaggaccatatctacaacacgccgcgtgcctggtacatgcaacgccgcctcaaccccagcgaggactgggattcgccggccgcccgctacacgcccgaatccgacgacatcccgtggtgccgcgtgccggaagacaaggtgagcctcgaagacgttgatttcctgctgtcctcgcacttcgaaggcacgccgtacgacccgtacggcacgaccggcacggcggaatcgcgccaccgttaccgtccgatcggcgtgaaccgcaccggccatatggtggcgattcaggtccgcccgtatgtgccggcggccaatcgcacggtgatgtgggtatcgttcggctccggtccgttcaccgccgccgcgccgttctacgcgaacgtcaacgacacgcctgcctacctgcgcgacaccacgcccgaagtctccaccggcaacctgtattggacgaaccgcctgatcgccgtcgtggccgacgcgcattggtatgagacgaaccggttcatcgagggctatgcggaaggcgtgcgcgcgttcgggcatcggctcatcgagcgcacggatgagcagttgcttgctcgaagcgatgccgaatcgacgggtacgaatgcatggccgctcgatggcggccacggcgatgagaaggatgtgcagggcgtggcggatgtgctcgaagcggccaacgacgagatggccgactacctgcgcgagcatacaaccaagctgctgaacgacgtgctatacacctccagcaacctgatgcacaacagcttcgcaatgtccgaccgttgggccgagtagcaagacctcggctggggaggtaatagggatgccctgctgataacgcgtcagcagggcaaagccgcaatccgaatcagttgaagccgacgatgcgttcggcgatgagatagccgttgcgcacgatccagcggccggttttaccaggcagattgagcgcgcgggacatcagcttcgagcgcacatccttgccgatggccggagaataggcgtcaatcgcatcccacagctcggttttcttaacgtagttggccggatcgcgcgagagaatcaggaacgccgaggtaacgcatgattcgatcgtcaggaagtgaatcatgtaccggtacagcccctccggcaccgtaccacgttcgggcgtggcctcggtcatcagccgattgacgagccgcagctgatccacacgcttaatcatcacgtcggtctgcacgctctgaccctcgcgcccgatgaagtagtggtagaacggcacgtcgagatactggatgcgcttcacccacgggaacggctggtacgagtaatagaaatcgacgtagaacgtatgctccggcagcttcagcccggaatcgcgcaccacctgcgtgcggaaagtgagcgcatgcatgatgatgtactgcgccagaccgaacttgcccaggtcatcccagccgagcacgcggccggcctccatcacatgacggaagttcaccacgatcttgtggcgcttggtcactttgtcatacacatagttggtcaccagcatgtcgatcggctcgctggcctcacgttgcgcgcgcaacgtggccagaaccgtgtcgatggcctgcgggtcgacccaatcatccgcatccaccaccttgacatacatgccggtcgccgccgtgataccggtgttcaccgcgccgccgtggcctttgttctcctggtgaatcgcgcgcacgacacctggattggtgcgttccagtttgcgcgcgtactccagcgtgccgtctttcgaaccgtcgtccacaatcagtacctcgaggtcgctggtgtcgcttgccgaaagcagcgagttcacgcaacggtcgagataggactccatattgtatgcggggatcacaaaggtgagcgtctttgccgtgctggccatgaaagtcttacgtcctcacatatttagtcgttatgttcagtttcctgttcaaaccgtagcacctcgtctcccgactcggcagagtgttgcgcaacctgtgcccctgaactcacattctgcaaccctgaatcttccctgagcgtgtggtcgaggtccgtctgctctaagggcgatgatgccttgccgtccggggccggtgtttcggcatcgatcccgcgcttggcccggcgctcggcctccttccgggccttgacgccttcaaacaacagctgcggcttggaatcgagccggctcaggccatgccatgccaggtccacgatgtacgcggccagctgctccttgctcaccttgggccggtcggcccagtactggccggtgaacacggtcatgcccaccagcatctgtgcgtagtatggcacgcccttaacggagagcttctgccgtttgaatgtttcggaaagaatatcttcaacgcgcacggcgatatcgcccaacagcgagctgaacgagccggacggatcggtgctgggcgagtcgcgtaccagcacctggaatccttcggcgttctcctcaatataggtgagcaatgccagtgccgtacgttccacaatctggcgcggatttacggtcgggtcatccaatgcggcttccagcacactggtcagcgctcgcatctcacgatccacgattacggcgtacaggccttccttgccgccgaagtgctcgtacacaatcggtttggacaccttggcgtgtgccgcaatctcctcgacgctcactgcctcgaagcctttggcggcaaataatgcccgcccgatttcaatcagctgttcgcgccgctgcagcgatgtcatgcgtgaagaatgtgccataaaactccagcttagtcggcggctggaatcggcggggattccgtctgcgggctagacttggcagatatggatatgaatactgtgctcgccattgctggcgtgattgtggtggcgattgtcgtaatcgccctgagtgtgtggctgggcaagtcccgcaagcgcgatttggatcgtgcgatgggcaagactgctcccgatgataagcgcacccgcgatgccaaggccgctgccgatgcgcgactgacagcggaagctgaggctgccaaagagagcgagaaagccggaggtgctgcggccggtaccgctgcgactggcaagtccactgcggacgccgaatccgttagccctgctgccaagccggctgcggccgagtccacacccgaacccgccaagacggaaactccggaatcagtcggctcccgcct

SEQ ID NO: 3496 - DNA, 6764 bp, Unknown
  R85_18m  MAG No. k141_7996
tctcggggatgcggctgtgggacgcccggaacacccggcggtccagttcggtcccggcctggtcggccggtcgtttgggcatcgtccggaggggttccctgagccgtcatgaacggtagggccggcccttggggtccgtgtcccgcaggttcccggacgcctcggaccgtctgtcggtcaacttgccggggttcttcaggacggtgtatctgacgccgcgcatgcgcttgacggatttctcgtccccgtcgcggcgcgcctggttccacgggtgtctcctgactttgtcgggcgcgtcgctcgtccaactgacgatgtggaacccgtcgggcgcgcgttcggcgttcgggcaccactcatgcacgcatgagtcgatccaccgggccccgtccccggcgacgaccctgatggaggcgcgctgttcgggcgtcaacgtttggaagaacaggccgaacacgtccctgccgtacccgtcgtgcgcccatatcgcccgatgccgttcgtggtcgacgaccacggtgatgcacgtgtggcctttgcggtagccggtctcgtccacgccgatcgacgtgaggccgccgaacggagacggcatcgacgctttcaaccgttcggcgaccctatgggcggcgtcttccggcggcgcgccacgcgacgtgcggaaaaccgcttacggtcttctggttcgcgacgctcatcggccacgcgcgttccgattcgaaatcgcgtgtggaccggctgcccggctcggcccacggcacggaagcgaccacgacgccgcacgccgccgccctgatcatgcccgcggcgcctccttccgcatcgggagcatcggagcatacccgcacgtggacgcacccggatctcgagcacgggttcggaacgcggcggcgaatccgtgatccgcgcatcctctgcaaccgtgcctttgacgttcggcaatccggtgaatgggcttttgcccaggcgttcttcgtgattcatttctttggtcggaaaacagaatacgcgggaacgcccctcacgcttacgaaaccaacggctcgacgacgaaccgacatccacgaaaacagcaatagcgccatattttgcaatatggaagattcagggccttgaaatgacgaaccattacaatgagcggcgaacatacatcacacggcgtaggaaacgccaaggagggcatcatggccgagatcacatggaagtcgattctcaccaagctggtcgggggagaccaccttactgctgaggaatcggagtggttcgtggacgacctgatgcaaggtaacgccaatccggccgccgtgggtgccgcgctcgctatgcagcagcagctgggactgaccgccgacgaggtgcgtggtgccgccaaggccatggtctcccacgccgtgccgctgaacgtttccggtgggaccaccgacatcgtgggcaccggtggtgacggcttcgccaccgtgaacctgtccaccatgggctccgtggccgccgctgcagccggcgtgaagatcgtcaagcacggcaaccgcgctgcatcctcgaagtgcggtgccgccgatgtgctcgaagacctcggcctgccgctggatttgaagccggaggccgtcggcgaagtgggcgacgaggtgggcatcaccttcgcgttcgcccgcaccttccacccggccatgcgcttcgtgggcccgattcgtgccgcgctcggcattccgtgcgtcttcaacatcctgggaccgttgaccaaccccgccaacccggcacacgtggccatcggctgcgccaaccgcaaggtgagcccgatcatggctgccgtctacgccagccgtggtcagtccggcttggtctacacttcgcatgagggcatggatgagctcgcccccaccggcccggtttccgtctgggagattcgcgacggcaaggtcaccgaaaccgagttcgacccgaccgtggatctgggtctcgccaagattaccgtcgaccagctcaagggcggcgtgccggacgtcaacgccaacgcatttaaggacttcctggccggcaaggacattacgtcccgcaccaccgcgctgctcaacgctgcctccgccatcgtggctgacggcaatctggtcggcaacggcacactggccgagcgcttcgccgaggcctacaagctggccgaggatgctgtcgactccggcaaggctgaagccctgttcaacaagtggatcgaaaccgcccagtccaagcgttagacccgcgcgccgtcgtcgtagtatccgccccggtcccctgggcggtctttgcggttgaggattttggccaccaatccgcccagacccaaaatgacgcccagcccgaagagaatattgagcagcgcgcctaagagaggaatcgcgttcaagccgggaacgaatatcatcaccgtttcgcctgcgagaccgatgatgagcaacgccgtcagcagtaccgtagatgctttgaccggaccaagatcagggttcgggggagtgaagccgccatcatcataggcgtccatcacattatcggtatccagccagctggagccggtgaaatcacgggggcctgactgcttgccttttttgccgccacggctcgggcgagcatcatcggtgaacgagccgatatccaagtcatctacggaaagcagtgcttccttctcgcgtttcttggcctgcttctcgaactttttggcctgcctggaggaagccacgtcatgcaagtcggcctgatgctcggcttcgaacgcggcccacgccgcatccaaatcgttcatgtcatgcgattgcggtgtatcggcaccattcgtggccggtccggcggcaccgggagtcgacgacttggacgaagtatcggaatcctgtccgttgcccggcgtgggggttggccgctctccgtcggcattgctattctggttctcagtcataactgtcactctaatcaggcgaccggccaatggctagttcgtctgcgggaggaatgccaagtgctctactggttcttcgtcaaaggtctcggccctattgctcatcatcgtttgagccctgctgtcagcggactgaataacgtgcctcgagagggtggcgcgattatcgcagccaaccatctggcggtgattgacgatgctttgattccgattacctgcccgcgcatggtgcacttcatgggcaaagccgaatacttcgagggcaagggattgaagggcaagttcaagaagtggtggttcacgtccgtgggcgtgttcccggttgatcgttccggtggcagcaagtcgcttggcgcactcgagcatgcacgcgagattatcgaggatgggcacctgttcggtatccacattgaaggcacgcgcagcccagacggtcgactgtacaagggacacaccggtgccgcacgacttgcgctcgagaccggttgcccgattgttccgaccgccatcatcggctcggacaagctgcagccgattggcacgtcgattcccaagaagggcaagaccaaggtgttgtatggcaagccgattgaggttgcgaagaagccggctgatgaaattacacatgatgatttgcgttcgctgaccgatcgtgtttccaccgcaatccagaaaatgagcggtcaggaattcgtgaacgaatacgcccagaaggtcaaggccgagctcaaggcccggcaggccgctgaagaagccgaaaagtaattaacaaatgaggctccctcgtctgaagacagagggagcctcattcaaatctcacacgatggtgagggtgatgacggtggggttgccgttggcatcgcgcaagcgaatcttgccgccgttggataggtccgtatcgccacttttcacggtacgtaccgtgccgaacaggccaccgagcaccttgtcggttttcacctcgaacccgagaccttcaagtgtcttggttacggcgctttcctgtttgccgacaaggccggacggtatcgtcgccatctccggacccttggaaatcaccacgtccacgctatcgccccacttcagctgggctccggcttcctgagacgcggaaatgacttgaccggcctcgaccttgtcatcgtactgttcggtgacattggccgtgagcttcaactcgccgagcgcggcttgcatctcatcctgggtcttaccgacgatgttaggcatggtcaccggcatcggtcccttgctcaaagtaaccgtcacctcatcgttgtgcttggccgtggtaccgggatcaggggagatcgtcaatgccacaccctgcggcgtgtccatcgaatactcatccttcgactcgtcatgcttgacattatcgaagccggccttcttgagcgcgttcaacgggtccttgccattggccgaattcgcgtcgagaatatccttcgggatggtggtcatccgcacgcccttggacaccaccaccgtaagctcctgattggctcgcttgcttatgcggctgttcacaacggccttggtcttgttcacggaagaagagatgatcttgccttccgccacgtcgtcgctgtattccttgtgcgtcttgtaggggatgccgagagccttcaacgtgctctcatacgtggcccaatccgcgccggccaacgagcattcggtgcttgcattcgcatcgcaggtcacgtcatccggcttgggcacactccaatagctgcccggtccggcaaaccaccaccagccggcggttccgccgattgcagccagtaccagcacgatcaccagtacgatgatgagcggttttttgctgcgctgcttctttggcccggtgccgttggaagcgacgtccggctcatcggaaagggcaagcgctcgggtgaaggcatcgccggcctgaggcagcacttgtgtctcgctgccggactgtgccatgatttgcgtcttatggggagctgaagcatcggctggcgtcgacgaatcaagtgccgtggtgggggcgaccggaggagccggaggattgacgtctgcggcgccaccggtatcgacggtattgcttgcgacatcatcggccaaaaacgctggtacggacggcttgaacgttgctgcaccggcaggtacgccggtcagcggggcctgctcggcgatattgcctaccagcgctgcagcggtggcatcggtatgatcacctccgatgggttcggcatgcaaacggtattgccacgcctccagcggcaatttggcggccaactggctcaattcctcagctgctgccgcgccatcggcggggcgagcatccacctgacgcgcggtcagatgggcgatgaacgccgccacggacggatcaatgccctgacagaccgtggccacggacggcacgtcctcatgaacatgcttgaagacaagcgtcaccggattatccgaatcgaacggcaccttgccggtcagcatctcccatgccatgatgcccaccgaatacaggtcgccttgcgcggtggcctgattgttctcgatcatttcgggagccagataagcggcggtgcccaatagcatgccggtggagctcaatgtggcctggctggcggccttggccagaccgaaatcagtgatctgcacatggccgcgatcattgatcaaaatgttctcgggcttgatgtcacggtgaaccacgccggcgcgatgtgcggaagccagaccatccagcgtctccgcgaccacgcgcagcgtctcacgtacggagaatgtgccttgggcgttcatctcatgccgcagattgacgccatgcacatattccatgaccagaaaatcaagtccattgaactcgccggtgtcatacacctgaacgatgtgcgggttggcgatggacgcggccgaattggcctcgcggcggaaccgttcgacgaactgctcccgatgcgggcctttggcgagttgtgtgtgcatgaccttaatcgccacggtgcgccccagacgctcatcgatggcctcatacacggtggccataccaccctcggcgatattgcgcacgatgcggtagcgtccctcaatcatctgcgcgggctcgttctcactcatgttgtatcgtacggttcctttaatcacgactaaacatgttcagtgtacatggccccggttacgcggccggagcatcggcgcatagttttcacgggttttcaccggtgttcatggtctcatgacccggcggctcgcattgtggactatcgcaaggattcggggacgaatcgcgcacaagcctcggtcagacggcgctgcgcttcggaattcagctcaagaccggcaatcgccttacgggactcaccccatagggcagcgatgcgctcgcgggatcgatcaagagcaccggtcgacgtgaacagttcaatggtgcgggctacctggtcgtcgttgcgacaatccgcttcgaagatggcaatcagatcggccttatcctccgtatctgccgcagacagagcatcagccaacagcactgtgcgtttgccttctcgaatgtctccgccaacgggtttcccggtattgcggcttgatccgacgacatccaacaggtcatcggccagttggaacgccagtccgagcggccggcctacggccaacgcgcaatgcctggcctgatccgggctctctcctgcggccagcagtgcaagcagcagtggggcgatggtggtgtaactggctgtcttccagcggaatacgttcaatgaggcgttcgccagagcttcgggatcagacaacggggtcatctcgacggccaagtccagtatctggccgatctccacctcgcgctgcatggtaagaaacgcctcgttca

SEQ ID NO: 3497 - DNA, 22562 bp, Unknown
  R85_18m  MAG No. k141_8013
acgggcatacggttctcgcgacaccactgccacaccgtctgctcgttgaagccctcacgcctcgcccattccctgacacgcatgacttaattatatcacacgaaaacaaactaaagcaaataatcaatctagcaggttataaccccatcaccatctactttttaggaaacatcttcgctgagacctataagttgatccgagagtacattctgctgttggggagcaggattggcgtttattttattcctcgtccgccctgttctggcgcagctgctcaatgagatcgatgacggtttcgagttcaggagtcacatcgtctgaaggacgaacgttatcctcttcgtcgtccatctcatcatcctcatcatcatcggcaacggtgttgttgaggatgtcctcttcggtggcctcgtcgtcagcatcagacttggactcgtcgctggaatcagctgcatcaacatccacaacggaatcggatgcgttctgtgcaacagactcatcaccggcagactgggattgcgaggtcccgtcgcctgccgcctcctcagcgggctcagtatcgacggcgttcccgtcaacagtcttctgtgcttcgatatcatcaccggcaggctcgcctgtcttgtcggtttcgccttcggcctcgtcctgggcaacctgctcctgcttgcacggacggttggcaaccacgtcgatatgcagatcgtcaaaggctggcttggactgcacccacagctggcttggctcgggaggttcgatttcggaatgctcaccgcagccgtggtccagggagaccacgcggccgtcatccggactccacttgttggcgcacacgccgaacatacggtcgagttcgcccgcgagcggcacgaagaaaccacaggtggagcacaggttgccttcggcggttttggtgctcaacgctttggggcctcgcggaccttcataccagcgcttggcagcctgcgcacgacccaacgaggtcagcacgtgacggcgggtcagtcggaaggtctcgacggcatcgttgacatcctgcagcgaggattcctcgacttcgccttcctcgatgcgctcgtcatccggatcggtaccgatcgaatcggtgggagccagatctgtgggctcaaggcgatctttccaaggaatccacttgggcggcatcaacgcgccctcagtggggatcaaggaggattcgttgacggtccaggagtcgatctcctcgtcgtgatacagcgtcaccgaccattgccatccttcgtagccacggatattcgcggcgaagcggaagtcagtgacgtgatcctcaagatcatatgaggtaacgaaatcccccacctgatcgctctcgtcggccacttcgagcagcacggcgcgcgcgatggcgtgagggtccggtgtcacgatggtttcggtggtatcagtcatagatcagatcagtcctgtacatcgaattgatccgccaccgcacgcagcaacgtggccagctttttgctgtcggcagcagatgggtaacggtgacggcgcaacgtattgccggccgcatcaagcatcttgataaggtcctcgcagatggcggccatgtcatccgccttcgggcgggtggccttgaccaagctgggagtggaggcgatcaggcgaacatccatggcctgcggcccacgacggccgtccaccacggaatactccaccttggcccccttgcgcaacgtggtggcgccagtgggtagggcctgagccggcaggaacacgtccttgccttcctcactggtgatgaagccataacccttggctgcgtcaaaccaacgaactcgaccggtgggcattgcgaaccttccttaatcctcaatggaaatagtaaaccgaaggtacagtttacctcacagggcttgacctcacgctttgggctgagtcgcctgagtcttacgctcagagctgaaccaagaagtcttctgtttggcgtccttggttttgccggtgggccgcttgggctcaggagcgacgatctgctcaatcggcagcaccacggtgaaggtcaggcctcccccatcggtgccggtggcgcagataaagccgtgatgtgctttgaccacggattgcgcgatggccatgcccaaaccggtaccacccttttcgcgggcacgggatgggtccgcggtgtagaagcgttcgaaaatcttcgagcgcgattcaggcggcacgccggggccatggtccacgaaacgcaatacggcgtatcgatagccggtctgcatcgaggcacctacttcggcggcgtcgatgaaccgccgcattgacgcgtcgctggcgggcatgcgagcgagctgtcttggatcgatggcggccggcatcacaccgagcgcggcctcggcaggcgaatcggcaggcgtgtagcggtggatgttgcccacgatgttggtcaccacctggcgcagtcgagaggcgtcgccgggcagcacgacctcgggccaatcgccttcggcaaggttgaattcggcgggatggttcaaatcgcgcgccggttcgagggaaatctgcatgcggcgaacggcacggtccgggtcgagcgcatgcaagtcgtcgacggcgtcggtgaccagcgacgagagtttcaccgtgccggtcacatcgatgccgcgcccctcatcgagacgggccaaagacagcagatcctcaacaagaacagtcatgcgctggctggaccgttcgatatgttcgatggactcgtccgcacgctccaaggcaccaggcatatcgcgctgcatcttatacagctccgcatagccatggatggcggccaacggggtgcgcagctcatggctggcgtcggagacgaaccgtttcatcttgtcagtggtctcctcctgttcatggaaactggattctattcgggtgagcatggagttcagcgaggcggccagggagccgacctcggtgttttccggcgcggaaggaatacgttggctcaggtcgccggcggcaatctttgcagcggttttctcgatgcgcttcagcggcgtcatcgtgtgctggatgatcagcgtggacagggagccgccgagcagcaccacggcgatgccgaccacaatgcagtatcgggtgagtgtgttgacggtgtcgatctggtcggccagtgacaagccgatgtacaccacggcacggtccttgccgttttgctggaaggtcaccggcagaatacgccatggtgccctcgccgtgacgatggcggcatggttggcattgacagtggggttggccagtaccttggtgatggtgtcagaggaattggagtttccgttggccggatcgttctggctgtccgcactgtcggactgcaccgtgatgatctgcttggccactgcctgcgtagtgaatgcctggccgagcgtgatgccactggtatcaccataggtaggaagaatcggcaccgatacgataccgtcctgcatctgcggcatcagcggggtcacgaccagaggattgccctctttgtctttggtgccgtcggtatattgaatctgcagaaagtacgagttcggccccgatgagtcattttttgacagcagatcgatattgttgaccaccagctggctttgcgagcttaactgggtgtcggttttctgcagcatgtagttgttcaccaacgcgcggatggagaaggaaatcaccgacacgccgataagcagcacggcgatggtgcaggccaccagcttgctgctcaacgagatacggtcgatatgccgcatcagcatgtttttcttacgttcgcgccgctcttggaaatgggcggcgaacggcggcattgcaggcatgggattcgtgttcggggcggcgttcggcgtgctgctcggcggtacgccgcctgactgcttatcggggatactcatgagattgcgatgcgttatggatggggcgactagttcttcggttctcgaatcatgtatccgataccgcgcttggtttcaatcagcggagtcaccttgcgcttgccgccttcgccgtcgtcgacctcgatgccgtcgactttcttgcgcaggtaggagatgtacgattcgacgatggctgcgtcgccgccccagtcgtattgccagacatggtcgagaatctgtgccttggacagtactcggccctcattgtccatcaggtagcgaagcagcttgtattcggtggggctcaggtcaaccggctgccctgcacgggtcacatcgtgggagtcctcgttgatttccaagtcggcgacgcgaataatcgggtcgtcttccacctgttcgcgggtacggcgcagaatggcgcggatgcgagccacgacttcctcgaggctgaacggcttggtgacgtaatcgtcaccgccgacggtcaggcccatgatcttgtcttgggtgtcgtcacgagcggtgaggaacagcacaggggcgttaatgccttcctggcggatgcggcgggtgacggtaaatccatcgatgtcaggcagcatgacgtccaacacgatgagatcaggctgcactttttcgataacctcaatggcttcggaaccggaagcggcggtgtttacctcgaatccggcgaagtgtagggaagcgaccagcagttctcggatggacggctcgtcgtcgacaacaacaatcgatgcttcaataggcttactcatgcttcctagagtgtcgcgctcttctgggcgtttcctgaatgtcatcttggagttcggccttggaatccttcttgatctccttgcgccgacgaatcaccaccatgaccacgatgatgatgaccagcgccaccaacaccacacccatgatgattatgcctacggtcaccgtggatgatgaggtggaggcttttttggatttcacgatttgatccatcattgccgttgccgcgccagaccagctcggcgggttttccagtaacggctgctgtgcggcttcggatagcttatcgacggttttgttatcgagaagccacttatcggagttcttggacacgacgaccaccaggttgccgtcattcgaggccacggcaagcatcactgtgttcggcttgggattcatggactccatcacggttgccgcccagtcttccggtttctgttgactattgaaactggaaagatacagcagatgcacgtgtacaccggtttccttctcggttttggcgatggcatccgcgacttcggccgcatgggagcccaggagattttccgtatccgtgatgttctcggtgatggtcacgccgctgtcggtgctgctgctggagctgtcagagctgtcgcccgagttatccccataggcatttgcggttatccacattgcgttcatcgctactgcagcaagggcgcaaatggcacaaacaagccattttcggaccatattcccgaaggccgaacaggacggctccgaagataggaccacaatagttgtttttccgtcttcccgattcgttgttgacatatcctccaccttagcggccggtattggcaagcggccgccatacataccattaaccctctagaaaaggagcaacgatgccccaatatcaggtagattccgagcgaatccaatcatcctcggccgcagtggccacttcgatctcgcagatcaggcaggccgtgggcggcatgtacaccaatctcaatgccttgcaggacgcatggcgaggttcggcggccacccagttcaccgcggtagccgaacagtggcgtgcggcccaacagcagatggaggcctcactcgagtccatccaacgctcgctgacgcaagcctccaccgtgtacgctgacgccgaaatccaagcttcgcgcctgttcgccagctagtttcttggctctcctccctgaggggagctcgatcgcgaagcgaaactgagggagtatccctacaccgcagctccccttagtctcactgcgttcgacagctcccctcaaagaggggagccagaatacaaaaaaggggactcccgaaggagtcccctttcagctcaatcagctagcgatcgcttgcggatcagtagcccatgtcggcaccggcggccggggcagcaggcttcggctccggcttgttggcaacgacggcctcggtggtcaggaacagaccagcgatggaggcggcgttctgcagagcggagcgggtcaccttgaccgggtcggtcacaccggcggccagcaggtcttcgtaggtgtcggtggcggcgttgaagccttcgccatcaggcagggagcggacggtgttgatgaccacgtcaccggacacgccggcgttctcggcgatttgcttgatcggggcttcgatggcgcggaacacgatggcggcaccggtagcctcttcgccggtcagggaggcgacggcctcggccttctcggctttggcagcagcctgaacgagggccacgccaccgccgggcagcaggccttcctcgatggcggccttggcgttacgcacggcatcttcgatgcggtgcttgcgctccttggcctcaacctcggtggcagcgccgaccttgatgacagccacgccgccggccagcttggccagacgctcctgcagcttctcacggtcgtaatcggagtcggtgttctcaatctcggcgcgaatctgagccacgcgagcgtcgatgtcttccttggagccagcgccctgaacaatggtggtctcgtccttggagacgatgaccttcttggcgtggccgagcacggaggtgtcgacggactcgagcttcaggcccagttcgtcggagacaacctgagcaccggtcaggatggccatatcctgcagcatggccttgcgacggtcgccaaagcccggggccttgacggcgcaggacttgaaggtgccacggatgttgttcaggatcagggtcggcagtgcttcgccgtcgacgtcctcagcgatgatcagcagcggcttgccggtcttcatgaccagctcggccacgtgcacgatgtcctgctgggaggagaccttgccggaggtcagcagaatgtacggatcttcgagcactgcggtctggtcgtcagcgttggtgacgaagtacggggcgatgtagcccttgtcgaaacgcatgccctcggtgaagtcgaggtccaggccgaagcggttgttgtcttcaacggtcacaacgccgtcctggccgaccttgtccagagcctcagcgatcttctcgccgacctcagggtcggcggcggagatggtggcggtagcagcgatctggtccttggtctcgacgtccttggcggcggcgacgagttccttgacgatgacctcggtggccttctcgatgccgcgacgcagggcgatcgggttggagccggcgaccacgttcttcagaccctcgtgaaccagggactgagcaagcacggtcgcagtggtggtgccgtcaccggcgacgtcgtcggtcttcttggcgacttccttgaccagctcggcgccgatgcgctcgtacgggtcttcaaggtcgatttccttggcgatggacacaccatcgttggtgatggtcggagcgccgtaggtcttgtcgagcacgacgttgcggcccttcgggcccaaggtgaccttgacggtgttggcgagcttgtcaaggccctccagcatgccctgacgggcttcctcatcataagagatgatctttgccatggttgcgtattcctccaaatggctaggtataccggttatcactcgcaagcgtcgagtcgtgacgaccagccgtcagctgccgattatcactctcgacctccgagtgctaacccagacattagcactcgcgaccgccgagtgccaacatcatcggcggcgattgcgctttgggcatgaaaaggccccaaccgtcgaaacggtcagggccttcaatgcacatccttgcgtgcgtgttgctcactcggagcgggcttcacccgaagacagcttgacaacatcctttgcctgcgtgcctttgccggacgaagcgggcgtatactccacgcgatcgccctcgtacagcatcttgaacttattggtgctgccgtcgtccttgatttccgcgtagtgcacgaaaacgtcctcgctgccgtcgtccggctggatgaacccgaaccccttcttggcaaggaagaacttcacggtaccttgtgccatatctgatctttcctttgttcccttaggcgtcgcgacacaaaacctatagggaacgtagaaagaaccgcatcgcgctcccctacctcgcgactagatgacgattgtacagtgacgagggaacaatcccaaccgcagtggcacattttcggtacgaattatttcatagacgtgagaacgctcacagttttcgatgtattccacgccgatatcaggggcgcatcaacaacgctagttgagcagcaccaccgtaatgggaacggcgagtccttgcacctgctccacagccgaaatgccaagcgtggtcgccacatcttcggcggtggctttatcggcttcattctgataccataccacggaagaagccggcaatgtgccgcgcggattggtcgcctcgacgctggtgtaaccggcggtctgcagcacatcggcctgctgacctgcatatccttggattcctgtggcgttgaccacacgcacctgcgtggccttattcacagtcgcggtggctccggactgctgagactgctgatcggagtcttgattctcattcgaggatgtcgtatcactgttggtatcggattttgccgaatccgaagtcgagtccttggacggatcggtcgaagtggacgaggaatcatccttggtgctgtttttggtctcagccttgctggacgaatcggacttggaagcagtcccggacgtggtcgcagtctgggacgatcctcctattgcattcctgtattccccggaaatccatgcccagaccccgacaccgcacagtgcggccaccagaataacgacgatgaacgggcagaggcgggccactgccgaacgagcgccacggtgaactcccaccggtcccttcggaggattgtcgaaggaatccggttcataggattcgtaggtcatcatgtcgcgtgccataatcgccctttcttcctgtcaaaactacccatgagtgtaatcggcaaacaactcatcagtccaccacaccacgcctcgtgcaccggatatgcacgtttgactacagtggtgagtcatgatcaaaccattgagcgaactggtagagccggggtgggcccatgccttggccgacgtggagcccgccatccaccatatgggcgattttcttcgtgcggaaaacgccgccgggcgcccgtggctgccggcaagccacaatattctgcgcgcgttcaccatcccgttcgattccatcaaggtgctgattgtcggccaggacccctacccgaccccgggtcacccggtgggtttgagcttctgcgtggcgccgaatgttcacccgctgccgaaaagcctggtcaatatttataaggaattggttgacgaccttggggtgcccatgcccaccaacggcgatctgacaccgtggacggaacgtgaggtgatgttgctcaacagatgtctgaccgtcggcgtcgggcggccgaattcgcatcagggcaaaggctgggaggaagtcaccgaggccgcgattcgtgcgttgaacgcgcgcacggacgccgacggcaagcccaagccgctggtggcgattctctgggggcgtaatgcgcaaagcctcgagccattgctgaccaatgccttcattatcaaatcgcctcatccgagtccgctgtccgcttcccgcggattcttcggctccaaaccattctccagagccaatcaagccctagtcaccatgggtgccgacccggtggattggactctttagacagaccaacagtcattgtgagtagttacagtgagggcatgactttgttccccacgcaaccgaacataccttcgccgaccaccgccgcacgaccggtcaccgttcccgcgcccggcgtgtcggctccgctgggtgccgatgacgccaaacgcgcacgtatcctggccgacgccattcgggcgaggttcgcccagacactggtgggtcaggataatctacgcgaatcgcttatcgtgaccttggtggccggcgggcatattcttatcgaatccgtgccgggcttggccaagaccacggccgcccagacgctcgccacctgcgtatccggctcgttcaaacgcgtgcagtgcactcctgatctcatgccatccgatctggtgggcacgcaggtcttcgattttgcgtcgcagaagttcaccacgcagatcggcccgattcacgccaatttcgtactgctggacgagatcaaccgttcgaatgccaaaacccagtccgccatgcttgaggccatggccgagggtgccacgaccatcggcgggcagcgtatcgccttgcccaagccgttcatggtgatcgccaccgagaatccgattgaggaggagggcacgttcaacctgcccgaagcccagatggatcgtttcatgatgaaggccgtcatgacctatccttcgcccgacgaagaggctcgcatgctggccatgctcacccaccgtggctccgatatgatcggtcccgacaccatcaccggcgaacgcatttccgtgtctgacgttgattttctgcgcaaggcggcacgccgcgtgcatgtttccgacgcgatcatgcgttatgcggtcgatatcaccgccacgtcacgaggtgccggctcccgccccatcaagggactgtcgtccttggtgcgtttgggtgcctcgccgcgcgccaccatcgccttgacccgtatcggccaggcgaaggcgttgctgtccgggcgcgactatgtggtgcccgaggacctcaaggcgttcgctcatgaggtgctgcgccaccgtattatgctgacgttcgaggcactggccgatggcgtggtcagcgatcagatcgtcgacaagatcgtcgaaacggttcctgttccgtgagttccgattccgttcgcaagaaaatcgaggcccttggcactcagctgagcctgcctaccgtaaggaaggctttgggcgtgctggagggcgaacacgcatccggacgtcgtggcggcagcggcgatgcgatggatgtgcatgcctatgagccaggcgacgaatcccgtcttatcgattggaagaccagcgcccgccaaggccgccccatggtggtcgagcgcgagcgcctgtcgacgtcacgggtctggttgctgatggacgtaggcctggagatgactggcgtatgcccttccggagaacgcgcatggcaggttgccgccaatgcgctgcgtatgttcgccgcactgtcgttgcgccggtcggacgatatttcgctggtgttcggcgatgagtccagcatcacccgcgtgccgttcaacggtgggttcgcgcagttcgaacgcacgctggacaaggcgcttgatcgtgattgggatcatcaccgtaatatcgacgcgctgctggaatatgcgcgccgtatcaaggatcgtgaggcattgatcgtattggccaccgatgagcatgcgatggaggagcggcatatcaccacgatccgtcgtattacccgcacccatccgatggtgctgatcgatgtggcgacgatgaatccgttcaaggccgtctcatcccgccacgctcccgccgacggcttgagtgcacggcgtgtgccggcattcctgcgcaacgccaaggcagcggccgaggtcgatactcatcgcgcgtatatggccgcggctttggaacaggagctcacccgtgccggttcccatatcattcgagccgcatccagcgaatccatgttcgatcgtttcgtcgccctggtgtcccgggcattggcccgcaccacacgcaatagactgggcactgcacccgaactggtcggactgactttggcgggtgatctatgatgcacagcatgttccccatcatcccgctcgccactgatcccggcgatctcaggcccgtggagtcgttggccttgaccactcccctggtgatggccatcgtcgcatgcctgttgctggcggtaggtctgatcgcgttgatcatcatgctggctcgccccgcacgcaaacctcggaacagcgaccgtgcgcgtggcactcatagcaatgccagctccaaggccgagtggcgtgcccgcatcgacgatgtggtggcccgtcatgaatccggagcactgccccggcatgaggctttcgtcgaattggccgtcatcgcccgtgatttcgccggtgccgcatcaggcaaggagcttagttccagtacgctgaccgatttggcgtacctgaatcgcacgcccgcgaatcgccaaggattggacgcattgaagcagaccattagcgcgttgtatccaccggaatttgccgatgatgcccgcaaccgaatcgcccagacgaccagcgtgcagcaggccgccgaatgggtggcgaatctggtggaaaggtggcgttcatgatgctggcatggcattggccttgggccgctctggccggcgtcttggcagcgctggcgattatcgtgctgattgtcgtgttcgcccgccgtaacgccgccgacgacacccctgtattctcgatggacgacgatctcaataccgagcacgcttcccgtctgttccgtcaatggcgcgctttgggccgtctcgccatcagcgtgctggtgcttgcgctggcgctggccattgtgctggtggctcgccccagccaagtggatgccggtgacgaacgcgcttccagccgagatatcgtcctgtgtctggatgtgtcgggatccacgctcccctatgatcgcgaggtcatcgatacctatttggaactggtcaagcatttcgagggggaacgtatcggtttgagtatcttcaactcgacctcacgcacggtgttcccgctgaccgacgactacgaactggtcaccaaacagttgacctccgccagcaaggcgctgaaaggcgtcgagtcgcaggatgacatcgataagatgtccgatgccgaatatcaggacatcgccaattggctcgaaggcacgcagaaccgcaaggacgccacctccttgattggcgacggcgtggtgtcttgcgcggcgatgctccccggtttcgcttatggcgaagccaatcatgcgaatgccgaccgtcagcgtgcggcatccatcgtgctggccaccgacaacgtcgtgtcaggcaaacccacctattcgctgaccgaagcgttggacttgacccagcagaccaaaatcaccgtggacggcctgtattccgggccgaaagccagtgaatcggaccaaaccacaacggatatgaagtccgcgatcgagtcgcatggaggcatcttcctcacccaatcgaatggcgcgtcgatagatgagctggtacgggatattcagtcgcgtagagatacggatgtggagaacaaggcgaaatcctcaatggtggacgctcccagtctgtggacgcttgctctggccgtgatactcattatctggatcgtatgtgcatggaggttgaggcgatgaacggattcaccttctcccccgccttgggctgggtcgccgacggactgctggcggccgggctcgccgtactggccattctcgaaatcgtattgtttgttcgccgccgtgcttccagtgacgagaccgtgtgggcttgcatacgacgtacgcttatgctgctcattgtcgcggtgatggtactgactcccagcgtggtatcgtctaccacctcacaggtcatcaatgccaccgacgtcatcgtggcggtggataccaccgggtcgatggcggtggctgatgccacatacgggtccgagaagaccattacccgcatcgatgccgcgcgtcaggccgtgcatgatgtgaccgctgcttacccggacgccagtttcgcggcgttacggttcggtgcttcgggaacacttgatgtgccgctgaccccggatgcgccggccatcgataattgggccaacacgttggcggtggaagccacatccgtgtcggcgggatccagtctggatgctccgatcgatcaattgctgctgaccgcgaagtcgattcgtgaagcgcacccggatgatgcgattgtgctgtacctcatcactgacggcgaacagacctcgaatgtgacgcgtcgtacgttctcgtcactgcgacagtatctcaatgatgggtttaccgtgggcgtcggctcgaccgagggcggcaagattcccgtcatcgccgatggcgtcagtgccggcgattccaacaccacggaccactgggtggtcgacccggataccggcgaacccggcatctccaagatggatgagaagaaccttaaagacattgccgacgagatcagtggcacgtatgtggccgtggacgcttcacagactttggcggattcggtttcggccaggtcgtcgaagcagtggcgcatgaccaccacggtcaaggagcgcacacgcaccacgccggtggtatggccgttggccattgcgttggcgatattgcttgccatggaagtcggtgcatggatcgcgacctcaaggaggctgctgtgaggaacagtaacgaaatccacgagaacgatggctcggcgaatattcggatgcgggcgaaatgcccgctttgggcacgtatcgtcctggcttgtggcaccgtattgctgctgctggttgccggcgtggcggcagtaaacctgtccgcttcgattacgttcaatcaggccaccgcatcattgaatgccaatatcaaagcggctcaggatgagtcgactgatatcaccacgctcaaggcgcaacagcagcagaccgatgcgcaattcgccgaggccgggcgaatgcgtacgcttctgttgccgcaagtcaaggacgccatcgacaccaatgcttcgatttcttccgagctgacgaagatcaccctgaaacaggccgaggcgcagaacagcggttccgattccgggcaagcccagtcggcgcagcaatccgagagttcctcagccaatgccaaaaagggcggcgcgttgaccgacgagcagaagaagcaggtcgaggagctgatgaaggccaatcagcaatccaccgatacccagtcgaacaccacccaatccgagcagaaggcgacgcagaacaagggtaccggggccaccaagccgtggtaagcagtcgttcacggttgctctttttctcacatcctcacgggtcatggccttatcgcggctgtttcccggtttcggctgtcggctttggcgtttgtctgatcccgatagcccatggctgatccaaggtgtgcccaaacaggctatttgtggataatcgttacggctatacacaacacttgtgaataacttcgcccaaaatcggcaagctagaaccacattggtcgttccggctggacaagcatgagtcctgtccttttagctggatatatgaatacctacaccagcaccccagcacccatcgatcccgccggcggctttgccggcaatacggtgacgccgttcgattacggcacttgcccttgccatgcggcggtacagcgtagtcgcgacctcgtgtccgtccaacgtgcggccacactggcgcaatcggaccagatggcggtggccgtgaaccgctctcgcaacatcgtgtggaccggtaaagccgccgacctattccgatcgcggctcagtcgcaccgcacagtattcggccagtctcgcgcaagacatggagaccacccaccgattggcttgggggtcatcatgagcgagcacgattactggcaggtggaatcgtccgtttacggcggagtgggatatgcgccagccactcttgaagaatatgccgccatagccaaggctctcgatgacgaggcggcaggatttgcggccatagccacggcttgggaatcggccgcattacagttgcagtcacatcggcatagtgcgccgatgtgcgtcaccttgcagtcgggcgatccgagcgccgttgttcccggccatgtcactgcaccatatgccgcgctgggcaatcggtgttatgaccatgcaacggcatgtcagcggttgagcgatgatctgcgtggcgcggccgatctgctgattcgcgcacactctctgtattctcaggcggagatgacggctcggcgcatgtttaccgaattattgcaggccggtacacaggccaaaccgggatatgccgcggtgggtgttgccgctgtggcggcgggcggctttctggccggctgggctattgacggcaaaccgaacccagcatggatgtccacgttcacctatccgttccaggaaggagtgctcagcggcgcgggcggaatcattggcggcgtacctatcggcaagagcattgcgcacaccgatgaggtcaacaaggctgcggggaaaatcgccaatttctccggcccggcgaaagacgtcgtccaaggcaatcatctgaacgtgcgcgaggtgcaggcgaatgccgacgtcgtccgtgcaagcggatcggtggccgagtcaatggagaatctgcgcaggctcgccgaagaacggctcggcaaaatcgagctgaacagcggactcgaatatgggaccatcgccattcaacgctatgaacgggctgatggaaccaactcctggctggtcaccatcccgggtaccgatggacaacctgactcaccattcggctgggcgcagaacgtggaactgatgagcgccgatcaggagcgccgcaggaaagcggacagcgctcgcacggttgccgaggcgatgcgtcaggctggtatcggcaaggacgagcccgtggcactgatcggccactcccaaggtggcatcgttgccgccacgcttgcctcggattgggcagaggaatataccatcgagcatgtggtgacagccggatcgccggtggccaatcatccgattccgcaacgcacgtgggtcaccagcgtggagatcgatgatgaactggtcgccgcgctggatggtgccgccaacccggtcaccgataattggctcaccgtgcaagggcatgtatcgcccgcgcccacggcaacaccatccacagtgcattcggacgtctcatgcactcccggcgcaacgcccatcaacggtctgaccccatatgacgccgcatccgtggctggttcgaccaacggcagggagttgtcgcattggctcaaataccatcaggccgcttatcagaacgccaccgacctcggctcccccgccgtgcagcgccacgaagcgcattttcaggaagtcatcaacggagaactcaaggaaacccgctattaccaaggccgcatgacccagtccacaaccattgctcccggcgagcgcaccaccgagttcagcacgttcggcggttaaaagtaaataccacacttgacagagttgtcaagaaaggagttaacaatataatgacgagtaggagatggctcatcaaactgatgaagcaagcggcgaaacgcaagaatattacgtttgagagtatcaggcaaagagggagtcatgagatattccaactcgatggactcatgattcccatcccacgccataacgaaatcgacaacgacctcgcgaacatcatttgtaaggaagcagaagccaaactcgggaaaggctggtatcaacagtgaaaacatatcaggtcatcgttcgtcctggcgaaaaatactggattcttgagattcccggtatcggtttcacgcaggcaagaacaacagcagagattgaaagtatggcacgcgaccttatcaccgtcatgacgcaagatgctgatttcgcactcaccatagagacaaaactgccgcaatccgtacaagagcaccttgatgaagctcggcgactgcgcaaggaagaagcggaatgcagatcgaacgcagcgcgggaaactcgcgccgcggcacaagaactacatggcatgggtctcgccctacagcaaataggcgatatactcggggtctcacggcaacgggcacatcaacttgtcaatgctgtcaatgcttagcatcaatcggctaccccccacaatgcaatcaccgcagagacgcggctagcgccactttcccgggattgttgcgctagcatgcccgaaaccccctctatcagcgcaacattcccgggaaagtggcgcgcaaagagtgtcaggcgcgtcgctcgatgagtgcgcggccggatgcgaggcggtcgagcacaccggttttggcgatggccagcatcagataccaggccatcacgccgctgataagcacgccgccggtgacctcggaaatcatgtgcacgatgccacgcgggctgacgaatgacacacccacgtagcgaaacagcatcagatatgtgccgtattccaaggcgaccaacgcaccggatgcaatggaaatcggcagattgaacatgcggtaacgggtcaaagcgaacggaatctcagcgaaaacaccctgcagcagcgccgagataatcacgaagcccaaatcgaactggctaccaatcaccgtttcgaccagcgtgccgataaggttcacgtacagcgccgctccgggtttgcgcagaatcagcaccgccagcgtaccggagaaataccagacggcgtgcacgatgctggcgaaaccgggcagaatcgcaccaaacaccgaagagatcggcatgtacgcgaagttgaatccccagaagatcacgccgcaggccgcgcccagtgtggcaccgaccgcgatgtccaacggctgccatttcagcgacgatacggcgaccgaacgtttcggaagagtatgaatggtggttgcaggcatggtgatctcctagccttaaaggccgcacacagtaatcgaatcacgggcgttccttgacctgtgcggctcgggcgggaacgccacaccacagtgtagccgctcggttcacggctggaagtacccttggaggttatgaagcttaccgatatttcccccgcaatcgcattgaccccgctcgacggccgttaccacaaggccaccgccccgctcgtcgaatacatgagcgaacctgccctgaaccgcgaacgcatgcgtgtcgaagtcgaatggatgattcttctggccaacggctttgagggcaacggcaaccagccaatcgttgacggcgtcaagccgttcactgccgaagagcaggccttcctgcgcgccattcccgaggacttcggcgccgaaggcatcaagcagcacgccgctcatgaggccatcacccaccacgatgtgaaggccgtggagtactacatcgatgatcagatcgacaaggctccggccgagctggccaacatcaacgacgagctgaagaccctcgtgcacttcgcctgcacgtccgaagacattaacaacctctccatcgcccgttgcgtcaagaacgcgatggaaaacgtgtggaccccggagttcaagcgcatcatcgaccacctcgccggcaaggccgaggaattcaaggatatgccgctgctctccctcacccacggccagccggccacgccgaccacgctcggcaaggagctcgccgtctacgtctaccgtctgaaccgtcagctcaagcacatcgaaaaccaggagtacttgggcaagatcaacggcgcgaccggcacgttcggcgcccacctggccgcatgcccggatgtcgactgggtcgccgtctcccgcgaattcgtcaccaaccgcatgggcctgacctggaacccgctgaccacgcagatcgaaagccacgactggcaggccgagctgtactccaccgtctcccacgccaaccgcatcatgcacaacctgtgtgtggacgtgtggatgtacatctcccgtggagtgttcgcccaggtgccggtcaagggtgccactggttcctccaccatgccgcacaaggtcaacccgattcgtttcgagaacgccgaagccaacttcgaaatcagctgctcgctgctcgacaccctctccgccacgctggtggaatcccgttggcagcgcgatctgaccgattcgaccacccagcgcaacatcggttccgcgctcggctactccttgctcgccctgaccaacctcatgggcggccttgagtccatccacccgaacacccacgtcatcgagcgtgagcttgatgagaactgggaggtgcttggcgagccgatccaaaccgccatgcgcgcctgcgagctcaagggcctgccgggcatggacaagccgtacgagaaggtcaaggagcttatgcgcggccacaccatcaacaaggaacaggtcgagcagttcatcgaccagcagtccttcgacccggaaaccgccgctcgcttgaaggctctgacccccgccacctacaccggtgtggccagccagctcgtcgctttcgaccgctgaaataggtgcgatgcgagtccctcgagcccatcgcatccaccacactactgcgctgagtcacaaaccaaaccgcaaactgaaccgaacaaggacaggcgtcaggtaaccatttcatgactactgaacaggagcagtccactacggaagatcgcccggacaaggcgacctcctccactaccgaccggccgatcgcctctggtgacggccggtcggccagttttgctgtcagcggaccggacagcccggcaaccgacgacagcaacgattccggaccgtacatcgacgacatcgctccgcgccgcacgcgcgacttcggcgatctgacccgggccggtctgtcgctgttgatggccgccgtggtcatggtgttcgccgtgtatctgggcggcatgacgcgcggcgtcgaatccgacgcacacaccgcagcccaggtcatcaactggttggctgacttcccctccaccgtgctgacgcagctggccaccatcgtcatcgtgatcatcgtgctcgctcaattgctactggcccgggaatggctgcaggccgcggtgtccgcgctggccatgttcgccggctacggcatggtgtgggtcgtatcgacggcaatcagcagtctgaacgatttcaccctgccaatggcactagtctcagccgccacctcatacggctccgggctgttgcccgacatctacgccggcatggcgtccttcctgaccgccgccgggccacgccgcacccgctccacggtcaaatggagctggaatatcctgtatgccatcgctgcggtgatggtggtgctgtcgtggcattcggtcaccggcatgctggtgtcgatggccgccggccgcacagtgggcatgctgatccgattcgtggtcggcacgcagaacaagggcgtgtggggccaagatctggtcgccgccctgaaaggcatcggactggacaccgcctcgctgattcggcatcaggagcccggcgtcggccacggttcactggccgtcacgctggacgacgatctggccgaaggctcgcgcatctacgatctggataccacggacaaccgtcgtttcatcgtttccgtcatcgacgcgcagacccataccgtcggctatctgaagcagttgtgggactgggtgcgtttcaccagtgtgtccatccgacgtgaccgttccgtgcgtgacgccgtccagcatcatttcgccatgctgctgggtctgcacaatatcaaactgcccgcgcccgcaccctacggcatcgccgataccgacgaatccgcgattctggtgctggatgcacacaccatcgaactgcccgccaacctgaacacgcttaccaaggcggatgccgtggcctacatgcgctacctgtccgtggcgagccggcgcggctatacgcaccggcgcatcacgccggacacgctcgcccggcttgaagacggcaccgccgtgattgccggctggctcaacggcgacaacgcttccggtccggccaacaccgcgctcgacaaagttcagctgctagtgctgttcgccgcgctgatcggcgtggaaccggcggtggaggccgcccgcgaggcgtggggagacacgactctgacggccttggccccgttcattcagaaggtcgcggtcccctcccccacgcgcgcgctggaatcctgggacaagcagctgctcaagggcctgaggagtcgtatcaccgcgctggctgacgaggagacggtggaatccgccgaaccggtgacgctggcccgattctcctggcgttcgatgatcaccatgctgctggtcatcgtggccgtggtcgtggtcttcacccaactgaagcccgaggagatcatcaccgcgctgaccaacgccaacccgttgatggcggtggtgacgctcgcgttcggtgtctgcggctggatcggctcgtcgatttcgctcggttccctgatggcgcggcacaagcgtgacaatatgggcgtcttcatgagccaggtggcaggcggcttcgccaccgtatccatgccagccggcgtgggcccctcgttcgtcaacctgcagttcctgcgcaaatccggctatcgcaacacccaggcgaccgcaattatgagcgccgtgctcgtggtgtattacgccgtgtacttctccatgctggtcatcatcggcctgttcaccggccgcaacatgttctccggcgcaatcccgacaaacacgttggttatcgtgctgggcgttgtggtcgtggtgctgtccattgcgatgatgattcc

SEQ ID NO: 3498 - DNA, 7372 bp, Unknown
  R85_18m  MAG No. k141_8134
atcggccaagcggcggccatcgcccgagccggcgatgaggtgattgtgcatgccggcacctatcgggaatccgtcgacccccgattcggcggcgagagcgccacgaaccgcatcgtctaccgtgcggccgcgggcgaaccgcgcccggtaatcaccggctccgaacgtatcgacacatggcagcccgaaggcgatggtatgtggaaagccgtaattccgaacacattcttcaacggatacaacccgtacgtggaaaccgtattcggcgattggaccgtatatccggacccaaaggccgaggtacgccacctaggcgatgtgtatctgaatggcaaatccttctacgaagtcgtctcgctggacaaggtgcgcaacccacagcgttgggataccggccgtgacgccgccaccgattccatcgtgcctctgattgatccggatgccaccgtgaacgtgtggtgctgtgcggtcgatgatgaggccacaaccatttgggccaatttccatgaagccgacccgaatgcggaacttaccgaaatcaacgtgcgcgagacctgtttctacccgagccgcccgttcgtcaattacattacggtctccggctttgaaatggcgcaggcggcctgcccctacacgccgccgactgccgatcaggtcgggctggtgggcccgcattggtcccgcgggtggattatcgagaacaatcgcattcatgacgcaaaatgttcggcgatctcgctgggcaaggagatttccaccggcgacaacgaatcgacgcgcactcatcgcaagtccgggtaccaataccaaaaagaggccgtctacaaggcgctgcatgccggctgggagaaaggcgtagtcggcgggcacgtggtgcgcggcaacgtaatctacgactgcggccagaatggtgtggttggtcatatgggctgcgccttctctctgattgaaggcaaccacatataccacatcggcaccaaacgcgagttcttcggctgggaagtggccgccattaaaatgcacgcagccgtcgacgcggtggtgcgcggcaaccgggtgcatgattcggtgctgggcatgtggcttgattggcaggcgcagggcaccgtggtggattcgaacgtgttctaccgcaacacgcgagatgtgatgaccgaggtgacccacgggccgattacgtttatgaacaacgtgtttgcctctgagttcagtttcgacgactatgcgcaaggcgcggcgttcgtcaacaatctgttcgccggtcgcattcgtcacaccgccgtcttggaccgatccacgccataccatttcccgcatgccaccgatgtggccggcgaggcattcgtctacggtggcgatgatcggtacatcaacaacctgttcttggctgtgggcgattccgccaaaccgttgcgcactgccgccggtgcggccggtatggcggaagccggaaccgcgttctttgacggctatccgcgctcgcttgaggagtatgaacagctgattgaagaggctggccttggcgatgaggagttgtatcgcagcgtgaagcagccggtattgctggcttcgaacgcctatgtttcgggcgcgaaggccgcttccagcgaagccgaggctgtggtgagtgatgacggctcttcgttggcattgcgcgaaaccgatgatgagctatggatgaccatctcgttgcccgaatcgattcggtcggcgactggaccggtgatctccactgctgatcttggccagccgcgcatcgttgaggagtatttcgaaaatcctgatggttcgccgattatcgtggaccgggatgtcaccggtgccgtgcgcggcgagcgttcggcccgaggcccgttggcggaatatgacgatagggaagtacttatctggtcgaaatgacggaatctgcggtttacggtttgcagcgcgacatcatgatctggttgctggcctgttgaatggccttggcggggtcaatctgccagtgtttggcaggttggcttcgctgaggggtgttgtgtggggtcgttttgccagtgtttggcaggtcggccccgctgagaggtgctgttggagccgggccgccaatgtttggcaaatcagcccttttcggtttgcattggtaacaaattcgatatatggttaaatcaacgaactaaatattgtaagtccatgcgtacctacgcaacgtcaatggagatactgctatgcgcgcacatcgtattttgctgctctcgctctgcctgttggccgtggcctatgccgtcctgctgtttgttgcgccggccgccgcgccaatcggcatcgcactgaccgccgccggtctggtgctggtttcgacacgctatgcgtggcgtgccaagttcctcgcgttattcaacgaagcgtgattgatgcatcacggtgattgactggttcggttcgtcctaggactcccatgcaattcccggccaattcgcctgtcgcattatgtatcgtgcggttatatggagtcatggccgcaaggcctgacaattgaatcttcatcctctcttctcctttgaagcccggcccgccgctgggctttttctttggtcggcatgtcggggcagtgactggtatttttgtgaccgatctcatggcttcagtttcggcgtgtcgttatttccgacgaatcgtatcgataaaattcatgtttcgtatggtctataaaaatgccggaaaatcagcgttgttaccgctcacatttagttaatcgaatgaatcaagtatgccataatccgctcagttgtggggaaaataggcgatatcaaattgttaaatcaaaaaactaatggtatatttttatgcaggttcggcaagggttgcctgaccaaaaggaagaggaaacaagttcctatcaatgtcgaaaggaattcccatgaataagtggaccaaggtgctcggtgtggttgctgcaaccgccatgctcatcccgctggccgcctgtggcggtagccgtggcacgaccactgccggtggcaacggcggtagctccgacaccgtcaaggtcggtatttcgatgcctgagcagatgctcgagcgttggaagatcgatggcgagaacctgaagaagcagcttgaaggctacggctacgacgtcaccctgcagtatgcagatggcaagaccgatctgcagacctcccagattcagaacatggccaacaacggcatgaactacgtagtcatcgcctccatcgacggcactgcgaccggagctgctgccgagcaggtcgcctccaacggcggcaaggtcattgcctacgaccgtctgatcatgaacaccgacgccgttgactactacgccaccttctccttggaggatgtcggcaagatgcagggcgagtacatcgagcagaagctcggtctgaaggatggcaagaagggcccgttcaacgtcgaactcatggccggttccccgaccgataacaatgcaggctactacttcaagggcgcttgggacgtgctcggaccgtacttcaagtccggcgtgctgcagtccaagtccggcaaggttccttcctctgctgatgattggcagtccatcggtatcgataactgggatcgtcagaaggcccagaacgagatggagaaccgcatcaactccttctacaacgatggcaccaagcttgacgccgtgctcgcccagaacgacgccgaggcaaccggtacctacaacaccgtagaggccgctggctgggactactacccgatcatcaccggtcaggacgccgagaaggccaacgtgcaggccatcgtgcagggcaagcagtccatgaccgtctacaaggacacccgcgagctggccaaggccaccgccgaaatgatcaaggacatggtcgatggcaaggatccgaaggctcctgacaccttcaacaacggcactaaggatgttccgtcccagctgctgaccccggtcaccgtggacaaggacaacctcaaggaaatcctcgtcgacggcggctacatctccgccaaggatgctggcctgtgatccgcaggatcgctgattcgattcatccaacggcctaacggctaacagataagggggcgccgcgctgcgtggttgcggtacggtgccttcatcatgcacaggggcattactatcggaggaggtaactgtggctacgaacggtgacgtgattttggagatgcgtcatatcgtgaagcgtttcggcccggtcaccgcgttgaacgatgtgaatatcatggtcaagaggggccagatattctcgatctgcggtgagaacggtgcgggcaagtcgactttgatgaacgtgttgtcgggtgtgtacccgtacggcacgtacgagggcgacatcgtgtacaacggcgagacgtgcaagttcaggacgattcgcgattccgaggagaagggcatcgtgatcatccaccaggagcttgcgctggtgccgtacatgtcgatccaggagaacatcttcctgggcaatcagaagaaaaagggcatcgcgatcgatgccgacgagcagcgccgcatcgcgtacgacgtgatgaggaaggtcggtctggacgagaacccggacaccctgatctcgaacatcggtgtcggcaagcagcagctggtcgagatcgcgaaggctttgaccaagaacgtgaagctgctgatcctggacgagccgaccgccgcgttgaacgacgaggattcgaggaacctgctcgacctgatcgacgggcttcgccgcgagcagggcatcaccgcgatcatcatttcgcacaagctcaacgagatcgcctactcggcggacgcggtgcaggtcatccgcgatggccgcaccatcagccatatcgacatcgacgcggcccacccgctggaccaggatgtgctgatccgcgacatggtgggccgtccgttgaccaaccgctacccggtgcacacctccaggatcggcaaggagatgttccgcatcgaggattggaagatgcgccacccgctcgacgaggcgcgtctggtctccaaggacgtgagcatcaacgtgcgtgccggcgagatcgtcggtctggccggcctgatcggcgcgggccgcaccgagaccgcgatgagcgtgttcggccgccagtacggcaccaacgcgtccggcaggatcttcgtggaaggcaaggaagtcaagttcccgaccgtgcgttccgccatcgaccacggcgtggcctacgcgaccgaggaccgcaaggtgtacggcctgaacctcatgaagacgattcgcgagaacacgtccctggccagtctgaaggaactgtcgaacaggctgggcgtggtggacgagacccgtgagaagcggacggccgagaagtaccgcaaggagttccgcaccaaggcgccgaccatcgagatgcctgccggcaacctgtcgggcggcaaccagcagaaggtcgtgctggccaagtggatggccaccgacccgaaggtcctgatcctggacgagccgacccgaggcatcgacgtgggcgcgaagtacgacatctacgagatcatcgaccaattggccgactcgggttccgcggtggtcgtgatcagctccgaactgcccgagctgctgggcatctgcgaccgcatctacacgatgagcaacggcgtgatcaccggcaacttcgacgccaggaagaccagccaggaggagctcatgcgctacatgacctccgccgtcccgctgcccaaggagcgggccttcgcctgacccgttcgttgaagaacgttagtttttgaaaggatagtttccgaaatgtctaccgcaaccgtaacccccgcagccaagaagggcggggacgaacagagcctcaagaccctgctgttgggcaacatgcgttcctacggcatctacctggccctcgtgctggtgatcgtcgtcttccagatcctgacgggcgggcgcctgctgaacccgaacaacgtggtcgccctgttccagcagaacgcgtacgtgctcgtggccgccatcggcatgctgatgatcatcatcgccacgcacatcgatctgtccgtgggctccgtggtcgcgttcatcggcggcgtgggcgccctggccatgaagcacggggtcccgtggtgggccgcgatcctcctgatgatcgcgatcggcctggccatcggcgcgtggcacggcttctgggtcgcctacgtcggcgtgcccggcttcgtgaccaccctgggcggcatgctcatcttccgaggcctggcgaccgtggtcgccggcgagtccatcccggtgtccaacgcctcgttccgcgccatctccaaggactacatccccaccatcttcgtcgggccgttcgccctgaccgccctgatcgtcggtctggccgccatcgtgctcgtggtctggagccaattgtccaagcgcgccaaggccgtcaggaacggcctgcccgcccagccgatgagcttcgtcatcttgaagtgcgtggtcgcgaccatcgccatcggctacgtgacctacctgcttgccatgtccggcaacgccacccagggtggcgtcccgatcgtgctcgtcatcatcggcgtgctcgtgtgcgtctactacttcgtcctcaaccgcatggtcttcggccgtaacgtgtacgccgtgggcggcaaccgcaaggcggccatcctgtcgggcatcgacaccaagaaggtcgacttcgagatcttcctgaacatgggcttcctggtctccatcgcctcgatcatcaccctgtcccgcctggcctccgcctccgcgcagaccggcatggagttcgagatggacgccatcgcggcctgcttcatcggcggcacggccgtcaccggcggcatcggcaccatccccggcgccatggtcggcgccctgatcatgggcgtgctcaaccagggcctgtccatcatgggcgtggacgccgcctgggtcaagaccatcaagggcctcgtcgtcatcgccgccgtcgcctacgacctactctccaagaaaaagaagggctgagccaaactcggcctccgggcccgcccggtggccacggggatgggaacttgggttccattcctcctccgaaagggacgctgttgcatgcagcgtcccttttccgtttgtcgcgatggatgatggggatcccggtgtacgttcttcacgaaatcagccctgacttggggtgtatttcgacaatatgattcggcgatgtgcctcagcggatatgtgcggccaatgaaaaagcgggataccgatgtcgatatcccgctttcagtgaataggtaaagcagagcttacttcttcttggctttcttaacgcgcttgggctttgccgccggcttcttgggctcgaagaacggccacttgttgagggcccaagtgtgcagggcggggattttcgccacggcgaaaccgat

SEQ ID NO: 3499 - DNA, 6489 bp, Unknown
  R85_18m  MAG No. k141_8176
ctcgatgccgcctaccatatgatagcggtagatgaaacggctcacgaaaggcggaagtgaaatgacgggtttgcttatcggatcgcatttgtcgacggctggcggctggaacgagctgctgaaacgctcccatgaggagggcggcaccgcgttcgcgttctttccgcgatctccgtatggcaaacgttccaaggcgctcgacctggccggcgcggcggtgttcggcgcacagctcagggccgaaggctatgggccgttggtcgtccatgcgccgtacgtctacaatctggccggcaaggatgaggccaagcgcgcattcgccatcgaggcgctggccgaggatatcaagctgctgaccgccatccgcgaggccggccaggaggtatatatcaacattcatcccggcgcgcatgtgggccaaggcgccgagaccggctgccggctgattagcgaggggctgaatcaggtgtttgagcgtgcggatggcgttatggtgttgctggagaccatggccggcaaaggcacggaatgcgggcgcaacttcgaggagctcgccacgatcatgaacggcgtggagaacaaggcgaacgtcggcgtcacgtttgacacctgccatgtgctggatgccggatacgacttggtgaacgactacgatggcgtgatgcatcagttggatgtggtgatcggattggccaaggtcaaggcgattcacgtgaatgattcgcagtttggcctcgactcgcataaggatcgtcacgccaacatcggggagggccagctcggcatcccgtttttcacgcgactggtcaacgacccgatcatggccaagctcccgatgatcctcgaaaccaaggagcagacgcccgccacgcatcgcgacgagatcgagttgttgcgcggattggtgcaaaagtagtcgtagtcgaccaatgtcgagcagaagagacctgtttttgactgatggctatacgaggttagctatcagcggggcgttgattgacccgtcttcatatacagctgcatagccggttccagctgcaagagctcaaaacagacgcatgggttcggtggaatccaatggctgaataagacgtttgccgtcgctgttcagtggcgcgacttcgtgaaattgcagatgccgggaaagcatggtacccgcttcccgcatggaatctaacagtgcggctccgtcaacggagcggtccagccatgaggcaaccatattccgaggcgccagcaggggcatgcgatcatgcaccttgacgaactcgtccgcggcagggcaggtgatgatggttgcggtcagctgccatggcgatgcgggagacggcctccaccatgagtacaggccggccaaagacaatagttcatcatgtggtgcgtgaaaatagaacggcctgcgacctttccattcgtagtagccggaagcggggatgatggctcgcatggattttgtggattcggcgaacgccggcttgacatgcgcagactccacacgcgcattatatgtggggtagctcagcactttgctggcgctccatcgcggcaccagcgaccaataggcaccggtcagatgacggcggccatccttgccctgtgccaccacgccaatgttctgcgtgggtgcgatgttgtaggaaggctgtggcagagtgtcaacgcgcacgtcatcctcgtctaccgcgaactgtgaggccacggcatcccaatccaaatcaagcgcgaatctcctgcacatgcgcccagtctatgccatcaatggaatcaatcccaggccgtatgaccgatattcatggcgattttcctttttgttggccgctctggttccgtagcgatacgaaccaacgaggaatagcccagaatgtaggacgggttcggcaatcgggacggggcgtgacctagagtggcgcatgaccgaacaccaacaaagggaggaccatgtcggttttggacgaactggtggcgggagcgctggaggatcagcgcgcccgtgagctcaccgtatcgcttgaggacgtgaagaaggccgcgctggcggccccggctccgattgacgcgacacgatggcttaagcgcgccgacggcatccccgtgatcgccgagatcaagcgcgcgtctccgtccaagggccacctctccgacatcccggacccggccgcgctggcccgcgagtacgagaggggcggcgcaagcgccatctccgtgctcaccgaaggccgcagattcctcggcagccttgacgatttcgacaaggtccgcgccgccgtgcacattccagtgctgcgcaaggacttcatcgtcaccgactaccagatcttcgaggcccgcgcccacggcgccgacctggtgctgctcatcgtcgccgcattggacgacgcccagctcaagcacctgctcgacctggcgcacgagttgaacatgaccgtgctgatggaaacgcatacccgcgaggagatcgaacgcgcccgcaaggccggagccaaggtgatcggcatcaacgcgcgcaacctgaagaacctcaaggtggacgtgaacaaatacaacgaactcgcggccgatctgcccgataacgtcatcaaggtggcggaatccggcgtattcggcgcggtcgaggtcgaagactacgcccgcgcgggagcggatgcggtactggtcggtgaaggcgtggccaccgctgatgatcatgaacttgcagtggaacgactagtaaaggcaggagcacaagtgaaagcatccgaaaccaccccgctcagcgaacatcagggaccgtattggggccagttcggtggccgctatgtgcccgaggccctcatcaccgccctcgacgagctggagcgcgtgtacacgcaagccaaggccgaccccgaattccacaaggaattcatgacgctccagcagcgttacgtgggccgtccgagtccgctgaccgaagccccgcgcttcgccgcactcgtcaagcagaagaccggtctcgacgcccgtatcttcctcaagcgcgaggacttgaaccacaccggcgcgcacaagatcaacaacgcgctcggccaggccctgctcgtcaagcggatgggcaagacccgcgtgatcgcggagaccggcgccggtcagcacggcgtggccaccgccaccgtgtgcgccatgctcggcctcaagtgccgcatctacctgggccagatcgacgcccgccgtcaggccctgaacgtggcccgcatgcgtatgctcggcgccgaagtggtcgaggtgaccctcggcgacaagatcctgaaggacgccatcaacgaagccctgcgcgactgggtcaccaacgtcaaggacacgcactacctgctcggcaccgtcgcgggcccgcacccgttcccggccatggtgcgcgacttccagaagatcatcggcgaggaagccaagcagcagctccaggactggtacggcatcgaccatccggacgcgatctgcgcctgcgtgggcggcggctccaacgccatcggcgtgatgaacgctttcctggacgacgagcgcgtgaacctctacggctacgaagccggcggcaacggccccgaatccggcaagcacgccatccgcttcgcccccggcaccggccagctcggcatgttccagggcgccaagagctacctgctggaaaccgacgaaggccagacgctcgacacctactcgatctccgcaggcctcgactacgcttccgtgggccccgagcacgcatggctcaaggacatcggccgcgtgaactacagctgggccaccgacgaggaggccatgaacgctttccgcgacctgagccagaccgagggcatcatccccgccatcgaaagctcgcacgccgtggccggcgcgtacaaggccgccgccgatctgaaagccaagggctatgacaaagccgtgatgatcgtgaacatctccggccgaggcgacaaggacatggccaccgccggcaagtggtttggctacctgaccgacgatcaggccgccgcgctcgatgtggccggcgcccacggcgacaccgccgcctgaacaagaagaggagatttttgattatgaccaacgaagcaaccacaccgtccggccagccgctgggcatcagccacaagcccagcaagtcaggcgctatgttcaccaagttcaaggccgagaacaagcccgccttcatcggctacctgccctacggcttccccaacccggacgtctcgcttgacgccttcaagacgatggtcgagcacggcgtcgacgccgtggaaatcggcctgccgtactccgacccggtcatggacggcccggtcatccaggctgccgcctccatcgccctgaacaacggcgagaccatcaagcgcgtgttcgaggccgtcgagaccgtggccaacgccggcggcgtgccgctcatcatgagctactggaacctcgtgtaccactacggcgtcgagcgtttcgcccgcgacttcgagaacgccggcggcgccggcctcatcaccccggacctcatcccggacgaggcgggggagtggatcgaagcctccgaccgtcacggactcgaccgcatcttcctggtctccccggactcgtccaccgagcgcctcgaaaccgtggcccgcaacgcgcgcggcttcgtgtatgcggccgcccgcatgggcgtcaccggcgaacgcgccaccatcgacgcctcgcccgaactgctcgtggagcgcacccgtcaggccggtgccgagaacgtgtgcgtgggcatcggcgtgtccaccgccgaacagggcgccaaggtcggctcctacgcggacggcgtcatcgtcggctccgcgctcgtgcacaccctgctcgcggacgacaacaagaccgcacgcgacccgaaggaaggcttgaagctgctcgccgccaagagcgaggaactggccgaaggcatccacaacgcccggtgaacacccggtgcgcctcacgcgggttgtgccgtgacacggtagggtagtcacagagcatcaagcacaacccgcgcgtggacacaccatgagcaccagcaagtagaggcacgatgaatctggcttatattccctcgccgaccttctccaagttcgagatcggcccgttcactatccacatgtacgcgatctgcatcctgatcggcatctgcgtggccgtatggatcctcaccacacgttggaagcggtacggcggcaccttcgaccagattctcgacaccacgctcgtcaccgtgccctgcgcgctggtgggcgcgcgcctctaccactgcatcaccacgccggccgactacttcccgcccaccggcaacttggtcaacatcctcaaggtgtgggaaggcggcatggccatcttcggcggcatctcagtcggcaccttggtggcgttcctgtggtgccgccacaagcactatccgttcgcgatcttcgccgatgccatcgcccccgcgctgcccgtggcccaggccatcggccgactcggcaactggttcaaccaggaactctacggctggcccaccacgttgccgtggggcctgaaactcaacgacacggacgccatcggcaaatccgaaatctgctattccggcgcgcaatgcccggactacagaaccacgctgttccacccgacgttcctctacgagatgatctggaacctcatcggcgccgcgctcatcatctacctcggccacaagctcgccgaccggctcaaggccggccagcagttcgccatgtacctgatgtggtacggcctgggccgcacctggatcgagaacgtgcgcatcaactactccacggtgatcctgggcctgaggaccaacgtgtggaccgcgatcatcgtcttcgttctcggctgcatcctgttcgtcgtgctctaccagtacggtccggaccccaaggcgcaggcgcgcgggcttgcggcggtcaccgccgacgagctcgaacgccagagcatcgaagaggaacagcttcgccagaagaagcaggccaagcgcactaagtgacaccacaataaacagcgccgaaacagcgcgaaacacgggaccccaagtcccattgcacagataaggtaggaaaccatgagcaatatcgcaatcgcacccagcatcctgtccgctgacttctgcaacctcgaacgtgatctcaaggccatcgccaacgccgacctggtccacgtcgatgtcatggaccatcatttcgtgccgaacctgaccctgggcgagccgatcgtcggccgcatctgtcaggtcaccgatctgccggtcgacgtgcacctcatgatcgaggacccggtccgttgggctcccgaatacgccacgctcggcgccgcctccatctccttccacatgggtgccacccacgcccccgtgcgtctggcccgacagctgcgcgagatgggctgcaaggcctgcttcgccgtgcgtccggccgaaccggtcgagccgctcttcgatatcctcgacgagttcgacatggtgctcgtcatgaccgtcgagcccggcttcggcggccagaa

SEQ ID NO: 3500 - DNA, 6781 bp, Unknown
  R85_18m  MAG No. k141_8243
cctcggcgcccagcttggagccgtgggaggacgggtcgttggtcttgcctggggtcggccatgcgatcagggtatcgaccttgatgagcttcggctggtccggggcggcggcttcggccttggcgatgacgtcggccagaccctcgatgtcctccttgtaggagccgtcgggctggatgaagctgaactcgtcggtgtaccagccgtaggcctggaagcgcttgagcacgtcctcggccagcaccaggttggtgtcgccttcgatctggatgcggttggcgtcgaagatcacggtcaggttgccgagcttctggttggcggccagggaagcggcctcgccggagatgccctcctcgatgtcgccttcaccacagatggcccaaatcttgtggtagaacggggaatcttccttcggggtctccgggtcaagcagaccgcgctggaaacgctcgccggaggcaaagccgatggcggaggcgaagccctggcccagagggccggtggtcatttcgatgcccggggtcaggccgtactccgggtggcccggggtgcgggtggcagcgccgccacggaagttcttaaggtcgtccagggtcacgccgtagccggagaagtacagctggacgtactgggtgagggaggcatggccaccggaaaggatgaagcgatcgcggccttcccagttgggatcattcggatcgtgcttgatgaagtgctggtacagcgtgtaggcgacgggcgccagggagacgggggagccggggtggccggagcctgccttctcaaccgcgtcagccgaaaggaccttcgccatcttgatggcgcgctcgtcgagctcggtctccttgaattcggtcatggattactttccttccaattggtcgggccgcgtatccggcttgtgccgggcgcttgacgccctcacattgcgattaccatgctagcgtcggtttgcgacgttgcggtgcaattttggcgtgttttggtagtttgtgttctgttagcgttcacagtgaacattgctacgctgcaaacgaacgcattagcactcaagcctaaggagtgctaatacaatgttctaaggtgaagtgcgccacctgcacgtggcggagccaagaaagaggcaatatttctgggttcccgcgtgtcgcggcgtggcgaaccgaccgtcggggtacgccctgagtgaaccgtgactgatatgaatatgtatgcatatataaggaggcgcgcatgacgcaatcaagacgcatgctggtgctgcgcgccgtggtggaggattacatccgttctcaggagcccgtgggctccacttcgctgacgcgcgaccatgatctcggcgtcagttcggccaccatccgtaacgacatgtccgctctggaggatgaaggatatctgattcagccgcacacttcggccggtcgtgtgcccaccgaaaagggctatcgatactttgtggaccgacttgctaccgtggtgccgctcagcgaggcgcagcgccgcggcatcaacagcttcctgtccggatcggtgagtctcaaggacgcgctgcagcgttcggcacgactgttgtccgaaatcaccggtcaagtggccatagtcacctcgccatcgctggccaaggccacattgcggcacgtggagatggtgcccgttgccatgaccacgttgctcgcggtggtgattaccgacaccggccgcgtggcccagcacggcctgaccatcgcatccatgcccgccgtggacgagatcaaccggctctccaacaccgtcaacgaacaatgtgtcggactgtccctatcgaaatccgcggagaccgtgcgatccatcgccgccagcgccggctacgagtcggtgcgcggcgtggccgacgcgctggccgacgccttcgaatcgatggcattggacgaacgcgcggacgaactgtacatgtccggcacctcgcacctggcccactcccggtccctggccgatctggccccgctcttcgacgcgctggaagaacaggtcgtgctgatgaagctcatgagcaacctgagcgaggagacgaatgcatccggcgtgggcgtggccatcggctccgaaatgcacacccccggcctactgcatgcctccgtggtcagcagtggctatgggcgcagcggtgcggcgggcgaaccggcggggaacgatcccgtaggcgaacccgaaaccgaatccgagacggagagccagacgaacgacacggaacccatcgccttcgtcggctccatagggccgacccacatggactatgcggccactatggccgccgtcagggccgtagccagatatttgaccgccttcctctccgagggccggacccaagactgaccgccgtctgtggcacaatgacccgcagaccaaacgaacacaaaggatcaatcaagtggcagattattacgagacgctgggtgtggaacgcggcgccagtgacgacgagatcaagaaggcataccgcaagctcagccgtaagtaccaccccgacatcgcgggccctgaattcgaggacaagttcaaggaagtgaacaacgcctacgatgtgctgtccaatccggacaagcgccgtatgtatgattcgggcgtcgacccgaacgatccgaacgccggtgccggcggcttctccggggcgggcttcggcgatatgagcgacgtgttctccacgttcttcggttccgcgttcggtggtggctcacagggcccggtgccgcgtacccagcccggccgcgacgccctggcctccgcgtccatcgacctgaagaccgccgtgttcggcggcaccgcgcacgtcaagatcagcacgttctccctgtgccaggagtgcggcggctccggcgcccagggcggcgcacagccggtcacctgccccgactgccacggccagggattcatgcagaaggtcgtgcgcaccatgctcggccagatgatgacctccgccccctgcgaacgttgcgagggccacggtaccatcatcaagaacccgtgccccagctgcatgggccacggccgtgtgcgtaccacacgtaccgtgggcgtcaccgtgcccgccggcatcaacgacaacgcgcgtctacgtttggccaaccagggcgaagtgggtgagggcggcggcgctgccggcgacctgtacatcgacattcgcatcaaggcggataagcagttcacccgcgatggcgacgacctgcactgctggattcaggtgccgatgagctgggccgtgctcggccacgatctgtccattgacacgttcgatggtgagaagaccgtgtccatcccggccggctgccagcctgaggacactgtgacgcttaagggactgggcgtcacgaacatccgcaacaaggacgagcgcggcaacctcatcgcccacgtcaatgtgctgattcctaccaagctcaacgaaaccgagcgcggcctcatcgaacagttcgccgcctcgcatgattcaggcgccacgcacgtctcccaggcatcccgtccacaggctggccaaaagaaaggcttcttcagcaagttgaaggacgcgctgagctgagagtggatgcgttcttggctcccctcagagaggggagccaagtctgttacttcagcagggagcggcacatggagcggtattcgttgacgtagccgccgccgaagaagacacagtggccggcgatggggtagagctgccagagcgtgatacgctcctgccatccggccttcaacggatgcacggactggtagccctcggtgatttcgctcagatagctcatgccgaacaggtgcagcatagccagatcctcctcgcgatgaccgccatgtgccgccgggtcgatgagcacagcctcgggctgcccggaatcggcggtccacatcacattgccgctccacagatcaccgtggatgcgcgccggcttgtcggacgcggctcggcccatcagatccggcaacgcttcaatcacgcgctcggtcagttcgacatcgcgcttatccagctcgccacgcctcacaccaaggttgaccatcgggcgcagacgtccatcagcgaaatagctgatcgggtcggtccactcgccggtatccattttcactgggtcctgcaatggtccgaaatagcatgtgccgttatatccgtcaggcgcagacccgaaatattcggcacccacatcatgcatatgggccagagccgcaccaaaagctcgtgccgcctgaggcgtgggggacgcgctgcccacacgttcgatatccagataatccttgccccagccgtatacctgcaccacgcgcgggccgccctgcgcatgagccgctcccaaccattcgagtcctcgaccctcgcattcgaagaatccttccggtgcgaatgccctgcttttgcgatacgtggccataatgctcccttcgtcgcttacgtactatatccactttcattgtagaagccgtggatgttaccgattcttagtgttgttctacacccccttgggtagggtgttcatcgtcataacacatcaaatacttagaaatcacgaggggttatgaattttttccaagcgatcattctcggcatcgttcaggcgctgaccgagtatctcccggtatcctccagcgcgcatatccgtattttcggcgatttgatgctgggctctgatcccggtgcggcgtttaccgccatcatccaaatcggcaccgaacttgcggtgattctgtatttccgtcacgacatcatcaatatccttactcactggttcagctgcctgttcggcaagaacggcaaggattggaaggcccgcatgggccgcggcgacaattacgccacactcggctggaacattatcgtcggctcgattccgattatcatcctcggcttcactctgcagaacgtcatcgagacctcgttgcgcaacctgtggattacggtaaccgtgctgttggtattcggcattctgctgtggatggtggatgccaaggctcgccagaacaaaaccatgaatgatatgacgtatcgtgatgcgttcctcttcggtttgggccagtccatggcgctgattcctggtgtgtcccgctccggcggcaccatcaccgtcggtcgcgcactgggctacacgcgtgaggccgctgtacgtctgagcttcctgatggccatccccgcggtgttcggctcaggtttgctcgaagccatcaaggccgtgaagaactacaaaaccgatgcgatgttccccggctgggggccgaccctcgtggccatggtcatcagcttcgtactcggctacatcgtgatcatcggattcctgaagttcgtatcgaacttctcctataaggccttcgccatctaccgcatcggtttggctgtggtcgtcgccttgctgctgattgtgggcgtgctgccggccatcgatccctccgtggcggctgcggcataagacgggtcgatagacgactccaatataatggtgctcccgctggcgggagccgtcagcgaagctgactgggggtggtcactggaatatgccagcagaaccaccctcagtctcgctacgcgagccagctcccgacattttgtgcgacgtgcacatggtgcactgctatgaacagcccacagggctgttcatccagcgggagcacaccatatatgggctaattgcccatctggcgcagaaacgcttctgcttctttgactagttgttcggcctggggcgctcccaaggaagcctccgcctcggctttctgctgcaagtcgtagtcgtgctccaaatgctccacgtaatcgtgaagctggtcattacaacgaaccagtatcgaggcttgcgccttccactgttcggctttctgcttcagatctgccgtatcgaaggtgaagccgatatgcttgcccaacgcatccagcaatcgcatagtgccggcagaacattcgtcgctgcccaaatattgggggatggacacccacatcgaggaatgagcaaaaccttgctgcgcggcggccacatccaaaacggtaggaatgcctaccgggccgttatacgaccggtctccttcgcattgacagtctccgtcgctgacggcgatgggcaacggacgggtatgcgggcaatcggagaacatcgaacctaacgtaatgatccgattgacatccagctcatcggcaatggccagactctggctacagtattccttccaccgatagttcggttcgggggcgatctgcgcatagatatgcttgcctgcgtccaacgtgatgtcgtagaacgtggtctgcggccagataagattggtgcgtcccgcaacatggcacagcataggacgggcaacctgatagtcatagaaatcatcacatctaatatgacgaatctcgcgggactcatatcgcttgaccagatggcgcaccgcgttcgtcgccgcctgacaggcatcattccatccctcgaatgcggcgatcaatactgcgccggtgtccttcgctgcttcactcatacctctagagtaactggaattcattgcccgaagcgcacgctttagccataagcgagagtatgcaattacaggcgacacgccgcagctggacgaactacacgcatgtgagtatagtaaacactcgtgcttcggcagggagacctcgccaaggaaacacacgcggacatagcttagttggtaaagcgcaaccttgccaaggttgagaccgcgggttcgagtcccgttgtccgctctaggtccgtgagttgacagaccttacggtgggttagccaagcggttaggcagcggcctgcaaagccgtatagacgagttc

SEQ ID NO: 3501 - DNA, 3215 bp, Unknown
  R85_18m  MAG No. k141_8598
atctgctgcagcatgccgcccatcagctcggcaaatgcgtaatcgtggtgacgcattccaagcgtgtcgccgactccgccgatgtcgtgctgcgtctcaggagcaagaaactgacccgggcgtgacccacctgggccgggcggcacccatacaccgcttcggcatttcggcaccccggcgaccgggcactccggtatcccggcccttcggcattctggcacccccgcgctccggcaccccggcgacccactcgcgttgccggggtgccgtattcgctctgcgccataaagtgcgtgataatggaaccatgccagtgatgaatgatgaagtgcccggcgagggtgaaccgcaccccgattgttggactggagtaatccagattcgatgatcggaggtgcggttcaaaaggcccttttttgtgtcggattacgaaccgcgcgtttcaccgcttgccgttgtagatctcgttgtcgatcacatcggcgaacacgcggttgacggccgggcgcactaccttcagcgacggcgtcaggcacttgttctcctgcgtgaactgcgtgcccagcacggcgaacttgcgcacggattcggcacgcgagaccgtcgcattcgccttgtccacgtactgctggatctcctcgcgcaccgcggcgttcgtggcgagccggtcgaccggcgtctccgtggacaggccgtgcgcgggcagccaaatggccagcgactccgggtcaagtgtcaccagcgcgccgatgaacgggcgctggtcgcccaccaccacgcagtgctccacgatcgggcacttggcgatctcctcctccagcggaatgggggagacgttcttgccgccggcggtaataataatgtccttgattcgaccggtgatgatgatgcggccggcgtcatcgatggacgcgaggtcgccggtcctgagccagccgtcggcggtgaacgcctcggccgtcttctccggcagattgtgatagccgcggaacacgttcgggcccttgacctgcagttcgccttcgtcggaaatgcgaatcgaggagccgggcgcgggctggcctacggtgccgatcacattgtcggtcacgcgcgtggcggcgaacggggcggcggtttcggtcatgccgtaaccctgaatcatcggcagaccgatgccgttgtagaaatgcgccagatcaagcgacagcggtgcgccgccgcaggccacgtacttgatcttcgggcccagagcgccgcgcaccgtgcggtagacgagcgtttcgtacttggcgcgctcggcgatttcggcaaacgtgtgctgctcgccggcctgctccttgcggctccagacgcgcgcggcctcggcggccttgacaaacaggcggcccttccagccggcaccggccttgtgcgaggcggcggtgtacaccttctcgaacacgcgcggcacgcccagcaggtaggtcggttcaaacgaacgcaggtccggcagcagggacttggtatccggcagataaccgaccacgccgtcatcggaggcgatggaggcgtactggataaatcgtgcgaagcagtgggccagcggcaggaagagcagcaggcgcggatggtcgtcaagcaccacttcatgaagcgcctgcgaggcggtgatggtgatggacacgaagttcttatgggtcagttcggcacccttcgggttgccggtggagcccgaggtgtagacgatggtggccagatcgtccgtgcgcacggtggccacgcgctcgttcagttcctcgtccgaaacagccacgcccagaccttcgagcgcgcccagtgcgttgccctcgatcatgagaatctgcttcaaggcagggcagtggtccttgaccgagtcgagccggtcgaagcgctcgcgattgtcggcaaaggccagcttgaccaccgaatcgttcatgatgcgctgggcctgcggggcggagtcggtgtcatagatcggcacgcttaccgcgcccaccgcggccagtgcgaaatcgagaatgccccattctagacgggtggaggaaaagatggtcaccgcgtcgcccttggcgatgccgagcgcgatcaggcccttggcggccgagaccacgcgctcgtggaattcgccggtggtgacgttctgccagcggccggggccgattttcttggcggcgattaccgtgtccgcgccggtgcgggcaaggcgatcggtaagtagggagtagatggtctggttgtcgcggatttcgatggattcgccaggcgtggtgtagtggtcaagcataagcgggccgtgtccttacgtgcgttgcgtgatggctgttgacaaaatcgagccattctgacaagttaggttacgctggcgtaaggttgcgcgcgttgtgggcaatggagaagttgtctgtctggttttgtggattgtatacaacgccgtgtctaaccggtttgctctacggttatgacaccgtgtccatttcgggagccatcgacttcctgcaggacaagtacgcgctgagcccggccctgcagggtctggtcatcagctccatcatgatcggcggcgtgatcggcgccggcttctccggcttcctgtccgataagtacggccgccgccgaagcactggtcgccgcgcaaaaagcagcactaggccgcgtttgctgcgtctattggcgaattgatcatatgggtcgtctgcgtgcagacgacccttttgcgttccgtcggcttctgacaccgtagaaacgtgctttctcggcttcgaggggctgattttgccttatctggaagtctacttccacttcgaggggctgatgcccaagtagacacggccctaaaacggcggaatgacgttgacgtgtagctgtttatacttccgattacatggatgaggagcccctcgaagcggagatagacttccggcaaatgcgaaatcagccccttgaaacggaagtaggcctccggcaaacgcaaaaattagcctcctcgaaacggataaatgcacgtattgggtgtagtggatgcttcagcccctgatatcgaagcatattttttctggttggcgcgtctagcatgcgcactccgcaatcgataattctgtggcctctctcactttaaaagtctggcgtgtgcgagggcgttcgcttaaggtgaatgggattgcgcggaatgtggagcgcagggtcatgaccatgcgcgtgctgcagatccagctgcgctcgctgaccgccatgga

SEQ ID NO: 3502 - DNA, 10907 bp, Unknown
  R85_18m  MAG No. k141_8730
gatgtggccaccgcggcattcagtggtaagaacgaatacgtcaagtggctcaccgcctccaacaactacacgatcctacgccccgaactgttcaacagctccggcgcgttctcctcccccacgctcaccatcaatggcgaatactgggatctgaagcagctcacgctggcggacaccagcatggtggacggattcctcaagtccatcggcttggactccgatcaggtgggcgtggaaggccagatgccatcgatcggcgccaacaagaagccgatttcgctggccgattaattaccggcgcggctcggcctgaattgaccactcgagaactaccggtatactagagatttgttcaaaacgatttacgcgttaagaacaatcgcctctttagctcagatggccagagcggccgccttgtaagcggcaggtcgtcggttcgatcccgacaagaggctcgacgcgtagaaaagtggcgtattatatgatacgtagatttttctacgcatataattcttaccttgggtaagtactccaggagccttcccccaactatgggcttcctggaatgagggcggagcgtcccccaaccagctccgcgccttcaggggggcgggaacatccccttctctcccgccccctttttcttttctttttttgagctcagaacaatctgacgagcaggaatggtgacggtggccggtgaaaccgcagtacgggccggaacaaccgttacgatgggtggcgtaatcgttcatccagcaggaagagtatggcaatggcacggcgttggaccccgcagcggtttgttacactgcgtcgcatccgcgtaatcgcctgtatcgcggcgaccagtatcgcgctggctggatcattcacgttcaccgcgcgtaaatccgtagccctgaacatcaacgggcaaaccacccaagtcaccacatatgcgatgacggccacccgtcttctggaggaacaaggggtggatatcaagacccacgatatcgtcactacctcgtccggcgaccaactcgccaatcatgccgtggtcaccgtacagtccgcctaccagaccactatcaacatcgacggcacgtccgttcccttctggaccgtggccaccagtgccgaccagttgctgggatttttcgaggaaaaccagaacaacgccacaaaaatcaccgtcgacatcgacaatgtgtacaaccagctcaccggcggactggtcatcaatcaggatggcccggtcaccgtcattgcggacggcaagacttccgtggcccccaacggcaaactgcctgcggcctccattcttgactccaaaggcatcgtgctgaacaaagaggaccgtgtgagcgtcgaaaaggacggcgataccactatcctgcgcgtacggcgcgtgacgcatggcgaggaaacacgcacagccgtagtgccatactccacacaaaccatcatcgactccaatctgcctgaaggccagtcggagatccgccagcaaggcgtcaatggcgagaaaacccaggtgtataacgtcacgtatgtcgatggcgtggccgaatcggagacgctgaaatccgaaaccgtcaccacgatggccatcgaccagatcatcgccgtaggcgccgccaagtctgataccgataagggttccgacaaaggttccgacaaaaaatccgactccgccgataacggcaaggccgattccggttccaacaatcagcacgagtcgtccggtaacaatgccaacaacacaggcgacaagaacaacagcagctctggcaacaacacgaacaccgataccaacaacaatgccggcaacaccgggggcaacaactccggtaacaccggcaacaccggtaacaccggcaacaccggcaacaccggcaacaccggcaattccggtaacactggtaattccggtaacaccggcggcggtacgaacaacaattccggctcttccggctccgattcaggaacaaccaccacgccctccggccgactctggcacgccaccgtagcccaggctcaggcctatgccgccggtgccgccgcgcagcgcgggtggacaggcaacgactgggattgcctggtcaaactatggaaccgcgagtccagatggctgtggtatgccgaaaacgcgagctccggtgcctacggcattcctcagtcgcgaccagcagacaaaatggctgcgttcggcgccaattaccgtgacgatgccgccgtacagatcgattggggtctgtggtacatcgcacaaacctacggcagcccgtccaaggcatggcaacattccgaacaaatcggttggtactgatcggttacgaagcccacaaggaacacacgcttatgaacgacaccattcccgccaccggtcacctgttaggtgccgccgatatccgtcgtatcgcggccgatgccggcatcagccccaccaagaaattcgggcagaacttcgtcatcgaccccggcacggtccgtcgtatcgtacgagaggcgggagtgaccgctgccgatcatgtcatggaagtcggccccggcctgggatcgttgacattggcgattctggaaaccggcgccaccatgaccgcagttgaaatcgatccgccgttggccgaacgactgccgggcacagtcgccgaattcatgcccgaagccacgtcacgactcaccgtcgtcaatcgggatgccttaaccgtcaccccggagaacgtgcctgatttcagcgatgacgcatcgtttacgctggtcgccaatctgccgtacaacgtggccacgccgattctgctcacgctgttggagcgtttcgacaacctcggctcgttcttggtgatggtgcaaaaagaggtggccgacagactcgccgccaagcccggttccaagatctacggcacgccgagcgtgaagctcgcctggtatggcaccgccgaacgggtgggcaccatcggccgcaatgtgttctggccggctcccaatgtggattccgcgctcgtcagattcacccggtatcaggccgatgacccggccgccccgggagcctcgaacagcacggccgacggcggcgcacaacgggaactcgtatttcgtctgattgatgcggcgttcggtcagcgtcgcaagaccctgcacgcggcattgaagaccattgcgccctccgaggcattctccatcgccggcatcgatccgacccgtcgaggagagacgctcaccatcgccgaattcaccgctctggccaaggccatcgaatcgtgtggagatggagatgaggcacaatgagtccggtaatctcacatccacgcccagccgatgcccgacatcagttcgatgagctctcccccatcaccattacggtggattgcccggcgaaaaccaatctcaccttggaagtgggacctgctcacgacgaatggggcggacgccacgaactggacaccacctactgtgcaatcggcgtatacgacaccgtcaccgcaaccgccaagcaacccggagcgggattctctctggagctcgaaggcgcttatttgggcgacttggcctcctcacgcagcgacatgcgccgcaaccatgcggtactggccctcttcgccatggcccaggcggccgagcgcgagccggatgtggcgttgaccatcaccaagcgcattcccgtgggtgccggactaggcggcggttcagccgacgccgcggcgaccatgctggcggtcaatcgtctctgggagctgaactggcctatagagcgtctgcgcaccattgccgccacgttgggcgcggatatgccgttctgcctgaccggtggccttgcatacggcaccggtttcggcgaacgcatcacggatatcgcccccggcagccgcgatgagctggcgctgatagaacagggattcagcggcgaagtattggtcggcgcgtaccagtcgcaactcagcactcctgaggtctaccacacctttgacctcgtgggagccgcagaaggcgaccgcaatcatctgcaggctgcggcaatcagcctgcatccccgcagcgggcaggccatcgacgccgccacgcaggcgggtgccagccatgcattcgtctccggatccggcccctcagtggtcgctttcgccgccgacgaggcagcggcacaacgcattatcgatgtgtggcgcgatacggctgtggtcgatcgcattattcgagccaaatctcccgcacaccccaatatcggcgtcagacagtgacgctaaggtagcaaccagccacccgacccatgaaagaagtccaccgatgacgtatcaggttgatgaacgtgaagcccgcaaggcgtacgtgcgccaccgccagaccatcgtcttttccatcagcggcgcggtattggcagtagtgctggtcatagccctactgttcaatttccacgttttcggcctcggcgaagtggagactccggcccgccagccgaattacggcaacgcggcgccgtgcgcggtcaaggacagcagcggcaaagcgcaatacgtgtccaacgcttcggtcggcatccgcgtgatgaacggcacctctcacggccaattcgccaaggccgtgggtgaggctttggccaatcgtggattcagcgtgcagaaaatcgataactattccagcaccggcgttgaacgcaccaccatctacttcggcaagaacgccattaatcaggcgtatacgctgatcggcaatttcaccgacgccaccatgatcatgacggctcgcgaggatcaactcatcgatgtggtcatcggcgccacgttcaacgatctgcaggacaccaaatcctccccacaatccggtaagaccatcaccaatatcgagggttgcaaggccgccgatagcatgaccaagctgcccgccgacaccaaacacgacgcatacacggcggagtaaggcgcatacagcttcatcttcgcgaaaaaccgtacgctgacacgtattcagcgtacggttttttggtatcggactagtatcggactactgaatctcggcgtaccagcgcttgagttcttcgacggccacatcgtggtccaccggaccgttatccaagcggtattccagcatgtgcttgtaggcgcggccgatcatcgggccgggctccaggcccagcaactccataatttcgttgccgtccagatccgggcggatcgcgtcgaagtcctctttcttcttgagttcgcggacgcgctcctccatctcatccatggcctgggagaagatcatcgccttgcgcttgttttgtgtggtggcgtccgcgcgcgtgagcctgttcagccgctcgtacaggtgcccggcatccttgacataccggcgtacggccgagtcggtccacggctcgtccacatagccgtggaagcgcaggtgcatattcaccagttccgagacgtcctcgaccagatggtggtcaaaacgcagcgccttcaaacgcttgcgggtcattttggcacccaccgcgtcatggtggtggaagctcactttgccgcccggctcgaaccggcgggtcttcggcttgccgatatcgtgcatcacggcggccaagcgcagcgtcaggtcgggggcgggcaccgggccgtccgggccggtttccagggcgatcgcgcgttcgagcacaatcatcgtgtgctcgaagacgtccttgtggcggtggtgttcgtcgatctgcaattgcagggccggaatctccgggaagacgatgtccgcaagaccggattcgaccaacgcctcaaggccggcgcgcggacggtcggagagcagcagcttggtcagttcgtcgcgcacgcgctcggcggatacgatgtcgatgcggtcgcgcatcgaggtaatcgcctcggccgcgtccggcgcgatacggaagcccagctgggccacgaatcgcacggcgcgcatcatacgcaacggatcgtcgtcaaaggactgtcgcgggtccaccggcgtgcgcaacacacccttggacagatcactggcaccaccaaacgggtccacgaattgcaggtcgggcacgcgcagggccatcgcgttgacggtgaagtcgcggcgggacaggtcgccctcaagcgtgtcgccataattgacctcgggcttacgcgagtccgtgtcgtacgtgtcggagcgataggtggtgacctccaccttgacctcggtgccgtccgggcggcggcgcatggcacccagcgtgccgaacttgcgccccatgtcccagaagccgtcatgcccccaccggcgcagtatcggctcgaactgctcaggccgtgcggatgagcagaagtccaaatcgtggctctttctatggagcagcaaatccctgaccgggccgccgaccaatgccagctcgtaaccctgttcggcgaacagtcgaccaagttcgatggcttcgggccatacttcgaaattcaatgggcaccttcccgcgtgcgacgtttttctgccctaccagcataccgttaccccacctgcacacggggttgagtaaggtggagaatatgattacgcccgccgaccttgcccgcatactggggcaaacaccagattcggcggatagccatacccaagaccacctgctgtatacgtccgaaactccgcatcattccgccgattcgggcgattctcccgatgccggcggcaccgcgagccactccaccaatcaggccgttcatcaagacgaagtagacgcagtaccgactgcgcaacattccggtgtactcggcacacccgcaacgcccgccacacccgcaccatccgaatccgaaatatcggacaccgccagcgacatgcccacaccgaagccgatgatgcccacaccggccaccgtcttcggcatgcatgccaccgtcaccatcgccactaccagcggcactatcgaggggcaggccgatggtatcgccggcgaggccggtgccgagacgattgccgaggtcgagccgattatcgccacggcacaaacgtccgtaaccatcgtcacgaacgattccgcggcgaccacccacgcggccgtagatactgccgttgcggtcgccaaggccgccgccgcgcataccgcagcgataccgactccgcgcgacgtgctgatgccgcctgcggcacgtaccgcaccggccgcaacgccggtcaccatgccggtctcagcgccgtctgcagcaccagtgaggcccgcaacgtcagcgcatcccacgccggccacggtcttcggccggcatccgtccgcggatgttgcctcgccggaaccggcagtgccagtagaaccggtgacgccatccagcccgactccggccatgatgccgcaacgccgtacgtcggacggtccgaccacattcgcttcactggatgcccaggaactgccggtcgtacgcgaatattcggcaggcggtctgattttcgatgaccagaatcgcgtggccattatcgcccgtcattcccgctccggccatctcgaatggtgcttgccgaaggggcatatcgaaaaaggtgagaccccgcagcagaccgctgtgcgcgaagtgcatgaagagaccggcatcctgggcgaggtgatcgattccatcgccaccatcgactactggttcaccggcaccacgcagcgcgtgcataagctggtccatcacttcgcgctcaaacagaccggcggcgaactgacggtggaaggagacccggatcatgaggcggaagacgccatctgggtacgttttgaagatttggatgacgtgttgagctatcccaacgaacgcaaaatcgcgtggctctacgccaggaagaagaacaggcaggcaaacgagtgaacctacccggagtcttacgacattgcacacgtctggcacacgcactggcggctggcgtcgccgttgtggcgatgctggccgctccattgaccgtttacgcgaacgatacgacggacacgactgattcatccgatacgacggacgcaacgggcaatcagaccgagaatcagcccaagcagagcattgccatcacgcaaagcacccccatcgtcacctccaaatcgggctatcatgtcaccgcggtcatcagcaatacggacagcacggccacgtcaagcggcacactgcacctgaccaccaatacgctgttcacctttgtctcgcgcaccgatattcagaattgggccgagaacaacgcccccatccccacccccaacgagttgggttccgttgacgtgccatcgattcccgccggcggcactgccaccgtcaccatcgaggtgaacgccaatcagcagacccttgcctccatagggagctgggggccgaagccgctgatgctgtcgtatatcgtcggcaatcggatactcgccgatttgccgagttttctgacccgatcttcggatgggctcaacaccgcgacgacaccggccatgaacctgaccgtggccatgccctacaccgccagcggctggcaggtcgataacaaggccatcagcaatcgcattgccgaaaccaccacttcctcgacatcaacatcgtccaagtccaacagcacggacaagtccgataacgccgacgccggcaacgcggccaaagccactgatacgcaagccatatccttatccgagcaggatgccgataccgcgcgatcccttgggcagacattcgccaagcaccgctcgctgcaagtgatcgcggatcctctgtattggcgtcagtccgcagtgcaaccgtccattgccggcatcatgcagcccgccgactttgacatcaccgcctataccgcgctgggtgataccgcggcctacgaaaaggccggcatcaccactgaacagtggaacgccaagcaggcggccgcatggtatgccgccggaaacgactccgaaacaccctccgcgtacgcatggcagggcaacaactgttggacgttggatgcgctgaccgcagcacgcgagcagggctatgacacggtgattgccgatgcctctttcgatgccgaccagactgaagccgtacacacaggcacctacgtggtggatacgcctgccggcgatgtcaccgtgctgaaggagcaatcgaccttgggcatgctggccaagggccaacccaccagcacggacgcgcaggccgagtccagcgatgccggtcggttggcccgactggtcgctcagagcgcgttctaccagatggaacagccctatacatcccgatacctgcttatgacgttctcccgcaccacggaggccggctggatcgatcaggtgatgagcgccttcgagcaggcgtcctggttgaatctgacggatctgaagaccatggccaaggccgatccgtacaatgtcagcgattcggtcaatcccgacaaggccgatgatgccaacaccgccaatacccggtcggcgttgagacagttggctgacagccggcatgacatcatgcgcatggccacctccatattgaagaacgagattgattccgacgaggtctcgtcgttggccccgcaggccctggcccggcaggatgccaatgacaccgtctcgcacagcaacgatccgacgcaatggattggctctttgctggtgctgcatgacgatatggcgctgcgatccatgtctggctccccccagccgacagccacgcgaaaagccatggtcagagccgcgaaaacactggccagcgatcttctgaacggcgtacgcatcaacccatcggaatcaatatccgtgttcagcgaatccgcgaaaatgccaatcaccgtcagcaatgaccttccttatgccgtcagcgtgcaggtcaactcgctgactgactccatgcagatcgtcacctcgcgaaccactgacatcgatattcccgcgcatagcgacgctcaggtgaccttcaccatccgcgtttccacttccggctcatcgacggcccatgtgtcgctgagcgaccgggaaggcaacagcttcggcaacacgcaggataccgcgatcaccagtgtgatgcgcgtcagtgatgccagcggtttcattatcatcggcttcgccgtgctactgtgcattatcggcctgtggcggcagttccatcggaagaaggaccccgacgaatgagttcaaccgtaggtcgtaattccctgatcatggccacgggaaccgctgcttcccgtgtgaccggtcagctccgcacgattcttctcgctgcggccatcggcaccactggattggcggccaacgcctatcaggccggttccatgattccccaatccgtgttcacgctggtgtccggtggtattttcaacgccgtgctggtgccccagatcgtgcgcacgttgaaagaaaaagacgcccaagaacgactgaatcgtctggttacgttggccatcggcatcctgttggccatgaccgtggtgatggcggcggccagccctctgcttgcccgcctgtacgtgggtagcgacgatcaccagatgatagccctgaccacctcgttcaccctgtggtgtatgcctcaggtgttcttctacggcctgtatacggtattgggtcagatcctggccgccaaagaccatttcctcacgtatgcgtggagctcaaccggtgccaacattattagttgcgccggttttactggttttattctgctgttcagcaaggccaatgaacagcccctcgaattctggaccgccgacaagattgcgcttaccgcaggcacctggactttgggcgtggccttccaagcgctgatactgttcctgccactggcccgtatcgggttcaagtacaaacccagcttcgggcttggcggctttggactcaggtctatgggtcccgtggcgttaggctctttgggcgtggtggtcaccagcgagatctgcggcattatccttacccgtatcgccacatccgcaccgcagcgcgcccacgaactgacgggtgccagcctgttcagcgtggcaggcaacgcgacctatcagaatgcgtacac

SEQ ID NO: 3503 - DNA, 5129 bp, Unknown
  R85_18m  MAG No. k141_8887
aggcacccacgtacctcatgatttcggtttcggttcgtctggatgcggcggacatacgaatggtggttccggtcagcaggatggcgaccaccaccatcacgccggcgagctccttcttcttcttggcctcctcctcgtggcgcagcacgagcagtcgggactggagcacggccatggcggaggcacggttctgaatctgcgaacgctcatcctgcatggtcaccacgatgccggtgggaaggtgggtgatgcgcacggccgagtacgtggtgttcacgccctggccgccggggccggaggaacagtaggtgtccacgcggatgtccgtatccggaatgtcgatatggtcggtggcctcgaccagcggcaccacttccacggcggcgaagctggtctggcggcggccctggttgtcgaacggggagatacgtaccagacggtgggtgccgccctccacggacagacgtccgtaagcgtagggggcgtccacctggaaggtggcggacttgatgccggcctcttcggcgtaggaggtgtccatgaccttggccttgaagccgttacgctcgcagtagcgcaggtacatgcgcaacagcatctgcgcgaagtcggccgcgtcgacgccgccggcaccggagcggatggtcaccacggcggaacgttcgtcgtattcgccatcgagcagggtctggatctccatctggtcgagatccttctgaatctcgccgatttcgctttgcgcctcgtccagagagtcctggtcgccctcctcgtggccgagttcaacgagcgtttccacatcgtcgatgcgctgggaggcggagttcagacgcttcagctgcgattccgcggcggacagccggctggtgatcttctgggcgttttccggatcatcccacaggcccggggccgcggcctgcgtttcgagatccttgatatcggccttgagccggtcgacgtccagcgccttggcgatggattcgtatttggcgcgggcttcgccgatcgcctgggtaaagtcaaattctgccatcgtggtttaccttactgttgattctttgagattctttgggaagtcacgtccttgttgacagccttcgcacattcctctggcgttggcgggcattgccgcgccacacacgcatccgcctgcaatccatgctgccagaaggttccgggcctgccttgccgatagccggccgggcgacctcacaaatccctcgcatcagacgtgttcaactgcgggcacgaatatgcgaaggcaacgtcaaagccccgcgtaaatcgccgggatgatcagggagccgagcatggccacagctatgacgacacacaccacacgcacgatggtgcggcggcggttctcacgctgctgtcggccgtcctgatagttactcacgagaccaatagtgtactcaccgcttacgaccgcaggacttgccgccgacgccagccctgccggcgggcccccacggccctttcctttgcgctttcagcgccgccagatggtgtttcatggccaccagcatgatgtgcgaatcctcaaggcccaagtggcgttcgttgtgggcggaatcaagcgcgccctgacgtttggcgtaggcgtcgagcgtgttgtctccgtaaggatgctcgttggtgggtaccgcgccggggtcccactgccggctcatcggcagggtatcgatgatggtgatgcgcccggcacggtagctttccgcgtatccggcgacgttcagcatgaaccagctatgttcgaaggtggcgttatgcgccacgtacggctgctgggtaagccgcgcgagcaggccggcctgggcttggggccattcgtcgaagagtcggtacccggcctcgctgctgcggccgcgtacatcgatgccggtgagtttggcgatgagggcgttgccgagcgccgcgttttccggcggcacgccaaaagcgagacgggactggccgtaggcgtcgccggcggcgtaatagccctgctcataggcgtatgtctcaggttcgccggccgggcgcggactggccatgttcatgaactcgaagccgacgtcgatgatgtagtcacgcgccggatcgatgccggtggtttcgatgtcgatgcccatcaccgcgtccacgtcgcggccgggcagataggcgtcgcgccagtcgggcttgggatggtggccggtagcgttgccagacgaggcggcaccacccggcgaagtcgcgccggagagattggcgcgggccatcgccgcatcgcccgcacgcttctggaagcgctgggccttacgtcgttcggcgcgtgcgtcaagaatcgccgccgtacggtcttggatatcgtccaaggcgactgttgtggggaacttgacatcgctgttttcggcagcagtgtttccggcagatgcgtcaccggtttcaccgctcagattcagcatgccttggtcatcgttcgatgggcggctgccggagtacggcctgagcacggcaacggtggtcctcccccgccgttcgcgactgaccacccataggtgttgctgttcgcccagatgcaacagcgtgttgatgttgtcgttgagccgacgattggcgtaggcgagcgcgcgaggcagacgataggagccgatgaatcgatcgtaatcggtcatgaatgtgctgttgcattgggcgatgattgattccagatgctcgcgtgtggcgtaatcgaccttcaatgcgtcgtggatagcttgtggcgtcagttccggttggtccaacccgagctgaggctgtgctgcggtttcgccatattgctcaccatctgcagcaagcgccagcaatacgctgatgccatgcatcaggtccagcgaacgcacccagtcccagtcaatggtggtgccgtcggcgtctttgggcatggacgccgcccattggggaatgtctcccttggcggcgtccagccatgtgcggtcgatcatagtgcgaagccgagttcttcggcggcctcggtgggtaccgggtcgtcgcaccaataatcctcgaggttttcggtggtggtcagcgaacggatttcggcgcgatcgatatacagttcgccgctcaaatgatcggtctcgtgctggaagatgcgtgcgggccagccgtgcaacggctcgctgtggtgcttgccgtcttcatcatcccattcggcggtgatgtcgagccaacgcttgcgcacggcctggtatccgtcgaagctcaggcagccttcgtagaacgaggcggttttgtcgctggtgggtttgtagctcggattgatgatcacgtggaaggggaattccgcgatttcgcgcggatcatcctcgtcgtcgcgcacgtggtcttcgaccacggcgagcgcgagccccaagccgatctgggtggcggcgagccccacgccgggcgcctccagcatggtggtgtgcatcgtatcgatgagtttggcgagcgtacgcttggaaagctggccatggtaggccaccgtccgttggcgcaacaccggttcgccggcctgcacgatgggcaggagcttctccttgccgccggttttgatgagttgttcgacatcacggttgagttcgaggtcgactttggcgttctttccaaacattgcttttccttagggaagggtgctacagcgcgagttcttcggcgacgatcttggcgaggcgggtgcagacttcgtcggcgtaggcctgggtggcggcttcggccatcacgcgtacgagcggttcggtgccggaggggcgcagcaacacacggccggtgtctcccagcagttcctcctcgcgggccacggcatcctggatgcgcttgttggtggcggcggctttcttgtccacgttcggcacgttgatgagggtctgcggcagctgcgggaagtcggcggcgagctccttcaggctcttgccggacttgacgacctcgttgcacagggtcagtgcggtcagggtgccgtcgccggtggtggcgaattcgcggttgatcacgtggccggactgctcgccgccaagcgagtaatcgcccttgagcatttcctcaagcacgtaacgatcgcccacggcggtttccacggtcttgatgcccatgtctttcagggcgagcttcagaccgaggttgctcatcacggtgaccacgagggtgtcgtggttgagcttgccttcgcgctgcttggcacgggccagaatgcccatgatctggtcgccgttgatcatgttgccgtcttcgtccacggcgaggcaacggtcggcgtcgccgtcgaaggccacgcccatcacggcatcggtggccttgaccatggcctgcagctgctcggggtgggtggaaccggcgttcttgttgatgttgtagccgtccggcgaggcgttgatcacgattacatccgcaccggcacggcgcagggcttcgggagccaccacggaagtggcgccgttggcgcagtcggccacgatcttcaggcccttgagcggcttgggctgggttttgtcatcgttcagcggagcgatggtggccaccagatgatcgatgtacaggttggtggcggtggtctggtcgtggctcacgcggcccacgccggcaccggtcgggcggtcccagtcctggccgagcacggcctcgatgtcgtcttccttctggtcgggcagcttgaagccgccgcgtgcgaagaacttgatgccgttgtcgggcatcgggttgtgggaggcggagatcacggcacccatttcgacgttgagcacggaggtcaggtaggccacgccaggagtggggatgatgccggcatcgatcacgtcgaagccgccggcggccatgcccgcggacagggcggaagccagaaaatcaccggacacacgggtgtcacggcccacgagcgcgcggcggcgtccctcaggctgatcgtcttgggtgccggcgtcgccgagcacacgcacggcggcatcgcccaaatccaacgccagacgtgcggtcaaatccctattggccagtcctcgaacaccatcggttccaaacatcttcggcatatgaagttccactccttgtatcgcgttacccgcaccatcgtagtcgttgtgctccaccctaggacccgactcggcaaaaaacgccacggaatctgctctaggaccagacaatggcattcccga

SEQ ID NO: 3504 - DNA, 22198 bp, Unknown
  R85_18m  MAG No. k141_9059
accctctgcggtggaatgaatgcagagggtctcgtggagctgacggtagtcgaaaccgcgacctcttcgatgcgaacgaagcgctctaccaactgagctacagccccttggatgttactttgctccgcaaagcaactcgcaacaatatagtacggagtgcggtcaaacgcaatttgacgccgaagtgtcgcagacggggtaaatcacccacaccgctccgcatggataccgcggtggcacccggcaacgtcatcatgcttccagcacatgcagcactttcttttcgttgtagaacgcgaatacgatgccgcccaagccgcacagcacggccgcgcacacggcggcgatgcgatagcccgcgccggacgccatgccgatggtggagacgccggtgaacagcagcatggccacggactgccccatcttcatcgcaaaggtgcgggccgcgtagaacatgccctgacggtcctggccggtggtcttggagctggcgtcggcgatattcgccacgatggcttgcggcagaatgccgaacgcggccatcggaatcgcgccgaccaccgagagcgccaaaccctgggccatcgccggaatgaagccgagcgcggccgaaccaagggcgccggcaaatgcgaacgcacaggtgaagatcacgaaggcaaccagcagcaggcgcttcttgccgaccttattggccaagatattgaccggcagatagaacagcacagagacgccggtcatgagcacgaagtagatggtcgtggtggtttccggcagcttgagcaggctggtcacgaagaacggcagaccggtctggaaggtggtgatggccacccagtagaccacgtcggaacacacgaacttgcggaattcgccgtcgccgaacgtctgcttcagggattcgatggccgattcggaggtgggctgggagttgacgtagtccttctcgcggatgcccagcggcggcaccagcatgcacacgaacgccacggcggccatgatggtgaaggtcacgcggatggcggtgatacggcccatcatcggcacgaacgcgccccaaatcaccggcgccacgtacgcgatggccgtgccggccacccaagtgaaggagatggcggtggagatggtgagttgctgcttggagtcgtggccgagttcggcgatgagcgcgttgtacggcgtgcagtagaacgtgaggacgatgtagtagccgatcacggtgacgaacaggaacgccgcgttcacccagccggtgccgttgatcggactccagaacacgagtacggtgaccaccgcgagcggcagggcggcgaatttcaggaacggcatacggcggccggatttggcgtcgcaacggtcggagagggacgccacggccgggtccacgaacgcgtcgaagaatcgggcgaaggcggtgatgccgcccaccacggtcacgatgccgagaacgaccaggccctgcggcacgaatacggtctgaccttgggagatggtctcctggtcaggttggtagaaatacacgagccagttggagatgatgccggaaagcagcgcccacccgaactggccgaccgcaaacgcccacactttggcgatggggagatctttgatggctgatttcgccggtgcaacttgcgcgcccgttacacttgctgtagtcgtattgcccattccccataacctccgaatcaacattgacacagtgtcaaaaaccagtatacaccggggttttacactcaattccctgcagggcaaaaccgcacaccacaatccacaccccgagccgccttcccctcagccatccgcaggctctacgatgagagccatgactggtctggccgaacgactaccgcacgtcgccgctttccccgaagcgctgggcaccgggttgctgctgcataccgatgtcgcgctggacgacgggctcagtaactgcatcgatatgttcatcagcacctatgaagccgcattgtcccggttcaaggatgattcgacggtcggccggatgcgcacggccacgcatggcggcacgttcgattttcctgattgggcattgggtttatttggcctgtacgaccagctgtttgcgtcgactaatgggaccatcgacccatgcgtgggcgaggatttgattcggcttggctatgacgagtcgtattcgtttacgcctgcgccagatgccgctgaacatgcaggcgcgatccacggacgagccatttggtcagccgacgttgagcggcatggcacaacactggtgacgcgcggaccggtcgcgctcgatttcggcgcgtgcggtaaggggtatttggtggatttgcttgcggggatgttgggtgatggcgcgggtcaccctcaacccattcaatacgtcatcgacgccgggggtgatttgctagtgcacacggacgaaccaatcaccatcgcccttgaagatcctgccgatccggccaacgccgtaggtacggtcgaaatcagccacggcgcattctgcgcgagctcccccagccgccgccactggtctgacgccgcaggtcaccaacttcaccatctgctcaacgccatcgacggactaccggttgacgatgtagccgccacatgggtggccgtcacgccgccatcgagcgccataaccacgaagacatcgacgcatggcagcaatgcctcgacaacggcaaaccgcgataccgacgattcgtcgaacaccgtcgcggcacacgtccctgtcacactggccgacggcctcgccaccgccctgttcaccaccccggccacccagctgcgcgctcacttccccttcgaatgcgccattctcaacgccaaccgcaccgccgcccaatcccccaattttcccggcggctttttcacacactaatgtacgaaatcatcagtatcacatccctcgggtggaccgatgggttgctcccctcagtcagctacgctgacagctcccctcggagaggggagccgagtatagctaatccgctaatccgctaacgcaggaaacaatccgtcagtcagcgagtgcgaactggctgttgtagaggtcggcgtaaaaaccgcccgccgccagcagctcgtcgtgcgtgccgcgctcgatcacgtcgccgtggttcatgacgagaatcatgtcggcgtcgcgaatcgtggagaggcggtgcgcgatcacaaagctcgtacgccccacggtcagcgcgtccatggccttctggatcagctcttcggtgcgggtatcgaccgaggaggtggcctcgtcgagaatcagaatcggcgcgtcctgcaccatcgcacgggcgatggtcagcagctgcttctggccctgggagagcgacgacttgtcgtcgagcacggtgtcatagccgtccggcagcgagcggatgaagtggtcgaggcccacggccttgcacgcatcctcgatctgcttgttggtcacgccgggcttggagtaggcgatgttctcgcgcacagtgccgcggaacacccacgtatcctgcagcaccatggagaactggtcgtgcacgttccagcgcggcacggacttggtgtccacgccgtcaatcgcaatcgagccgccggaaatctcatagaagcgcatgagcaggttgaccatggtggtcttgccggcaccggtcgggccgacgatggcgaccttctgcccggccttgacggaggcggagaagtcgtggatgatcggcttgcccggttcgtaaccgaactgtacgtggctgaattccacgtcgcccttcacttcgtggccgttggtcccaagcaaagcggacttgccggattcgtcctccatctccggctcctcaaggaagccgaacacgcgttcggcggccgccgcgcaacgctgcaggttctggaaggcctgggcgaactgcgccaacggctgggtgaacaggcggacatacatcatgaacgccacgatcacgccgaactcgatctgcccgtcgagcgcgagcgccgcgcccaccacgcacaccaccacgtagccgaagttgcccacgaaattcatgagcggcatcatcaggccggagaggaactgcgacttccagccggactcgtagaggtccgagttgtacttctcgaagcgacgaatcgaatcggcctcgccgttgtatgccttgacgatgaggtgaccggcgtacatctcctccacgtggccgttgacgtcacccagcgccatctgctgccgggcgaagtacttctgggaggacttcatgatggccatcatgatgatcaggccgatgaggctggcaccgatggcgcacagggtcatgatcacgttgttgtagaacatcatcaccagcgcgcccacgaacagcgtcaccgaggtaatcagcgagccgagcgactggcccagcgtctggccgatggcgtccacatcgttggtgatgcgcgacagcacgtcgccgtagctaaccttgtcgaagtatttgagcggcagtttgttgattttgaccgagatggactcgcgcagtcgctgggcggtgcgctgggtgacgttggccatcatccagctttgcacgtagccgagcacggcgtagcccacgtacagggccaccaaagtccaggcgatgtggcccaccgtgccgaaatctaccgagttcatcaccggtctgccgttaacgatggcgggcagacctttgacgatctcgttggtcatgtccttgagcttgtccgggccgacgatctggcagacggtgccggccgcgcccaggatgagcgcgatgatgatgacgggaagatagttgcggcagtagttcacgagtttgcccatgactttgccgaaatcatggggcttttcgacggcacgcctgccgcccattggtcctcttggcatttgttttactccttaaaagtccgtattgacctccctctgatgagggaggtggcgcgaagcgccggagggagagaagccgtacgcgactacccctcagtcagctgtgctgttttattcgctcgcttatcagctcgtcttcgcctgggaacagcccactgggctgttccctttacggctcagcccctgacatggggagctaccgctgccgcccccctacgccgtaagctccgactggctgagctgggattcggcgatctggcggtatacgtcgcagttgtcgagcagttccttgtgcgtgccctgacccacgaccttgccgtcgtcgagcacgacgatgcggtcggcgttcatgatggtgccgatgcgctgggccacgatgagcttggtggaatccttggcctcgcgggcgagcgcgtcgcgcacttcgcggtcggtcttgaagtcgagcgcggagaacgagtcgtcgaaaatcaggatttccgggtgacggtacaccgcgcgcgcaatcgacaggcgctgcttctggccgccggacacgttcgatccgccttgggcgatcgcggcggaatacccgccgtccatgcgcgccacgaactcgctggcctgcgccacgtcggcggcggccttgacgcgattcagctgctcggccggtatatcggcaccttccgcggcctcgccagcggcgatcaacgcggcctcgcgcttgcgcccggccggggtggaggtatcggccatctcgacctccgccgggtcgcccggctgatcgccgtagctcacgttggaggccacggtgcccttgaacagcacggactgctgcggcacgtagccgatcttgtcgcgcagggccttcaggtcgtagtcgcgcacgtccacgccgtcgaccaacacctggccttggctggtgtcatagaagcgcggcacgagattgataagagacgacttgccggagccggtggagccgatgaacgccaccgtctggccctgctcggcggtgaagttgatgccttccagcatcgcctcgcgcgaatccgggtaggtgaagctgacgttgcggaattccacggtgcccctctggccggttttggccacgtcggcggcggttttggtgccgttctcgacgattggctcagtgtcgagcacctccatgatgcgctgcgcggacacgtcggcgcgcggccagagcacgaacaccatgctcatgagcaggaagctcatgatgacctgcacggagtagttggagaacacgaccatgttggagaacacggtgagcttgtccttgagcccggcggcgtcgatgaggtaagcgccgatccagtagacggcgagcatcaggccgttcaggacggtgttcatcaacggcatcatgaacgccatgacgcggttggtgaacagctgggtctcggtgaggtccttgttggccttggtgaatttggcttcctggtagtcctcggcattgtaggcgcgcaccacgcgcaggccggtgaggttctcgcgggccacgaggttgatgttgtcggtcagggtctgcatgaccttgaacttcggcatgaccatggccatcatgacggtgatggacaccagcaggaccgccacggcgatgccggtggcgagcgtccattcgaagccttcgccggcgatcttgcacacggcccatacggccatgatcggcgacttgacgatgagctgcaggcccatggtgatgaacatctgcacctgcgtgacgtcgttggtggaacgggtgatgaggctggcggtggagaacttgctcatctcggccgggccgaaggactcgaccttgcggaattcgagcgagcgcagacgctgggtgaacgaggcggccacgcgcgcagcgatgtagccggtgatgatggcacacgccacggatccgagcgagatgagcagcatcttgccgcccgcgatccagatgtccttcatgtcgctgcccggcgtctcgaccagcgtggtgatgtctgacatatagtcgggcagtttcaggtcgaagtagacctgcccgacgatggtcaccagggcgatgagcatctgaccgatctccgctttggagaggtatttcatgatgcgaaacattggtttccccttgtgttggttgggttggttattggttattggcgattggttcttaagttggctgggttatcggtgattatcggttcacgatgtcttaatagtttccattgtttgattacttacactgtgagatattatacgcacttctgtatgttcgctgtgagcgtcctcaattacctttacccccctctgacgagggaggtgtcaccgcgcagcagtgacggagggagagacccgccagcgggaggaagctagtctcgctcagcctccgcgcgcttagctgccatgtgttcagccacgcgcttgtcccgctccacgaatgcctcacgcacttgttcagccgtcggccgaggccgccccggatggcaaatcgacatatatgtggtgaactcagacaccaggtcaacgaattcgcgcgtgcgccgctcccccatttgcgagaaaatccagcaaattgcggaacgcatttcctctatcatccgatgagactgctcgcgcccggaatcagtgagattcacgcgaataatgcgccgatccttggaatcaatgtcacgcgtgacccagccttttttctccagagacgacagcacagtggagatgcggccggaactggcctgcagcgccgatgccaattgcgatggcgtttgcgtccccttcatggacagctcccggagcacgaactgctcaccatgggctccacgagtgaattccctctgcattgtcgaacgattgccccacacgctggcatacagttcactaactgcttcctgctcaaatcccataagagcaccatccattcccattcgccacacggcagagcgccgcaaacaccccaagaatatctcacaccgtaaacaattcattactagaaactatttttggaacgcataatgcacacactccacgctctttgatattctgaaagccgcatagatattcacttcggggcgtcgtctaagaatatttgctgggccaacggtagcgacgttggcattgtgctccatgaggtatctggtcgaaaaggcggacgaagacagaccagttgggcggagcgcgcccatacctcaaaaccattgcaattattggctttgaccattttcgtggagccacgaaaatggtcatgaaaaacataaggacacacccatgaaccgagacgaaatcacacgcaaaaccagcgaactcagcactatcgcacacaccaccgaggactccaaagttgagtattggtatgcacgcgagctaatgacctatatggggtacgacagatgggaaaacttcagcaaagctattacacgagccaagcaagcttgcgacaattccggcgtatccgttgaatcccatttccgtgacactacgcgagacgtgactctcggcagcggtgccacccgctccatcgcggacgtcaagctcacccgatacgcctgctatctcattgctcaaaacggtgatccaaagaaagaagaagtggcacttctccagagctattttgccgttcagactcgcaaaacggaaatcattgagcaacgcatgggagaaatcagccggctcgccggccgagaggcccttgccactgcagagaagaaactctatccgtatacccaaatcacacacaacaaaaccgcacaagagcacatgtacacgcccaaccacgccgcagaacgccggcaaggatgtgatacaggccacagaaagcgttgtaccgcctaggcaatgcaacaattgtccgctatgctctgaaggcagatggcggcacggatgccatcccaaagagggggtatgaccatgattcggggtatgaacctatgcagcatcgccggctgcacgcacgaagcagaagaagcgggcatgtgcaacatgcatttcacatcggcgctggttcacggagcgctgcactacactgcggacggacgtccgtcgcactgctgagcgcaacaacaaagcaaaacaaccagtaacgctcaacggcttccacatgttcatgctctaattgcatgtacttgcagacacaatggccggtctgagccagctgccctcgcatggagcagctggctcagaacggccattattgttgctttgtactgtttgcactgtattgcgcctgcattgcgcaagctcgggcgcactcgggtgcactcgctgagtggcgtgaatcgcagattgctcaatagcaacgcaatccacgccactcagcagttgccatggttatgcgcggcgtttgcggatgacgagcaaggcaccagccgcagctgtcagcaccacaaccacgaccgcaatggcagccacggcaacacccgtattcgaaaggggcgcagcgccattagcagccggcttattcgtggcagtgttaccgggcttagcagtgttgccaggattgttggtatcgccgggcttctgctctccagggccgggagtgacctccgtggccgtgaccgtgacttcgaacgtcgcgttcacgccacgataagagacggtgatggtcttcgtgcctgcggtggcagaatcaaagccagtgaacttcagatcaccatcagttggatcaatcagcttgcgcagcgtttcggtatcgccgactttgtaaatggcggataccttcacatcggcagcgttgaacttatcgcctacctgataggaatccttggtcacttccacagcaagctcggccaactgaggcagttcgccgaatgtcactgtgtaggtttccgccgtgccatcctcagcagttacagtcaccgtggccacgccgctgttctcggtcgaagcctgctccacctgcaccgtagccttcgcgtcagcagcagtcgcctccaccgtcgggtaagaagcagcgtctccggccagcgcaccggcatattcggtgatatccgcggagaatccgtcaaccgtcttgccatccacagtcagatcagcaagattggcgttactagacggctgcggctttggcgttgcttcaccttcggcgatgcgtacttcagcgatcttggcatagtcattgccatcggcgtaggtgaagtcgaggcgaatgcccttggtggcgggcagagcgctcacatcggcttccgtcacggctccagcagcaccattcacagtgactgccggcagcgtggcatcagtccacgtggcgttgtcttcagctaggtacgatacagtgaagctcttcggagcggcctcgcccttggccttatccaccgcaacgctgagcttgcccagctgatatgccttatcgaaggtgtagctgagccacggcgaggtgtcgccggtgccccagttcgaccagttggtgctcagattgttgtcgcaagtcaggtcggccgtagaagcggaggcccagctgctggccggctcatacttcgaggctgcggcggacgagcagaacaaccgggcaaggttgctttccacagtcacggtgagcgtggcagttactgaagaatcagtgacaaggcgtaccgtcacggtttgctcgcccaatttggtggtgtcgaagccttccaacgtgtattcatctggctccagtacacgcgtcttgccattggtgagcgtagcggtaaccgtcacgtccttatgcgcgagcgtctgcctcttggcgatagtggcttcagggcccttggccgcgatggactccacagcagcagtctgcgaaccgaacgcagtgccgttgaaggccacggtgaatgcgccggcattgctgttcgacgtggcgaaagcaccggcatcgagcccggttacgtccgcaccggtcagcgttaccgtagcgacatcctgccattcatcgttcgcggaagcacgccagtagcctttcagagtatcggttgaggtgcgctccagcttgagctgcacttggtcgccgaagccggtaccaacatgcgatgtttccttatcgatgtagccatcggcattggaatcgtactgcatgtaaacgccgcttgggctggcaagtaacgtggcatatcccttgccgccgttagcgccagtaagaccgttacggaccaccagaccggcgcgcggatcgccattaccgcccaagtcgagcggcttgaccgtggtttccagcgtttcgttcacgtccagggcatcaggctggtacaccgcactgccctcgttgcgatccgtccagacgccacgattggcgttgtccgtaatcgtgaagtcataagcaccgccggacgcagaaacctggcacgcgctgccgcccttccaatgagcttccttccaacttccggaaatcgggttggagcaggaaacatcgatggttctacggaatgtacggcccggattgaagttactgctctcggcaagagtgcccgtaatggtgtaggttcccggcacattgaatgcgtaggtgttaccagcagccttggtcgacttgctgactgccgtaccgccttccacattccatgtcaccttggtagcaatggtatcgtcgccttccttgacgttgacggtgtccggcagagtaacggttccgcccgtgttcacggtcttcgggagatcatcgccggtttccacagtccagttgaccagcttgcccttggcgctaccatggttgccccaatagctcagatcccaaccgtcgggctcgccttcttgagcaggattgtgcatttcgatggtgccgttctcaccgatggtcagcggcagccaaacataggtggaatcggctttaccggaatcccaacggtcaccaaggtagatgaagtgacctttctcctggtctactgcgagcacactagccgactgcgaaccgaatgtggtgccgcgggtatcgcccacggacaacagaccatccgcgccttccggcatgttgttgtaccacgtgttctcgttgacatcgtccttttccacgccacgggtccagcttcccagcatggagtcggcggtgtagtaggtctgcttgttcggggcccagccggttgcaccagatgcgatgatgttgtaacgcccgtcatattggaatacggcaggagcttccagcgaaccattttgtttgacgatttggaaatcttcgccacgcaccggggcatccgtagtagcgtctgcaagaatgtatgggtactgcccgtcagcagagtactgcttttgtccctcggactggtccacattcgtggtcttgactacattggtgtaatcatcgttgagcttggcgatgtacagcgtggcattggcttcggaagaatacagtacataggcactgtcgtccttcgggtccacgaacacagtcatatcgcggctgtcaccgttctcaccccagctggggttacctgcggcttctttccaattgttctggttaggcaaacgataggcacccaccatagtgaacgggcccgtcggattgtcggaaacagccacgcccgcaagtgcacgtgcatagttggaaccgcccggcgtggtgcttccatcggaatgccaccacagcacgtattgcttgttcttcttgttgtagatgatcttcggacgctcgaaaatgccctgtacggaatcaaccgcgccatcaccatcctgatcggggttggtgttgaggtacgggaagattgcgtcggccttggcagcatccacactgccgtcggacttggtcaggttgtaggccttgtcgaaataggcgtaatcggcattgctcttatccgtcaactgagatttgctggtcaccgcacgcagcgccacaccaagatcggtccagttgtatagatctgtcgacatataagcatgaacaccggggctgttgtcgtaaccgttagaacggtcttcgccataccagtagtaggcgtcgccaaccttgaccacttggccaccgtgcgcttggatgtgtgtgccgccattatcattggcgttcttggcataccaatatggctggaagtaatcgctagcgttcttgcccggatcggctgtgggctggaacttggtgtatgtcggcacttggccgatggtaggcaggtaatccacacctgccgcactggcacttgcagcggccagcccgcatgacaatagcgttgccgcggcggtaattgccgcgataagagcgcccttgcccttattgtttatcttcattgatttggttccttgattgatgataacggttttttgaacaaacagttatgtcgctatccgcgaagccagaaaaggttcgacaaatcaatataccgatactgaaaactcagtattcaacttgtcggaccaattatggtcaaagagcggaggaaccggccggcaatagtcaatattgccggcttgttccttcacccattactgcgcgagggtgctatgcacgcttgcgcagcatgaacagtgcacccgcggcagcggccagcagagcgacagcgccagcgatggcggcaacactggaaccggtgttggccaccgtgttcttgttgccgttgccggtggcaccgggcttgttggtgttgccgggcttctgttcttcagggccaggggcgactgcgttggccttgaccgtgacgttgaaggtcgcggtcacaccacggtaggagacggtaatcgccttcttgcctgcggtggtggagtcgaacgagccaatcgcaagctgcgggtcgtcaagagcgaccggcacttccttggtcttgtcgccactctggtagacggcagtcaccttcagaccggcggtatcgagcttgtcgccgatggcgtactcggtcttcgtgggtccgatcaccttgagcgaagccaaagtgaaggcgttgaaggtcaccgtgtaggtcttcgtctcagactcgtcggctgaggtcaccgtaatggcggccttgccgccaagcttgccgttctcaaccgcgtcgccagtcaccttgacggcggcggcattgtcggtggcgaaggcctgcagcaccgggtttgcctcggcgtcgaccggcagatcaaccgtgtagtcggtcttggccgggtcgaagccttcaacggtttcgccgtcaagacgcaggtcgcccagcgtggcatcggatgctggctgcggggtgagtaccgtgctgtcttgtgcgaacacctggatctcagccacgttgatgtacaccttggtgtcctgcaatgtgttagtcaggcggatggccttggcctttaccggggtgccgagcacgaagtcaacggtcggggtgtcggcggcggtgatgccgtcggagccagagccggcatcgccggcctgtatcttccagccatccttggtaccgactccatgccattcgccagcctcatcctggtattccagcgtctggctcttcggccaagacgcacgaccatcgtagtagaagaaggtcttcacttcggtgatggtctgagcttcgtcgaaggtgaacgtggcgaccgggtccaccgtcgaggcggtggaagcccaagtggaccaaccctttgacgtagtgtcaccatcgatggccttggaagcggaggcaccctcctggaagttcaccgagaagttcgtgccagaggccgcggcgatgttcttcgcagcaccctgaaccggcgtcacgaatgcctgaatttcggtggcgttcatgtagtcgttgttcacggtgttcacaatgcgcaccttcgtggcattcactgtgcccttatcggccttgaacgtcaccgtctggcctgcggcaggcttaacatcgctaccgaattgcatccacgtctcgccatcagtggtgtactcggccttggcggaagccggagccttgtcaccatacgtaatggtcacgctgctaagctcacactcagagccgaagtcaatcgtggcggtcgggctggcggaatagtcaccagcagagttccacgtcacccaggcttcagctgacgtgtcaccatcggtgagcttcttccactgatcgcccttgctgtattccgtctgctggttggtcacggtcaggctggaagcagcgtcggccacattctcaggcgtggcggcggtgacatagatcgcgcccttcagcgcaatcgtggtcgcgtcgtccagctggtaagtaccggtcacggcaatgttgtcgccagccttggcatcggcgagcttggtatcaagcccatcgaagttccacgtaaccttagccgcatcgccctcgaatgcaggcgatgccttgacgtgcagatacaccggcgcagcctcaagcgcggccttcgcctcgctcgcactggtgccggccagcactgtagccgataccggatcggaaacggtgagcgcgccaacgtagaccgtagcggcgacattgaactcgttgccgtacacatcggtggcggtagcggtggcttcgtaggtgccttccttggccacatcgaccttggaagtatcccagttggcaaccgtggccttgccttcgccccaggtgtagtagagcgtgacttcggtcggcagcgcggccttctcgttaacggcggtctgcacgttcacgatcttctggctggtcggcgttacattgcgtagagtccatgtctggttggcggacggcgaagtgccgctcggtgactgccacaagccaaccttcgtgccgactgtggtaccagagttatccacatcgaggttcgtcttagtcgcggcattgagcagctggtaggtcgaaccatcggaagtgttgagaatccacttggcagccgggtcggacttagcggcctcaaccgtttcgttggaaagcgcgttcgtgccatccttggacaccagcaccttgccttcggcgttagtaatcacataagccttgagatcagggcgctcggagtcggcgggctgctcgatctgggtaaaggtccaagtctgcttcttggcgttctcggcatcggaagcgacgttggccagggacagcgcggaatcaccagaagtggtatcagccacggccttgccggactgcttaccaacgagctggtaagtgtcgccggtctcgacggcagcatccttagcgtagccggtcacgccagtgagctggatggaggcgatagaacgggcgggcacagtgaccgtagcggtcttggcagccttgtcaatcatcacagagccttcagcttgcttgacgttgctggtcttggcgaagacttccggagtggcggaatcgacacccgcgttcttgtcttcggcagaggtttcggtggtcaggtagagctcaccgtaagcgttgtcggcaatctcgccgtacttcgacaggtcgatgacgaaggtctggtcagaggtgccggagttgcggtggatgacggtctgtgtcttgccatcgtcggaggtggcagtcatgttgttgtcttcatcgttgttggcgatgaccttgtcgcccgcgtggatgaagtgggtgatggccttgacgccgttgtacttggcgtttgcaataaccgtgcacggttcaagtccatcggtggtaccgccgttgttgttcacgcggcgctcggagtagagcttgccgtccatgccagccacggtgcagtcgaagtcgatgagcacggtgccccagttggtgttctcaccggccggattcacattcgagcccatctgcatgttgtagaggtcctcgaccacctgccagaaggtgaagtccttggactgcaggcgggtgacgttggagctgatcttgctcatcatgcccagcgcgttgtcgaaaccgtacgggttgtaggagccagactgccaggagccgtccacctcgctcatcgacagcttcttgccgtctgcctgagcgatatcgcgcgactgcatctggttgctgtcggagtaggcgtgaacgttgtactggccgataaggtccttgatcgcctgcgggtactggttgtacgacttgacgaagtcggcggagttcgtggcatcggtggctgcgatgatggtgtcatcattgtccttgagcgcctcagcgagtgcggtaatcgtctgctgctgctgggcgttgctgacatgcataccctcctgcggcttcttcagcgcgttggagtatggggtgacggacttatctttgtcggagtagtacttatcccagtagttgttaatgagcttggtgttgtcatcgctctcatcggtgtacttcgaagccatgtcgcccggagtgccccagtaactggtctcggactcattgaacggctcgaccgtgtcaacgtttgcgccaaggctttcgaggtgctcgacgttcttggccatgtactgagcgaatttctcagggtttgcaagattattgctaccggagttgcgtccaccagtggcgtaaccgctgttggtcaggaaccacggagcggagttggcgaaggcctctacgtcggtgatgtcagggttatcgccggtggcaccgcgctcaatccaccagtcttgggcggcggacttggagaagtcatactggttgtcgtcagtcgggtcgaatgccgcagccagcttgtctttgtcggcctgcttggtggttacgccattgccatacgtgccggagccggtggcgtcatctttccacgtgccaggcacggcagcgccttggcgcatgaatgggtagccgtaggcaacatcggaggcattgccgccgcccacgttgtagcgggccatgttcaggtccagtccttcatcaccgaagatggactggtagaactgttcgcgcagctgtttgccgtattccacagccttagccttggaagcgtcatcgccgagattggtggtgatggccgattcctcgccgaggctgccggtggcgttggcgaaccaagccagcgaggtgccccagccatcgaaactgttggcataccacgggttcggggtcacggtaatggcatcgttatcagccgcatacgcagtgccggcaaccgcaaacgcccctcctcccaccagtgttgccgccgcaaccattgcagcaagcgatttgctcagtaccttcattggtctccttagtgttcctgctatccgccttataccggaaaaatcggcctttgcttcactgcgccggcctctttgcctgatacatgacctacgtcgactccttctttcggcgcagccaaaatgtttacgcaaacattttgatatgagcgattttatcacaaaaccgtcacccagcaaacaacttcagagaccccaaacgacgtacaaagtcatgagccattcgaattgcgctggcccaatcgctacgaatcatatttgccgtagcccttaagtgaatcccactgcatcgagatatcgcgcccgctatcccttccgataacgccgaccacgcgtgttgccttcagcaatcagctttccttgcgcaactaaaccgtttaggaatttgcggactgttctgttatcgagctctgttatcttggcgagttcaggtacagtcacatagtcaacctctgtcaagagtcgattcatcgccgacagcatcgctgcccgcgaatcaatttcacccgatgcggttgcatctgctttcttaccatccacacgttccccgccaatgagcctcgcaccctcttcggcatctttctcaactacagatctcacgctagcaaaaccagaaccatccacggtcttcagcgcaggaacaataggaatcgtcgcctcgaatatgtcaccatcgcggaactcaggctctcgctcagtatattgccgggacgctcttatcagattccgcagtccgctacccagctgctcggctatgccggtctgcacaaacacattagcgataatcggattctttggcattggcgtgaactcgcccagcttcattcgaccttcaaagaatgagcgcgaagcattaaccgtccggatggattcattatcaatggtgacacgcgccaccaccggactggaatactcccgatgcatgaggctgtttgccaccaattcacgggcgatcatcgtacgcgggctcactcgcttatcgccctttaacacaaagcggtcaggcagattccgctcagtaaattcacggagttgctcgtacgaatcgaacaagttggtccgcaccataagtcggtcatcgtatcggtcaatattgtctcgccgaaccacggcatcagtaatatacgctgggcaaaccgaggaaatgacttcatccttgcccaagagcagcactgcagcaagattaaagccctcttcgccggtcgtgtaatcacgatcgtatagcttggcgctgcggaacagttcttcgtcagacatagttccccaagggtgcccagctcgctgagcgaccgccagctgccgcattcgcgcaatcagctcaggacgcaaatcaaacggagtcacgtaacggaaaattcgccgttcggaatagtagttctgcttgcgaatatacatttgactaatctggatatcgctttcgatgtgtgtatccacatcagcaatgcgatcaaacactgcgcccttgaaccgcacaaccgaagaactcggagctacccaaatacgaacaataatccgttcgtcgtactcgatatgttccgtttccaccattggagccggttcgaacatcttacgattagacactacgttgacaacgttgcgctctatctcactaacgcgcttagaatcgacgccgagcacttgaccgtcatcgtcaacgccaagataaatgctgccaccagaacgattggcgaatgagcatacagtctcaaaagtatccgtatgaggcaattcgctgcagcgcttgaactcgaccatagatgattcaccggcctgcagcacttgcataagttcatcctgcgtcatcgcattccgcccttcatagcgataattcatacattaggacatggcacttatcgtattttagcatctaattagtacattaggacattgttttatgtcctaatgtactaattaggcggctaattgtactaataattgcacactgatgtactaatccgatgatcgaatgcactaattgtccgcgcaaatgcactaatcggatgaccgaatgtatcaatgagacctataggcagccgattggctgacgatcagcccagtcattggctatcggccgctagccagtcagccgccaacagccaacagccacccaactaatagccgccagccaatcagcccgtccaatcactccttgtgttccagtgcggccttcaaatcgcggctacggtagcgttcgcgcagcatagagaatccaccgaagcccacaagccacaccaggccggcaatcgcggaattgcgcgtatcgtccgcaaggaacaacgtcaggtagatgaacacgaagaacacgattgccaccgtattgagcaccttccacgcgggcatgacgaacccgtccgcgatgaaatcggcggaacggcggtacctgcgatgcgccagcagcgtcaggatgtagatgaacaggaacaccgcggagctggcggacgagaacagcacgaacgcccccgagatgccggggatggcgttgacgatcggcgacagcaggatcagcgccgcggacaccaggatggcgcgggccggcaccttgcggtcggacaccttgccgagcttgttcagcatcgggttcggcgacacctcggacagctggtacaggtggcggccggcggaatacaacagcgaattgagcgacgaggacgcggcggtgatcaccacgaagaacaccagggcggacgcccagttcaaaccggcatactggaacaccatgatgaacggggaggcgaaggagccgtcctcgttcggcttgaacgaggtccacggcacgatgcacatgatggccacgagcgcgcccacgtagaagatgagcacacgcacgatgatctcgttgacggctttgggcagcacctcacgaggattcttggtttcggagacggtgacgcccacgaactcgagcagctcataggcgaagaacaccatctggaagctcatgaggaaggccatccagccgttcggggcgaacgagaagccggcgaacaggttgtcgagtccggcgtgacccgccgggctcacatgatccacgccatgaatccgcgcggccgggtaatggtagccgatcacgatcatgaccacggcggtgacgatcatcgcgcaaatcagcgtgatcttgatcatcgagaaccagaattccacctcgccgaacaccttgacggcgatcaggttgacggacaccagcgacaccaggaaacacagttcgatcagccatttccaatgggtcaggtcgatgccgaacgtgtcgaagaaggtgatgaagtacgtggagacggccgtgatctcggtcatgcccagcagcacgagcgcggcccaatacgtccagccggcgaaatgcccccatccgttgcccaggtagcgggtgatgaaattgatgaaggtgtgctggctggggtcgcggtacatcatctcgccgatggcgcgcatcaggaagaacatgatgacgccgaccaggatatacacgaagacgatcgaggggccggtcagcgagatcgatttgccggagcccaggaacaggccggtgccgatagtgccgccgatagcgatgaactgtacatggcggttgctgaggcctcgttccatcgcattggtctgatcaaggctctcgacggacttgagcttgctcccggactgctgcgcgttaccgttcgcattcgtatcggccatactgatttcgtttctcttctctgccgctcggccctgttcacgccgactacggcactcgttcaatgcaagttcaaactgtatcaccgatagatgtcgcgaaaatcacccagctcacgaacgcacgtgatgataccgcgaacattaggccaaaaagttcaattcatcgccaagaaattgaactttctccatcttgtcttctctcccccagtcagcttcgctgacagcccctcatcagagggggctcaagcaaggtcattccacggacttgagcgaactgaccggctcaatccggtcaagcaccgggttggtgaacagctgtaccagcagcgcgaatgccaacgtggccgccacagcaatcgcatagctgtaccaatgcacttccacttcaaagtacagtgacggcatattcagtgcagccgtcagaagcccgccaatccagcgaccgagcggcaatccgaccaccactcccatgccggtcagaatcatcatctcgcgattcacgtagttgtgcacttcacggtcatagaagcccagcaccttaagcgtggccatctcgcgtacgcgctcggatacgttcgtgttggccagcgtaaacagcaccaccaacgccaatccgccggcaagccccacaatcagcgccaccacggcggccatcaaatcgaatttgaacgtagcctccagatgcgcacaactcacggccttcaccaccgatgattcctcacccagccgatccgcatactcggcctgttccccatcggaacccttcagtttggcaagcatcgcgttccaagtcagagtggaagactcaccatccgaga

SEQ ID NO: 3505 - DNA, 9765 bp, Unknown
  R85_18m  MAG No. k141_9070
cctccacgaacggcaccaacgcggtcttctcgaccacatcctcgcccttggaattctggccggttaccaccggctcggtcaaacgaatcttgagcagggactgagcgggggagtcgaccacatccaccactttgccgaccacttggccggcgggcagtcccagaccgttgccctcgactagacgggcctcaaggccaataagatccttgggataccattcgtcggcttcgagcatatcttctgcgtcgtcgacctcgccgtagagttcgacaccgtttagggcctcggcggcattacggtcgtcgacgccctcaagcttgagaatccaacgatccttgaacgtgcgtgagccctcgacgatgtactcggtctcgccatcctggctgtagagcacggagtccggctcgaagcgccactcgggatcatcggtgtacaggcgcacggtgacttcgcccttcaggccctgtgcgcggccaatacgagcgaccctcagcaactcgagctgctgagggtcgtcgtgcatgtcttgctgtgccatgctgtgaatcgttccttatcggttatcgacggacgtccatgatgtcaacgcggaccttgtggtcagacagtgcctggatcacggtgcgaatcgcgttggcggtgcggccgctacggccgatcacacggccgatgtcttccgggttcacgcgtacacgaagcagttcgccgcgcgcgttctcatgggacttgacggaaacatcgtcgggaaaatcaacgatgttcttgatgaggtgttccacagcctgtgcaagcatagctagcctttcgtttccgctcaggcctcggccggagcttcttcggcggcctcttcagccggggcttcctcagcggcggcagcggcttcggcttcagccttggccttggcggcagcttcggccttggcggccttcagcttctgagcctggttctcaacggccgcgatgcgggcctcggcgtccgggccagcctcaacggtcttcagggtgccttcggcaccttcaaggcccttgtacttctgccagtcgccggtgatgttcagcagcttgaagacgggctcggacggctgagcgccgacgccgagccagtactgagcgcggtcagacttgatctggatggtcgagggctgggtgttggggttgtaggtaccgatctcctcgatgaccttgccgtcacgcttcttgcgggaatcgacgaccaccacacggtagaaggcgtagaacttcttgccctgtcgcttcagacgaatcttggttgccaaaatggctctccttgtaatgctaggtgtgcgggttctcggtttgccatgtggggcatgaccggccggaatccacgtgtcctcgcggctcggggtgtagagggcgccacgcgcgcgcgaataaccgtactagtgtaacgcggaagccggatattgcgcatcggtccggtcgtgacgcacggaatcgccggacggacggcgtgtcggcggcgcgcctgccgtcttcatgactgatagcctgattgatggcagtgcgagacgggaaagggggcgctgatcgatgggtgagtgcgtgatcggccccggtgcccgggcgcgtgtggatgcggatgacggattcttcttcggcatgggggccttcgagaccatcgcggtatccggcggcgcgcccttgttgttggacgaccatctgacgcgtttgggtgagacgttgcgatacctcggcatcgaggcgcgtcgcgccgatctggagacgatggtgctccgcgcatgcgccggactcggcgcatcggacgattcggccctcaagctcacggtcaccgagcgcaaccgcgtcgtctcgttgagacgcaacccgtatgccgcgccgggggcgaagcgcgtcttccgctgcgacttcgccgatgtgcgcaggaacgaatcctccccactcgcgcgcatgaagacgctggcgtatgccgaaaacatcatggagaagcgtcgcgcccgtgaccgcgccgtcgacgagccgttgttcctcaatacgcggggcgaggtcgccgaaggggccgtctccaatatcttcgccgtcatcgggggagacgtcgtgacgcctcccgtctcctgcggtctgctgcccggggtcatgcgccatgccgtgatcgggttcacgggggccgtcgaacgcccgatcatgcccgacgagctgcttcgggccgacgaggtgttcctcaccaactccctgatgggtgccatgcccgtggccggtatcggcggcgtggaattcgaaccggggagcgtgtcgcgcgacgtgaacgacacctacgcccgcatggtggcgcggacgcgggcccgggcgcagacgaaggagttccggtgagcgcgcaggtgttcaagctcaggacgttccgaccgcttgccgacatcgtggagtgcgtgcgcggcgaggaacgcttcgcgttcctggactcctcgatgccgggggcgcaggggcgctactcgatcctgggactcttcccctatcttgtgatcgaacacgggcggggcggatgcctcgtcgacggcgttgccgtggagggtgatttcttcgatgtcgtgaagaagcggcttggaccctgcgatggcgcgcgcgatccgcgtctgcccctcacgggaggcgcgatcggatatctgggatacgatttcggccgcgaatcgtgcggcgtaccgaccaggcacgatcccgtcgcggccacaccggaggcgagcatggtcttctacgacctgctactcatcgaggacgtccggtcgcggtcgttgttctgttgctgccaggggcggacgatgacggccgcccacgccctgacatgggcgcaggacctggtggattcatgcccgcccgcccctcatcccgcgcgccgacgttcgctcgccccatgctcctccgatttcacgcgggccgggtacggcgacgccctggcccgtctcgtcgaccatctgcgcgccggcgacgcctacgtcgtcaacatggcgcagcgcctgcgcctggagacgtccgagagcccctatgccatctaccgttatctgcgcacccacaacccggccccgttttccgcctatctgcgcgcaccgggtctcgacgtgtgctgttcgagcatggaacggttcatggagattcgctcggggcatgtggtgacgcggcccatcaagggaacccggccacgcggcggcacgccggacgaggatcgggcgaaccgcgaggaactcgcccgcagcgagaaggaccacagcgaactgctgatggtcgtggacctcgaacgcaacgacctgtcgatcgtctgcgaaccgggttccgtcggcacggaccccgactttgccatcgagacgtatccttccgtattccatctcgtcgcgaccgtcgaggggacgctgcgcaaggatcgttgcgccgtggacgcggttcgcgccgcgtttcccaccggttcgatcaccggcgccccgaaggttcgcgccatgcagatcatcgacgagctcgaacgcgcgccccggggattgtacacgggcagcatcgggtatttctccgatacgggcgattgcgatttcaacgtcgtgatccgcaccatcgtgcgggagggaggcgagacgtcgctcggcgtgggcggaggcatcaccgtggaatccgatttcgacttcgagtacgacgagacgatgcagaaggcccgggcgctgcgtgaggccgcttccgttgacagggggagcgtcggcgagtacaatcgtgggcaaaacgaataactatcttcagggcagggtgcgattccctaccggtggtacagcccacgagccgcaaggcatgatttggtgagattccaaagccgacagtacagtctggatgagagaagatgaaagtacgttcatgctttgtcgtacgccctgaaatgatgccatatcatttcagggcgttttcgtgttcgcatgaaccttcttttgtatgccttggatagcgtatgggcgcaacatgcttggaggcgtacatggacgatgcgcagtacatgggactcgcgatcgagctggcgaagcgaggggccggatacgtgaaccccaatcccatggtcggcgcggtgatcgtcaaggacgatcggatcatcgggcggggatatcacgagatgttcggcggattgcacgccgagaggaacgcgttgcggcattgcacgcagtcgcccgccggggcgacgttgtacgtcacgcttgagccgtgctgccattacggcaaaacgccgccatgcacggaggcgatcgtggaaagcggcatcgcaagggtcgtcgtcggaaccttggactgcaatcccgtggtgtccggcaagggcgtgcgcatgctcgaagaccacggcatacgggtcgatgtgggggtgctggccgacgagtgccggcatctgatacgggtgttcagcaaatacatcaccacgcatacgccgtatgtcatcatgaaatacgccatgacgatggacgggaagatagcgacccataccaatcaatcacggtggatcagcggcgaggagtcgaggcgtcgggtccatcagctccgtcgatccgtcgcggcggtcatggtgggggtgaacacggtgatcgaggacgacccgttgctgacatgccgcatggcacacggaaggaacccggttcgcgtcgtctgcgatacgcgattgaggacgcccctcacctcgcggatcgtgcagacggcgaatgacgtcaggacctatatcgccaccgcctgcgatgacgaacgcaaggcggaggactaccggcggcacggctgcgaaatactcgccgtcggaaggaagggcgaccacgtcgatctggcggacgtggtgcggcgcctgggggatatgcagatggacagcgtgctgctggaaggcgggagcgcgatgaattggagcgccctcgaacagcggatcgtcgatgaggcgcacgtgtacatcgcgccgaagatattcggcggcaccgcgaaaagcccggtgggcggccaaggagtcgccctgccttccgacgccgtcatgctccggccccgcgcctgctcccgagtgggagaggattatctggtggaaagcgaggtggtgtattcatgttcacgggaatagtggaggaagtcggaacggtggcggacatacggaggagcgccgccaactgcacgctgtcggtcgatgccacgaacgtgatggaggacctccatatcggcgacagcatggcggtgaacggcatctgtctgacggtcgtcgatttcgaccggcgacgcttcaccgtcgacgtgatgaatgagacgtggcgcagaacctcgcttggcgtattgcgccacgggagcggcgtcaacctggaacgggccctgccggtgaacggaaggttcggtggccatatcgtcaccgggcacatcgacggcacgggcagcatatcctccgtgcggcgcgaaggcaatgccgtgtggtaccggatcgcggcgcggaacgagatactcgaaggcatcgtcgagaaaggctcaatcgccgtcgacggcatcagcctgacggtcgcggaggtcacgggaagggacttctcggtatcgatcatcccgcacaccttggcgcagacggtgctgggcgagaaacgggtcggcggcgtggtcaatctcgaaaacgacgtattgggaaaatacgtgcggaacatgatgacgacccggacgggactgacgcaggatctgctgtcccggtgcgggttctgagaaaggatgtatgaatcatgaaccatcagtcggtgcaagcggcgttgcaggcgctgcgggaagggaagctcgttctggtcatcgatgacgaggaccgggagaacgagggggatctcatctgtgccgcgcagtcggccaccacatggaacgtcaatttcatggcaacccacgccaagggattgatctgcatgcccatgagcgagcaactggcccacaagctgatgcttccgcccatggtcgagcacaacaccgataaccatgaaaccgcttttacggtgtccatcgattaccgtggcaccacgaccggcatctccgccgaagaacggggattgacggctcgcatgtgcgtctccgatgacgtggaacccctcgatttccgcagaccggggcatatgttccccctggtggcgaagaagggcggcgtcctggaacggaacgggcacacggaggcgaccgtcgacctcatgcggttggcgggattgcgtgaatgcggcctgtgctgcgagatcatggacgacgatggccggatgatgaggacccccgacctgacccggttcgcccaggagcatcagatcccgctcctgaccatcaaggaactgcaggaatacaggaaagcgcacgatacgctcgtcgaatgcgtctcgaccgtggcgatgcccacgcgatacggggaattcacggcgcactgctatgtgaacaggttgaacggcgagcatcatgtcgcgctggtcatgggggatctgggcgacgggaacgatgtgttgtgccgggtgcactcggaatgcctgaccggtgacgtcttcggctcgttgcgttgcgattgcggtcagcagttggacgcggcgatgcggacgatcgcggagcatggctcgggcgtgctgctgtacatgcgtcaggaagggcggggcatcggtctggtcaacaagctgaaggcctaccgtctgcaggacgagggcatggacacgctcgacgccaatctcgcgttgggattccccggtgacgcgagggagtactacatcggagcgcagattctcagggatctggggatacggtccatgctcctgctgaccaacaatcccgacaaagtgtatcaattggaagactatggaatggagatccgcgacagaataccaatcgaaatcgaagccaatgcttacgacagtttctatctcaaaaccaagaaaaaccgcatgggacatatcctgaacatggaggaggaataaatgcacacgttcgaaggcgatctggtagccgaaaacatcacgataggcatcgttgtggcgaggttcaacgagttcatcacctcaaaactactggcaggggcgctggacaccctgaaaagggagaatgtccgcgaacaggacatagcggtggcctgggtgccgggcgcctttgagatacccctgatcgcgtcgaagatggccaagagcaagcgctacgatgcgatcatctgcctgggcgcggtcattcggggcagcaccagccactacgattacgtgtgcaacgaggtctcgaagggaatcgcgcagaccagcctcgacaccggtgtgccggtgctgttcggcgtgctgacgacggattccatcgaacaggcgatcgaacgggccggcaccaaagcggggaacaagggttccgagtgcgcgcagggcgcgatcgaaatggtgaatctgatccgctccatggacctctgacggcgaaccacccggctgcgggcgggggtcttccagacgttcccgcccgcttcgcgccacacggccaaggcccgatcgatcgccgcgcccgctaccgcagggtgagcgttgcggccaaagccagatggtcggtgtccggcacttcgaaggacgtcacgccggacggtctgagcccttgggtgaacagaatatggtccagttcgatgcgcggccacttgagccagcgcgggaaggtgagattcgggccggcggcttgaatcagacttgcgtccttgaatccggacttgagcaacgcacggaagctcgggtggtcggtgctcgagttgagatcgcccataacgacgacgatgttgcgattgctgacggattttgcacgggcgagttctcgcagacccagaatgccggccgaccaatccgcgcagccgcgcatcggcgatttcgggtgagccgaacaaagcgtcactgtgcgattaccggaggttttgagggtgatggcgggaacgtcggcggcagggatggagaccacgttgggcaccgctgcgctcggctcgtagcgggaatagatcacgttgaatccgccgttatcggtctctttggcgtctccgaactgatggtaggggaggagttcgttgatgtcggcttcggtaagacgtgtgatgaggtcgtcggtgacttcctgcaaggccaatacgctgatattgcgttcgcgaatattgcgaatgatttcagcggcgtcggcgcgtccgtatcgacaattcatcgtcataaccgagaactggggcgagagtgtttcacgcgttgtttcacggtgcccatcggggactgtttcgggtccttccttcggagtgtttgaggtgctcgatgtattgctgttatggctttttgacagcgtcggcgaagttgtttcacgggctgtttcacggtgggattctctgcgtttgccggctgggtcgattgacgtaccccagtagttgatgcgctgtgagctggcaatcagcgcgaccacaataagcgacgacatcgcagtccattcatgttgccatgcggcgaccgcggccagaatcatcaaaggaacccacagcagcggagtcagggcaatcatgtacggaagcggcatacgggcctcgagaccggcgggcagcgcgcttaaggccgtccataacagtgcgatgattgccaccgcgctgaagattgtcgtcatggaagttcctttcgaaatataaattgaaccgagatataacttggctcccctctgcgaggggagccaagttgtgagatcagcggccgaacagtccgccaaggcctccgccgaggttcggcggcagttcagtgccaccatcgacgttgcccatcatctgttcaaggccggcgggcagggccgggttctgcggcttcttggcgaaggcggaaccgccggtcgaaccggaggatttgccggccagcttgtcgcgcaatgccttctcctcggcctcgcgcttcatcggattgccggatttgccgcctttcttcttgttcttgcccttcttcttgccgccgcccatagccgggccgccgaagccggggatgccgccgcccatgccgccacgattggacatgcgcttcatcatctttgcggcctgctcgaaacgctgcagcaaagcgttcacctgagaaaccgtcacgccggaaccataggcgatacgggcgcggcgggaaccattgataatcgacggatcgcggcgctcggccggggtcatcgagcgaatgatcgcctcggtgcggtcgatttccttctcatcgaactgctcgagttccttgcggtgctgggccatgcccggaatcatgccgagcagcgacttcatcgagcccagcttgcgtacctgctgcagctgatcgaggaagtcgtccaggccgaaggagccttcggagattttctcggcggccttgcgggcctcctcctcgtcgaactgcttctgcgcctgctcgatgagcgtcatgatgtcgcccatgtcgaggatgcgcgaggccatgcggtccgggtggaagacctcgaaatccttcaggccctcaccgttggaggcgaacaggatcggcttgccggtcacggacgccacggacagcgcggcaccaccgcgggcgtcgccatcgagcttggagagcaccacgccggtgaagtccacgccctcgtcaaaggccttggcggtcttgacggcgtcctggccgatcatcgcgtcgatgacgaacaggatttcgttggggtgcacggcatcgcgaatgtcgcgggcctgcttcatcagctcctcgtccacgcccagacgaccggcggtatcgatgatcaccgtgtcgtagagcttctgcctggcgagttcgatggaatcgcgggccaccttcaccgggtc

SEQ ID NO: 3506 - DNA, 7434 bp, Unknown
  R85_18m  MAG No. k141_9118
gtgccttgcgaaggctgttcggtttcggtgaagtggatgtcgaggaagtgctcggccgcctgcttgaggctatcggcgtggaaatccggttgggccagatacccggcaagcttggtgtcgaacatcggcaggtccatgtcaagatctaccgcgcccagaagatgcagcaactctttatacccatgcacgatggtgcgggagtgctcgctttccaggaaccgcgcaagctgtgctcgcagggtatcggtgattggaaggggcactatggccgctgatgttgccgtggcaacggcaatggcttgtgccgtggcacgacccggcctttcgtcgccccatgcggccacggtccaagcgtggccgaccgcgtcgccgcagacggtatgccgctgcgatccatcgccatagtcggaaaccgtgaaatcggcgatttcaccgggaactttgacctcggcgcgatgggccttgacccattcgtcgaactgctccgaagaggtgatgctcgtgggttccggcaggttcagatcgagactgttatcctgctcgtcctgttcattattcgtagactcgccggctccgtatgtgttggaaaccttggcaccggtattgaaggttttcagcacgcgactcctggtacgcggtccgaattcaagctccttgaacagggcgtcgatttgtgccacgtccacggtgccgaatgtcagatcctcaatatcgacgccaagatcgacgtctcgtaccagtgcgttgactttgcgattgagcttgacctggtcgatattggccctcagcgattcgccttttttgccgccgatttcatcggcgtgctcgcaaatgccgtcgagggaaccgaattggttgatccacttggccgcaaagccatcgcctacaccgggcacaccgggaatattgtcggcggtttcgccgcggagcgccgccagatccggatattgtgcgggagtgactttgtatttgtcgatgatggactgcggcgtcatatgcttcaggtctttgaagtgatggcccgggtacaacacggtgacgttgtcatccaccagttggaaggcgtctcggtctccggacaataccagtgtgtggtagccggccttgtctcccatggtggcgagggtggcgatcacatcgtcgccttcgaatcccggcttctcgatgtaggtgacgccgagggccgtgagcatgcgttgaatcaatggcagctgggtgagcagctcttcgggagccgcctcacgggtgcctttgtattgcggaagcatctcattgcggaatgtgccgcccttcacatcgaaggcgacgcccagatggtcggggttctccgcatcgatcacctgcgcgagcatggtggcaaaaccccagacggcgttggtggcctggccgctggaagtactgaagttgtcgaccggcagggcgaaaaatgcacggaaggccagcgagtggccgtccaccaccagcaatgtttcattggtgggtacggtcacgctggcctctcccatagtgtgtttgtgttgctttacgactcagcacggtgatgccgataatcagcgttcgcccgaatcagaaggcttcggatcgccgtacttggcgatgatggcctgagccaggcgcttcttggggatgcgctggtccatggaggtcttctgaatccaacggaaggcaccctgctcggagaagtcagccttgtccatcagcagacccttggcgcggtcgacgagcttgcgctcctcaagcgtgtcttcggccttcttgagcttctcttcggtttccttgagctggtcggtggtttccttgagcttgcgttcgctgcgctccacgttgtccagcagatcgttgatctcggcgaaacggcccatggccacctcgagggtcggcaacaacttggattcctcgtacggcttggtgacgtatgccatggcgccggcaccggtggccttcttcaccagatcggtctgggagaatgcggtgagcatgacgacaggggcgatgttctcatcgcagataatgccggcagcggcgatgccgtccatacgcggcatcttgacatccatgcacaccacatcagggcgatacttgcgggtcagttccacggcttcctcgccgttggcggcctgaccaacgacctcataaccgttgtcttccagcatggcgaccagatccatgcggttcacggcttcatcctcggccacgacgacggtacgcggaccatcctcggccacggccttgcgctcagcaggttcgctttcatcggctacggccttgagttcttcgtcggtcagcacctcatcgacgttgatactcggttcttcggacttcttccttgcagccatgccaacctctttcttgaattacccaacaatggggttcgtaataatttcagcgaactcctagctaaagtgccctcggtgggactcgaacccacactgcgcagattttgaggctgcttcctctaccaattgggatacgagggcgtgcctaagcactctgaagagagtagcataccgattcgactcctgcgacacaagacacgcgccagtcctccattccccccggtaaaacaggcgaaacacgtcgatatcgtggacggcgtacccgtgtgttgcccgttcttctgcgtggtttcaccgcttacaatgggctgtagtttcgatgtatcgcttttgttaggagggcttatgagcaacgaaacttaccgtcagttcgatccctggcgcccctctccggtcaaggagatttcccgtagacagattgtggagacgcattatttcaatgtcgatcacgtctcctatgagtcgaatcagatcggttcgtttgaacgctactttgttcaggagaacaatggcgacactgtggctgtgctggccgtcaccgatgacggcatgattccgctggtcgagcagtatcgcatcgccaaccatcgttggacgttggagattccggcaggccacgccaacaacccgtccgaacgcccgaccgatgtggctaagcgcaagctggccgaagaggctggtttcgatgcctccaagcttacgcagttcacccgttttatgaacacgccgagctattccacccagcacaccgcaatcttcttcgccaccggacttaccccggcttcccgtcaggaaatcggcccggagactccgcgttccgacgtgcgtatggtgtcggtggacgatgcctatgagatggtggtcaatggcacgattatggatgccaagaccatggtcgccattctgcgtctgaagagcggcacgctcgatcatctcaacgactagtcaccacgctcgatcatcgcggtgactacgtgccattgcaatcaccgcacaatcgcaacataacggataacgaaagccccccatccactttctggatggggggctttcgcgtgctatgtgctagctgtcagcagctaccagcggcctgaaatcagtcgcaagcgccaacggtgtgcacgtagatggagtcggtgcggcccggctggtgatcgccctgagcagagctcaggatgacgatcttgtcgccgtcagcaaccttgccggcatccttgaggaccttgtccgtgtagatcatcagatccttgcgggacttgtcgtggtagtcctccttgagcaggaaggcttcggtgccccaggacagagccagccagtggtaggtgtgctcgttgctggtcaggccgtagatcggggcggccggacgctcacgggagacgcggtggacggtggcgccggtctgggtgtaggcgacgatggccttggcgttgagcttgtcggccaggtccacggcggcggaggagacggcgccggtggaggacatgtcgaggttcttgagctccgggatgcggtcgaagccgtggtcggtggcgtagccggagatgcgcgacatggtggccacggtcacatccgggtacttgccgacggcggtctcgttggaggtcatggtggcgtcggagccgtcgaggacggcgttggcgcagtcggaggcctctgcacgggtcgggaccggggagttcaccatggagccgaggacttcggtggccacgatgaccggcttggcatactggcgggccagctcgatgatgcgcttggtggccagcgggacctcttccagcgggcactcaacggccatgtcgccacgggcggccatgacaccgtcgaaggtcttgacgatctcttcgaggttctccagagcctgcggcttctcgatcttggcaacgatcgggatgcgacggccttcctcgtccatgatctcgtgggcgcggtcgatgtcggtggcgaaacgcacgaaggacatggcgatgatgtcggcaccggtgcggatggcccaacgcaggtcagcctcatccttctcggtcagggccggcagggagacggcgacgcccggcaggttgatgcccttgtgggaggacacaggaccggccacgacgaccttggtgtacacgttgttgccctcgaccttggtgacctcaagacggaccttgccgtcatcgatcaggatcgggtcgcccggatggcaatcgcccggcaggcccttgaaggtggtggaggtgatgtgctcgtcgccctcgacgtcatcagtggtgatgacgaattcctggccgagctgcagctgaaccttgtcttcgccatcggcgttcttcttgaaccaaccgcagcgaatcttcgggccctgcaaatcaacaagcgcggcaacgttgcgaccagtggcttcgctggccttgcgcacgttgttgtagaccttgaggtgatcctcgggggtgccgtgggagcggttcagacgagcaacgtccataccggcttcaacgagcttcaggaggttgtcgtaatcctcggtggaaggaccgatggtgtctacgatcttggctttacgcatgaatgcctgcctattcttgttcaatttggttcgaggcacgattgccccatttgccgaaacccagtctactagcgcgagccgactcatgacaagttttcttcacggtgtgttgtgagcgctcacattgttgtgttgactaggtttaagggttgtattctctaacggtttcaggccttttcagcgctttccatgctcttcatcttgatcacggaagccacggatgcgccgccaattgcgaccacaatcacagccagcgacagccatgtgggcacttccggcacccaatggatgccttcgccgccgttgatgaacggcaaggtattgccgtgcagggcctccatgatgagcttgacgccgatgaagcccagcaccacggacaggccggcaggcaggtagacgagcttgtcgagcagagcacccagcaggaagtacagctgctgcaggccgagcagggcgaacacgttggaggtgaacaccaggaacggatccttggtcaggccgaagatcgcgggaatcgagtcgaaggcaaacatgacgtcggtggtgccgatggtcaggaacacgatgagcatcggggtccagtaacgcacgccgttcttggtggtgcgcagcttctcgccgtcgtagtcgtcggtgatcttgatgatcttgcgcagattacggatgatgccgttttcgtgatattcctcgtcctcatcgccgccgagcaccagtttgacggcggtgtagatcaggaaggcgccgaacaggaagaacacccatgtgaagcgggtgatcagggccgcgccgatcagaatgaaaatgccacggaagatcaaagcgatggtgatgccgatggacagcacatacttctgaatctgcttgggcaccgcgaagttcgacatgataatgacgaacacgaacagattgtcgatggacaacgagtattcggtgagccagccggaatagaactcgatggcgggcctggagccggcgaagaaccagatgcatccgccgaagatcaacgccatgaccacgaagaaggcgatatgctgcacgcattccttggtggagggcacatgcggtcggcgcccgatgacgaacaggtcgacgatgaagaacagcgcgagcaccacgaaggtgatgatttcaaatgcgagtggggtttctgccatgattccctacactaacccatgtatgtgacgggtcattgccccgcctcggtcatctgccggagctccttcttgagatcacggatctcgtcgcgcagacgggccgcgagttcgaactggagttgttcggcggcggtgtgcatctgttcgctcagttggcgaatcaggtcggcgaggtcctgcgcgggcaggccggccttcaggatctcctcgtggcgtttgtctgcctcgttgggatcgagtaccggcacgcccaggtgtgtgttgccggccttgcccgcgttgcggtagccaccttcaagcaaggtctgggtgtccacatcctccttggcgagcatatcgttgacatcgctgatcttcttgatcaggggcttgggatcgatgccgtgttcccggttgtaggcaatctgcttggcgcggcggcggtcggtctcgtcgatcgcctgcctcatggcctcggtggtctcgtcggcgtacatgatcaccacgccggacacgtttcgcgcggcacgcccgatggtctggatgagcgaacggtaggaccgcaggaagccctccttgtcggcgtcgaggatcgccaccagcgatacttccggcaaatcgaggccttcgcgcagcaggttgatgccgacgatgacgtcgatcttgccttcgcgcaacatgcgcagcagttcgacgcggcgcaacgtatccacatcggaatgcaggtattcgaccttgatgccgcgttccagcagatagtcggtcaaatcctcggccatcttcttggtcagggtggtgaccagcgcgcgctcgttcctggccacgcgggccttgatctcggcgagcagatcgtcgatctgccccttgaccgggcgcacgtcgatcttcgggtccagcaggccggtcgggcggatgatctgctcgaccaccccatcggacagtcccatctcatagtcgccgggtgtggcggacaggtacacggtctggccgacgcgctgcaggaattccggccatttgagtggtcgattgtccatcgcggagggcagacggaagccgtgttcgaccagcgtgcgcttgcgggaggcatcgccctcgtacatcgcgccgatctgcggcacggtgacgtgtgattcgtcaatgaccagcaggaagtcatcggggaagaagtcgagcagcgtgtgcggtggggtgccggcggcgcggccgtcgaagtggcgcgaatagttttcgacgcccgagcacacgcccacctgggtgagcatttccagatcgtaggtggtgcgcatgtcgagacgctgcgcttccagctccttgccttgcttacgcagttctgccaggcgttcgtcgagttcctcgcgaatggtcttaagcgcccgctccatgcgttcggggccggccacgtaatgggaggccgggaagatgtgga

SEQ ID NO: 3507 - DNA, 3443 bp, Unknown
  R85_18m  MAG No. k141_9580
cgaaaccggacggatcagcaaacaaagccgcatcctgttcgtcgatgacggttccaaagacggcacctggagcatcatccgcaatctgcacgaacgcgacgcacacttgttcggcggcgtaaagctctcccacaaccgcggccatcagaacgcgctcctcgccgggctcatgaccgcgcgcgcctacggctgcgacgccgccatctccatggacgccgacctgcaggacgatgtgaacgcggtcgacgggttcatcgacggattctgcaacggcgacgaggttgtctacggagtgcgttccgcacgcaagaaggacacatggttcaagcgcaccaccgccgaagccttctacaaggtgttcgagtggatgggtgccgagacggtacccgaccacgccgattaccgtctcatgagccgcgagacgctcgacgcgctcagcgaataccacgaagtcaacctgttcctacgtggcatcgtgcccacactcggctaccagaccagcaaagtctactacgagcgcggcgaacgcgaagcgggcgaatccaaatacccgttgaagaagatgatcgccttcgcgattcagggcatcacctcgttctccacgaaaccgctgagcttcgtcaccggtgccggactgctgtctatcctggtagcgattggcatgttcgtgtacgtgctcgtctcgctcgggttcggccacgccatcgccggctgggggtccatgatgatctccatctggctcatcggcggactcatcatgctctccctcggcatcgtcggcgaatacgtcggcaaaatttatatggaatccaaacatcgcccccgttaccgcatcgaaaccacactgtaggaggggccggcggccagcggacggcccctcctacagtgcttggattatatctattttgtcctcatcacacgagtcaacgcgtatagcaatgcccccctgcttgaggcggaaatgagaccgtcgccgttctcctgccttgctataacgaagaggtgaccattggcaaggtggtgcgcgacttccgtgcggcgctgcccgacgcggccatctacgtgtacgacaacaactccaccgaccgcacggccgaaatcgccgccgcgcccgacatggtcgccaaggtgctcgaaggctacgatatggtcatcggcgaccgcctctcctccacatacttccaggagaacaagcacccgttccacaacttcggcaaccgcctcgtgcgcggctccatcaaccacctgttccgtgcgcacgtcaccgatatcatgaccggataccgcgcgttcaacttcaccttcgtcaagacctatcccgtactctcgcgaggcttcgaggtcgaaaccgagatgacaatccactcgctgaacaacaacctgcgactctatgagatgccaatccagtaccgtgaccgccccgaaggctcagtgtccaagttggacaccgtaggtgacggcatcaaggtcatgagcaccatcttccgcatgattcgcgaatacaagcccctccccttcttcggcggattgggcctaatcatcggcatcgttggcattgtgctctgcggcaccgtcaccttcgaattcgccaagaccggcgtggtcacccacttccccacactgatcggcgcggtgatgctggtcatcacggggctgctgctcatcatcgccggcatcatcctcgacgtcatggccaagaacgaccgcaagaccttcctcattgacaccaacagattcgcatacaacaaaagacactgactaagcgccatatagaaacgtgatggggagcgcaacctacggttgttgtgtccccatcttttagcgtctagctcagactgtgaaaaacaatagaaaagcagaaagaacagcattgtggtatccatgccaccaaaactaccctaccgtcgtcaccgcctaacccgcttcacccacaccaaacagcgaaaggccgatttcttttatgcatcactactaccaccaacacctcacatatagtgggacatatgtctgatgcttccgatgcctctgatgctgtttctgctcctttgactgtgttctcacgagtggcggcgaacgctgcgtggaagcggtgattctgctgatgggtttcgtgctgattgcggtgacgcctgccgggcatattccagacgtatgggcgcacacatatcgcattgacggcatcgttaacggggatgtgctggctcggccggtcgactcgaccagcatcctgcattcgggcagcggcaatgtgggcgggtgcgtgagccgtgattggatccggttttccatcgaccattacgacggttacgatccggctgccgtcaatgccgattttcttgaacggtacggcacgggcagcactgcagcgggcagcggcacgaacagcaccagcaccgcaaacaccacctgcgtggacacgccctacaacaatgcagcggttaattcacccttcgcctatctgccgcaattggccgcctttgccataggagcagactcaacgctcacctctggccccacatacgtactcgcggaagtaatcatgttgctggtgtacgccggttgtatgttcgccgccgtagccgcactcccccgctggcgcttgcctacggccctactcttggtctcaccgccgttgatcttccgctattcgttcgccatctcggccgattccatggcacaggcgctgtgcctattgttcgcgtgtctactgttttcctgcatggccgatccgcgtgccggcaacggacgattgaccgcgctcatgaccgtaggcgtgctgatgggcatgtcgaaattcacgttcaccccgcttctgctgctgggattcctggctttgataccgtggcatagcgccgtatccgaatctacagccgtaccttccgcagcagacgctgcacgggcttgagcaccacggtatcggcaatcaccgcaaatagcagcgccgccagcaacgtagcgccaaacatcaacacgctgatacccgcatacgaccatccgtccgtgggcgcgggaatccgcgggccgatcagcaccttggacagcggcgaatgcaccagatagatcgtgtaggagtatcccgccagccaggtgatcgccctgcgcagccgcgccgacgccggatgcacgtcgtaccggaagaacaggaacaccgcggccaccaccaccgcgaaggagaccgtgagcgtgcggcccacctggatctgctggccggcgaacagatatggcgtggcaacggtccaggccagggcgaacggcgccaacgcatacaagccgcgccgcgcccgcgtggacggcggatagtattccaacacgaatcccaacagatagtagaccagcagcccccgccaagggaacgactgcaggaacgtcaacgggtatccggcaagattgcagatctgctcggcggcggccacggcggcggccaggccgatcagcagccaggc

SEQ ID NO: 3508 - DNA, 14462 bp, Unknown
  R85_18m  MAG No. k141_9621
gttttcccacgactccattatgccgcttgttggaatatccctataccactgcggcgtcccgtacgtgactatgtacgagaacgccgccacccctgtttgctgagaacctgttagagctgcttagaactgaatgtaatcgacttccgtatgttcgccggtttccaagtatttcgccacatcatcaggaccggcgaacaccagttcgaccgcttgcgcaatcatcagattgacacgatccattggtgtaaggttctcgaaatagccgtacaccggaattcccagcgcatgcgcatatccgatttcgaacatcgtgcccgggtcctcgtccataagattggcgaccacggctttagcagcattaatgccatggatatcatccgcaaaacatccttcagggccgacttcttcgatctggctgacaaaccgcggcttgaacaataccttgccatgatcttccagtatcttttccaaacgttccatacttgccgtttgctcaggatcgaagaacggaccggccacatagaagtcatactgtttgtcttcactcatggtctctagtcatagcgcagccgcgtcggacgccagccgttattttcactgtatggacaaggggtcgtatcgtgaacattactacgggataaccgtcaatgactacgtacgttgcccccgatcagcacactccgccactttcgccccctcccgtatcgtcgagcacgcgaaccaagccgaccaaatagccgccatcccatgcgctgattaccgtatccgaatgctgcaatgccttgaacaaccgttcgggccactgcgccgattcccaaccaaccgacttgaacagcgcctcaacctgttcgacagtaaaccgcttctcttccgtgtattcgatagccatggaccctcacgataaccgtgaagccccacatgtctttgcatagtttcacatgacgggatgatggatggtggaacctatacgtttacacatgcctaatgcctatggctcatcaccgatgaatagaggctgagataccgtcatgtttccgaagccaagtgcccgagatcggattcgaaccgacgacacccgctttaggagagcggtgctctatccactgagctactcgggcaacgacgtttcattgtacacggccgcacgcccagtcgcatcatgttcgcgtggcagcctacataagacgcatggcagtctgtgtaagctacctggcagaacccgccaccaaggcatggccggttttcgtgctggtttggtgcgaactgctcttgcgcacggcgaaaagacaccgaaagacaagccgcacacggtacagtggcaaatcgcacgaaaagcaaggtaacagtaaacaagccggaggaaagggcagcatggcaaaggcacggagtactaccacaggtgcaagcgtacgagctcgcgccgctgccaagccacgctctgccaaagccacggcacgcccagtatccaagtctgccgtgaagccacacaaacggcatcgtctgcttggttttctcgccacgatgttcgcgcttcttgcccttgccggcactgccgcccgcgcgctgcctgccgatttacaggaactgccatttgtgccgattgtggtatcggcaacgccctggttcacgttgcttggcctgattgccctactgttggccatcgtgtcgcggcgtatccttgccgcactaatcgccatcgccgcaatcgcatgcaatggctattggcaatatccgttcttctactcgaccgacccgctcccccaagccgcgcagaacgccgtggctgcggcctcccccaacaccagcgatgcctacgcgcgcgtcatgaccttcaatgtatacaaggggcaggccgacccacaagccatcgtcgaactagtccgcgatcagcgcgtcgaagtgctcgctttgcaggagaccaccgaggatttcgtcaaaaaactcaacgaggctggcattgagcactatctgccgtatgcgcaggtctcatcgtctgacggcgtattcggtaacggcctctggtcggccacgccacttgccgatccggccgacgatgacgtgaattccagcgcctcattcatgcccggcggcacggtggatatgggtggtcagcagattcgattcgtatccgtgcacaccaccgctcccgtacccggctattggcggcagtggaagcgatcgctggatgagttgggtccgatgcgcgggcatacggatacacggtatattttcatgggcgatttcaatgccacttacgatcacacgccattccgtgattttcttggcgaccggttcgtggatgccgcacgtgaatccggacatgggtttacgttttcgtggcctacgaaccgcgtgtatatgccgatgttcgccggtattgaccacgtggtgcttgatcagggcatgaaggccgggcaatgcaaggtggtcaaagtcgagggctccgatcatgcggcgttgttggctaccgtggcggttgggtgatttcgtattcctcggccagccgcatacactgggacacggcttccagaatcgcctcgatgccggacttcttgattgagccgtcatcctttaaatacttcatcaggcgcactgtggatttggtgctggcctcggggtcagggcgagcgccgggagcggcgtcgacgataagcatgtggatagtgttcgaaccgatatcaagcacaccaagtcgcgtggtgcgcgaacgcagattgaccatgatccctattcctgaccttacccaacccgtgatggccgaacaacgggccgaccatcgcaatcagccagccgtgcgccaccatggcgagtcgttcggccggcaaccaacaccgcgaggccagccgaacatcacacaaactcgactaccgtacaacaatcacaccggatgccgcgccgttcacaacgattcgacgaacgttccgagacgttccagcccctcggtcagggcctcacgtgaggcggcatagctcaggcgcacatgcgtatccgctgtggccgcaccgaagtcgcggccaggagtcagagccacatgggcttcatccagcgcgcgttcgcagaacgtccaggcatccagaccagtacgggagatgttgaagtaggcgtagaacgcgccattcggctccacctcaaccggcaaaccgatgcgcttgagcccgtcaatcacaatgcggcgacgggcaagcaattcctgacgacgagcttcacattcggccaaactctccggcgtaaaacaggcgagcgccgcatgctgggtgggcgtgtgggcgcacaggtagtagttggtggccaggtcgtcgaccgcttccagcacggtggggtcgtcgggcagaatagcccagccgagacgccagccggtcatgccgaagaacttggagaagctgttgcacacgatggcaccgggatcgcaggccagtacggacttgacttcggtgccgtccggctcacggtcggccaaatcaaggtaggtttcgtccacgatgcgccatgcgccgcggctggcggccagcttgcacacctcgtccaatacgttgaagtcgatggtggtgccggtggggttggacggcgacgtgatcattacggccttggtcttgcttgtccagtactggctgcacaggtcggcggtcaggtggaagcgggtggcggccgaggtcggaacgtcgatgacccgcccctcaaaggagcgcacaagttcgcggttgcacgggtaggaggggtcggccacaatcacatcgtcaccggggtccacggtcagcgcggtggccaacagcagggcggccgaaccgccggcggtcacgcagatacgcttggggtcgatgtcaaggtcatgacgctcgcggtagaagtcggcgatggcttggcgcagttcaggtaggcccatggcggcggtgtacggcagggcccggccgtcgtactgttcgcgcatggcgtcgcgtacggcgggcggcgcgccgaaatcgggctcgccaaggcttaatttgatgacgctgataccttgggcgatcatcttgtctgcttgttcgccgaataccatggcacggaagggattggcctcacgcgctcggcgggacatgactggagacgcggccggagattggggctgctgcgctgcttcgttttccatatttcggttctatccgcctcacgggacaaggtttcttcttctataatcactgtaggtcgattgagtgtaccaacccgtattcaaggaggaataatgagtcgattcaatggcaaacgcgccgagttcgaggccagcggcgaaaagatcaacgtcgcgattctgggtgcgggccgcatagctcacaccatggccgacaccctgacccagatggctgaaggttcactgtattcctcatggattcacccgtatgcggtagcggcccgtgatattacgcgcgcgcaggcttttgccgaccaatggcattttgacaaggcttatggatcgtatgaggagttgacggcggacccggatgtggatctggtgtatatcgccaccccgcacagtctgcacgccgaacaggcgatcctgtgtatgaaagccggcaagaacgtgctggtggagaagtcgttcaccgcgaacgccgggcaggcacgtgaggcgctggccgtggccgaggaaaccggcatgctgtgcacggaggccatctggacgcgctacatgcccagccgcaagctcatcaacgaagttatcgagtccggcgagatcggcgaggtgaaagcggcgagcgccaacctgtgctatccggtgtccggcaaggcacgtatgaccgatccggcctgtgccggtggcgcgctgctcgatgtgggcgtgtatccgctgaacttcctggatatggcgatcggtgccgaccatggccgcacgctggatcatttcgatacgtcgatgatggccgccgaaaccggtgtggatgcacagaattccaccacgttgtattacgatgatggcacgatggccgtgtccaccagttcgatgctggtttcctccgatcgcggcggctacgtgtggggcaccgaagggtatttggtggtcaccaatatcaacaatcccgagtccatcgatatctacaacaacgatcacaagcccgtgcgcagtgttgcggtgccgtcgcagttgaccggttatgagtatgaggtggccgatgcagccaacgcgctgctggatggcaagatcgaatgcgaggcgatgccgcacgccgacaccatccgcatcatggagctgatggatgcgattcgcgaccgttggggcctgaagttcccgtttgaggtctgatttcagctcccctccagaggggagctgaaattattccgctgaatctgcatctccttcaacaatctgctcatacagccgtgcgaggcgttcgtcacgcacggctttcgttaattcgcactcccatacggtaattacacgccagccggcggcctccagttcagcccgctgcgcgatgtctcgattgtgattgcgcagtagcttcgtctgccagaattccacattcgatttcggcatcgaatgtttggaacagccttcatgcatgtgccagaaacagccgttgatgaacacgatggtgtggtatttcggcagtactacatccgggtggccggggtaacgcttgtcgttcttgcggaatcgcaaacccttgcgaaacagatagctgcgtaccagcacctcgattttggtgtctttgccacgaatatgcgacatcgtgtacgaacgggtgccccgctcatacttctccactggctgtttcttgcgattcacgcactccagactaccgtgacgttgcggcgaggatgaaagcctgaacgaacaatcacccatcttgcccgtccgtgtctcttatcgcgggcaatgatcatctgccggtcgagactgcacgattagaccgaatcaaatggatgacatgatgattcgtagggccacggcggccgatattccccaaatcgacgaactgctgcggcaggtgctcgaagtgcatcatgccggccgaccggatctgttcaaaggcggtgtcaagaaatacacggacgaggaattgaaggcgattctggccaacgatcagacccctgtgttcgtggcggttgcaccatctgccaatgacggcactgacgtcgaacataacgccgactcccccgccaccgaccaagtgcaatggtatagcgccaagcgacgtctgctttgcgagatttgcgagagatgaatgcgataccagcgttcatggctatgctccttaatccaatatcaatggatgaacctgcactgccccgtatgtcaccatcataatatatcgaatatcaatataaagatatcgaaaatcactttcaccattcacccacacacaccgcgacgcgatcgaccgttcttgccttgctcgcagcatccacgaccaacacgggaaagtcactttaaaaaagcactttatcaatgcggataactcggaagctagaaccacataaccccgttcagcttgccaatcagaaacctcatcccataccgtcagatgcacccgcacgcaacgacgcgtcagacaacagaaagaaggaccaatgaacatctctacgtttacccacaactcccacccggcaattcggcatacgcattttgtctagtgcgagattgagagttatgatgacacgaagaaaactcatcatcaagaaacttcggcaagcggcaaagcagcgagggctcgatttctatttgttacggcaaggcagcagacatgaggtttactgcctggacgggttgaggatacccatcccccgccataatgaagtctcagaacgaaccacgctggatatcatcaacgagagcgagcagaaactcggaaaggggtggtggcaatgagcaactatgacgtgcttgtgcaacccgatggccgatattggtacgttcaggtaccagctatcgaacggtcgacccaggccaaaggacttgacgatatcgagccaatggctaaagatctcatcactgtcatgaacgacgacgacaatccggagctcaaggtgacgtttgtgttgccgaaacaagccaaacaacacgtaacagaaatgttccggcagcgcgaaatagcaaaaaaagccaacgcacaagcggctgccgaatcccgactcgccgcacgggccctacgcaacgagggactcacgtatcgacaaatcggagctttattgggggtctcctaccaacgagcatttcaattggtcaacggcaaaacaaagcacaaaacgacagcgtccgaatcgcctcagccaacaactgaatcacgctccccacgcacgcaccatgccacaccgctatcgactccggtctcggcttagcgaacgggtccacaaagcccagactgtttccatcaccaagctcaagagcaccgagcaggatcttctcatcccagcagattgaggagatcgtccttggtgagggtggcgatggaggcgggggcttcggtgagggcgctggcaccggtgccagcttcgtcggcaagcaaggaagcatcggtgaactggcgggcgagctcgctcttggtatgctgaagctccaagatgcgttcttcgatggtgtccttggccaccacctgatacacgttgacgtcttcggtctggccgatacgatgtgctcggtcggtggcctgatcctgcgcggcagcgttccaccatggatcggcgtggatgaccacgctggcaccggtcaggttcagtccggtgttgccggccttcaatgaaatcaggaaggcgggcgtatcgtccgcattgaactggtcgacgagttcgagacgcttctttttaggcgtggatccggtgatggtgtagtagcgtagtccttgcgcgtcgaaacgttcggcgatcagatcaaggaagctggtgaactgggagaagatcagcgccttcttgccttcattcacgcaggtttccaccagttcggtgatggcggcaagcttggccgactgatccttggcatcggcatacagcagccttggatcacagcagatctggcgcaacttggtcagctcggcgaggatgcgaatcttcgacgtgttgaaatcggcttcttcgctgtgttcgagctgcattctgagccgctgctcgtgggccgcatacagtttgcgctgttcgccggcaagctgcacggtcagcgtggtctccaacttgtccggcaaatcggtcagcacttgggacttcaacctgcgcttgatgaacacgcccaccaacgactgcaattggcgagacacccgggcggcctcaggattgacctgtgcggcggcccgaccttcggccgtgctgccatctgcagcccgggcgttggagatgggcaactcgtagcgctcatggaatcgcttgtatgagcccaatagtcccggcatcaggaagtcgaagatgctccacagttcggagagtcggttctcgatcggcgtgccggtcaaggcgaaacgatggtcggcggccacggccttgaccgctttggctatcttcgtggtgtgattcttgatgtactgggcttcatccagcgccatgacattgaaacgttgctcattggcggtgtaatcatcgacatcccggcgcagcaggtcgtatgaggtgatgagcacggtgggttcatccgcccggaacgcgcggccgatggcggtgcggcgctcggctttggtaccggccaccaccacggcgttgaagctcggggcgaacttggcgaattcggcaccccagttgtacaccaaggacgccgggcacacgatcaatgatggatgcggcccgccatcttcggaatcgaaagtaatatgaccggttacggctgattcactattaacagcattaccggcatccatgccttgagcggtcggcatgccactagattcgttgtggtatcgcgacagcaacagggcgataagctgcacggatttgcccaaacccatctcgtcggccaaaatgccgccaaaacccttgtcgcacaacgtgttcagccattggaagccttcgacctgataagggcgcagaatatgcttgagactatccggcacttcatacgacttagggtcgatgatcttgagatcgtcgatgtattcggtgaacgaagcgtccttgactacatcggagccgtcatccggcagctcaccatccagtaggaatgctcgaccgcccggcaactcgatcagcccggagttgagctgctgctcgctcagatcaaggtcgctggccaatcggtccaacgtgctgagattcgcgccgctgagtttgaccagcgtgccgtccttcaaatgatggaatcgttgacgccgacgatacgaagacagcaaggcacccacttcgtccggcggtacttcatcagcgaggggtgatatctccaccaaattgcctttgatggacaatccgactttgacgcttggcggcttgggcgcgatcagccggtcaaaagccggtgtggtgaagacctcccctacttccttcagtgcgggcaatccctcgtcaaaaagacgaacaatctgcgtggtgtcatcgcgatcgatagtggccgcatcagacacgaattgtttggcggtctttcgcgcggccggcgttcggaacccattcaccgtctgatgagtggcggccgcaacgcgcttgcgctggtcaggcatggtaaagaattcacgcactacatcaatcgcaagatgctcagcgtcgaaatcacgcccaatcacgccccgagacaaggggatggaacgctcatccctagcatgcaccgtcgggccatcgggtagcaacgggacaatggcatcgccgtagtgtgccttgacctcgcattgcacaccatgctcatcacgatccagataaaactggaggctgcattccgtaggacttaattcagccagctcgcgaggaatctcactggcctccaacagtccggcaccaaccagctgaggcaatagcgtgcgtgcgaacagggcgatgtcatcgccggcaatgacctgcccctcgccatcgggttcaaacaggtctcccaatagtcctcgcaacggaatcaatcgtttcgggcaacggacgaatcggcatcccgctgcgcttttacgctgagagcccgccatcatggcggataccgcaccggccggattagtggaggcgagcaacagccatacatccttgccaccatcaatcacggtttccaccgccggcactccggcaagcaggtatccggcatccggaccatacgtattgaaatcacgccgcgcaatgcgcataagaaaatctggctcgccaccatcaaccggcaccgatgcaggctgcccggagaaccatgtgttcaacacgagctgtacgcctctgccctcacgtacggacagcaaccgggccacttccggtgctgaaagtgtcaggtgacgatcgatggcgatatgcccgtaataccggtcctgctgctcggccgcacgacgcacggccatcgcgtcgtcaaggaagcccagcagtgggcgcgaatcatcgtcgaacatatccggcgtatgggtaaaggcaagcttctgcccataatccgtatagtcgccgttcgccatggtaagcacaaattgcggaatcgatttcagtacatagctggacccattggaagtcgatccgatcttgaactccacgctccacacgccatcgatgaaactcaatatcggaacaagctgcacctgccccaagcccacagtctcactatcgccctgatacccgccgcctcgggtgccggcacgagagccgtatccgctattcgtacgtcgtccacctgcgccatttcgtctttttgcagtatcgaatcggcgcatgagcgcattgcggcgacgcgctttggcttgaacatcttgcctatcgacgtgctccatatagtcgatcagcgtccgagacggcctcacagccccggcacggtacccttcaaaacgctgcggatcatcgcagaatatgaaggcgagcgcaatcatgtgcttgcacatgccaaagccacggccgtaagccgggcatgagcacttgccaccgacggcttctcccgtatcgaggtcgaattgcacgctggtacgatacctactcgatgggctggtggtgccacgtagaataccgtcaagctcggcatacccggttcgatgattttcgctgtataccggattgataaccatggtggccgctttgcgcgcaatgctacgggcacgagcgagcacggtattcgacgatgacgattccacatcgttgcgtaacgcaaggatagggacggcatgggcttcggcacgcttcgcagacccggcgaaatggccttcgtcctcatcgtcgaaccatacggaacgtccttgcctgaaacgatagggcatcaccgcatcggcggcggacaaactgtccgttccaccaaacgttacggctctactgccggcagcgcctgcgccaccaagcattccatctgcctcgccagagataccgcctataccgctgctcttgccggcaaagaggcccctgtcctcattagtgcaatctgtgtcatctgcgccataccgatcatcgtcgtaatcggcaccttcgtcgcctccccttttccaaggattgcgacggcgcaacgcatggccccaggaaacgccggaatcatcatcctcataaggcaggaggtcatcgtcatccgcattatcgggaacatggccaaatacaccataccctttgctcatgggcgagcctcctttccagcgaatgcatttcagtccaacacttctatcctagacgaggcgcgcggtagccttaatgtatggatgcagacaagccggcgcaacgcaaatcctatgcagggaacaccaccctcgaaatcttcgaggtgctgtggcgtcacagctactttggacatggcctgaccgtgcggcaaatactcgatgaacttgcccgtaaacaccagctggaagatccaagcgagctgccgaccgagaaaaccatacgaaatcagctcaaaaagcttaccgccacggaatttctcggcagacatatcgggcatctcaccgaaagcgaccttgccggcatcgaatgcaagaatccacaacccggctggtatcttgacgcattcctatccaccgccgaaatgcgactgctactcgacagcctcaccttgtctcgcatcagcctcgacaccatggacgatctcatcggtaaaatccgcgaactcgcaggtgccgctgggcaagcagtaggttaccttgagcacgtggccacctacacgcatatcaacggcgagttcctatccaccatcgaccaactgaatcaggccattgaagaaggccacggcgtaaccttccaataccgtgattacggcccggacggcaccctgataccgcataaaagccgtacgggcgcaggtcgaattacctacaccgccgacccttaccagatggtgtacaagaacggacggtattacctcatctgccatctacatggcgaggataatctccgcattttcgtggtcaaccgaatcgccaacgtcagcgccaaaggcaggaacggcacagttccactggaaaaaccagcgccggctgattttgacgcagtgaacttcatgcgtcaccgcccgtatcccgtagccgatgccccgattcgcatccgcatggccgtacgagacgaatccatgctcaacaatgtgttcgaatggttcgacgaccctcaaatcaaacattcggcggacggcacacagttcgaagtcatcgtcgatgctcccgaacgcgccgtgttctggtgggcattgcagtattcctgggatggccgcgtagtgattcttgagcccgattcgctcaagcgcaaactctatgatgccgggcgtcgcatggccacagcctatgctcccgaatgatgcagcatcacatcgcacacctccttgccgagttgttcaccagcgaatttcaccggagaacctatcatcccatcgccaatcacgttcggtaattttttaccgaacaactcgatttcaagccattccacgaactatggcccccgcctagccgtacttgacgctaaggtggaaccatcacatgccgcgatgcacatgcaacgcaaacgcaacgatatgtaaggagcaactatgagcgaagagcgtaccgcatggggatggggtctggccagcgtagacgccgccggcaccaccctggacgtctggtaccccgaactgaatctcggtgaggcaccggccgaggccgatcgtccaaaccacaatttcggcactctggctcacgatgaagccgacgcccgtggcatccgccgcgtgccggtattcgtcgtcagccagttggacgagccgatcagcaacgccgcggacgcttacctgaaactccatctgatgagcatgcgcatggccaagccgaacacgctgaaccttgacggcatcttcgcccaactcgccaatgtggtgtggaccaactacggtcctttcgccgttgaggacttcacactacgcaaggccgatgtcgaacgcgcctccaccgaagccgctctcgctttcgctgctcaggccggactgcctgccgcagctcctgccaccaccgtcaacgtgttcggtgtggataaattcccgcgcatgatcgattacgtagtgcccaccggcgtgcgtatcggcgacgccgaccgtgtgcgcctcggtgcttacctatcttccggcaccaccgtgatgcacgccggattcgtgaacttcaatgccggcacgctcggcgtctccatggtcgaaggccgcgtttcgcaaggtgtggtcgtgggcgacggttccgatatcggcggcggtgcctccatcatgggcaccctctccggcggcggcaagctgcgcaactccatcggcgagcactcgctgctcggcgccaacgccggtatcggcatctccctcggcgataactgcaccgtcgaagccggtctgtacatcaccgccggcaccaagatcagcatctgggacaaggccaaggccgcagccggcgagccgctcgaagtcgtcaagggtgctgagctctccggcaaagacaacatcctgttcatccgcaactcggtgaatggacgtatcgaagcccgctaccgcaaggtgggaattgagctcaacgccaagctgcacaagaactgaaattgaaataatggagcgttatcttcgttgctcctcggtcgacgtacttccgtacgccttccctcggtacgcttcgataccgcacacattatttcaatttcagaactagccctgctcgttcttatgcagccgtcgcagcatagctggtttgcgctgtacatatagaaagcgcttcactggaatctccagcgaagcgctttctcaaaccaataatcaccgctcgtccatcggcatgaaatcgcgctcgaccggaccggtgtagacctggcgtgggcggccgatcttggtgttcgggtcggccagcatctcacggtactgcgcaatccaaccgggaatgcggcccagtgcgaacagcgtggtgaacatggccggatcgaagccgatcgcccgataaatcaagcccgtgtagaaa

SEQ ID NO: 3509 - DNA, 3332 bp, Unknown
  R85_18m  MAG No. k141_9626
aacgatgaacgacacagcaatttctttgcgattgggagcatggtgggaggccaatgcgcgtgacttgccatggcgcttcggacgggccacgccgtggggcgtgctggtcagtgaggtgatgagccagcagacgcagatgagccgtgtggtgccgtactggaccgactggatggaacgttggcccgacgcccgctcactcgccgaggcccccaaggccgaggtgatcaccgcatggggccggcttggctatcctcgccgtgcattgcgcttgcaggaatgtgcccgcgtggtggccgagcagtacgccgacaaactgccgcgtacgtatgacgaactcactgcattgcccggcatcggcgattacaccgcctccgcggtgctgagctttgcgttcggcgaacgaatcgccgtgatcgataccaacatccgccgcgtgctgagccgtgtgttccttggcgtcgaatcgcgcgggggagcggccagcccggccgaacgcgcgctggcgaaccgcatgctgcccaaagacgagattctcgggcgcgatgctgacgtcgccgataatgccggtagcgtcgaacatgccgtgaacagcactatccgtggcggcaaacgctctcggctgcatcgtggcgagcgcccatcggtcacgtggaaccagtcggtaatggaactgggggcggtgatctgcacggccaaatcgccgttatgcgacacctgcccgattgcggatgattgtgcatttctcaaagccggccgccccggactgggggagcggcgcacccgcccgcggcagcgattccaaggcactgatcgtcaggtgcgcggtctggtgctcgccgcgctgcgcgagcttcccgctggagtcacgttgcccagggaagatgccgacaagctttggaaggaccagattcagcttgccgcctgcatcgccagccttgacgatgacggcctgatcgagattctggacggcggcctgcgattacccagctgacattgtgaaaatggcgggctccccaagcgtgtatgggtgtggtgaccgtagactggaagggttatggcagtgcagaggaacacatcaggcgcgagaacggcacgcggagccggcaccggggccaatgggccatccggcgggcccgcccgaaacgaccgttccggcaagccgcgcaagcgcaggatcagcaaaaagcagcaggccatctatcgtcgtcggcgtatcgtggccggcacggtgttgctgctgataatcgcgctgattgtattctgcgtgtacagccttggccggggtatcggtgccgtgaacacgatgattcaccatgacgaggtgtatgcgatttcccgcgacgccacgccggctccgaagaaagtcagcaacgtcaaggattgctcggccagtgatgtgacattgcagctttccgcggcctcccaatccgtgccggtaggaggatcgcttgatttcaccgcgaccatcgtgcacgaggggtcaggcaactgtttggtggacggggccgattccggccgtgtgctcaccattacttccggtcaggaaacgatttacaagtccgatgtgtgtccggcggattcacgtctgctgctgatgtccaagggtgataaggacgttcagaaggtcacgtggaataccgatgcgaacgccacgctcaccgaatgcacggatgagtcggattgggccaaggtcaatgcgggaacgtacgtggcgcagctgagtttgaaggatcatccgaaggtgaagagcgatccggtgacgtttacggtggggtaggacctgcggttggtgtttggacgctgggtctctccctcagtctcgctccgctcgacagctccctcgtcagcgggagctaaaaatgtcctcgcatatcagtattcttttgactttgcatgaggtgtgtcatattgcgggcatgccgtcgacaatgaagcgtccgcataggcatatggtggccatgccggcgctcccaggggaattaccacatattagcgagcgataaggaacgtccattggctactgagtctacgacgaacaccaccaccatcatcgcacgcgccgaccagcatgacattgatctgcacaaggcgtcggatcgcgtgaacttcggttccatcaaggaacccatcgatgtgccctacctgctgggcgtacagaccgacagcttcgattggctgatcggttccgaccgctggaagaagcgtgtcgaagaggatgaggctaacggcaccaacaccgtggcccacacctccggtctcgacgaggtcttcaacgagatctccccgatcgagaactttgcacagaccatgtccctgaccttctcggacccgtacttcgaggagccgcgccacaccgtgcaggagtgcaaggagaaggattacacctactccgctccgctgtacgtgaacgccgaattcgagaacggcgacaccggcgagatcaagtcccagaccgtgttcatgggcgacttcccgctgcagaccccgcacggcaccttcatcatcggcggtaccgagcgagtcatcgtctcccagctcgtgcgttccccgggcgtctacttcgaccgccagcaggaccgcacctccgataaggaagtcttcggcgcgaagatcatcccgagccgcggtgcatggctcgagttcgagatcgacaagaaggaccagccgcaggtgcgcgtggaccgcaagcgcaagcagtccgccatcgtgttcctcatggccatcggcatgaccaagtccgagatcgcccaggccttcaaggactacccgctggtgctcgacgccctggagaaggaaaccctcgagacccaggacgaggccctcgtcgacctctaccgcaagattcgtccggccgacaccccgacccccgaggccggcaagaacctgctggactccttctacttcaacaccaagcgctacgatctggcccgcgtcggccgctacaagatcaaccgcaagctgggtgtcgaggccgatttcaacgaccgttccctccaccaggaagacatcatcgccacgatcaagtatctggtggccctgcacgacggtgcggcgaccttcccgggcaagcgcaacggcgaagacgttgacctgcgcgtggacgtcgacgatatcgatcacttcggcaaccgtcgtatccgccaagtcggcgagctgatccagaaccagctgcgcaccggtctgagccgtatggagcgcgtggtgcgcgagcgcatgaccactcaggacgccgaggccatcaccccgcagtccctgatcaacatccgcccggtgaacgccaccatcaaggagttcttcggcacttcccagctctcccagttcatggatcagaa

SEQ ID NO: 3510 - DNA, 12510 bp, Unknown
  R85_18m  MAG No. k141_10156
cgaggtccacggcctgacccgcgtgcgcggcctcacccaggacgactcccacatctactgcacccgcgagcagatgaaagacgagctcaccagcctgctgaccttcgtgctgaacctgctcaaggactttggcctgaccgacttctacctcgagctgtccaccaaggacccgaacaagtacgtcggctccgacgagatctgggaggaggccaccaacacgctcgccgaggtcgccaaggaatccaacctcgagatcgtcgacgatccgtgcggcgccgccttctacggcccgaagatctccgtgcaggcccgtgacgccatcggccgtacttggcaggtctcgaccatccagctcgacttcaacctgcccgagcgtttccagctcgagtacatcgcgcaggacggtacccaccagcgtccggtgatgattcaccgcgccctgttcggctccatcgaacgcttcttcgccgtgctgctcgagcactacgcaggcgccttcccggcgtggctggcccccgtgcaggtgctcggcgtgccggttgccgacgagttcgccccgcatctggccggtttcgtcaagtcccttgaggacgagatggtccgttgcgagatcgactactccgacgatcgcttcggcaagaagattcgcaacgcctccaagtccaaggtgccgttcatcctcatcgtcggtgaggaagacatgaacaacaacgcggtcagcttccgcttccgtgacggcagccagctcaacggcgttccggtggacaaggcccgcgagcagatcctcaccgtcatcaagaagcgcgtccaggtgaactccgccgacgacttcaacgccgctgtggctgagtgatgtgaatggtactggctcccctctctgaggggagctggctccgtaggcgactgaggggagtcctgcatggctcgcactcccctcagtccgtttcacggacagctcccctcagagaggggagccaagaaagggtgcgaaaatgactgacgtgcgtgtcgataatccggcggactttccgcctcaggaggacacggtcgaacgactgtggactccgcagcgcatgacctatgtgctgcgcaacagcgaggatcgcccaaccaagcccaagacgaaggaatgcccgttctgcgccggacccaagaaatccgacgaagacggcctcatcgcctggcgtggcacgcacgtgttcgccatcatgaacctctacccatacaatgtcgggcatctcatgatctgcccgtaccgtcacgtcggattcatcaccgaactcggcgatgccgaactgttcgaattcgagaaggccaccaccctcgccatgaaggtgatggaaaccgtctcccgtccgcacggttacaatatcggcattaatcagggcgaagtagcaggcgcaggagtcgccgctcacctccatcagcatgtagtgcctcgctggaatggtgacgcgaacttcatgcccatcgtcgcccagacacgcaccatgcctattctgctgtccgaccagcgagaagcctatgcccaggcattcgaacagctggctccgcagtatcatctgccgcttgcctaacacaggtgcggcaccccgcgtgaccggtcttatcggtacgcataacaagacaatcatcggaaacatcacgggtatgtctgattaacggcctacaatcgtttcgtttgacatcatccgtttcaataattgctaggagcattatgtcaggtcattccaagtgggcgaccaccaagcacaagaaggccgccatcgacgccaagcgcggcaagctcttcgccaagctcatcaagaacatcgaaatcgccgcccgcctcggcggtggcgacccggacggcaacccgtccctgtacgatgccatctacaaggccaagaaggcctccatgccggccgacaacatcgctcgtgccgtcaagcgtggtgccggtgctgaagacggcgccgccaactacgaagacatcgtctacgagggctacgctcctgccggcgttggcctcatcatcgaatgccttaccgacaaccgcaaccgtgcggccgccgaagtccgttccaccctgaccaagggcaacggctccctggccacctccggctccgtgtccttcaacttcgagcgcaagggccagatcgtggtgccgtccgagggcgtggacttcgacaagctgttcgaaaccgccgccgaagccggtgccgaggacgttaccgatgacggtgaggtgttcaccgttgtgaccggtccgtccgacctgttcaccgtgcgcaaggctctgcaggacgccggcttcgactacgattccgccgaccaggtcatgcagccgaagaacgaggtcgagttgagcctcgacgatgcccgcaaggtgtccaagctcatcgacaacctcgatgacctcgacgatgtgcagaacatctactccaactggaccgcttccgacgaggtgatggcccagctcgacgaggagtaatcctcgtgattatccttggcgtcgaccccgggctcacacgttgcggggtcggcgtgatcgaagccggcgagcaccgccggctttcgtttattcacgtggacgtggtgcggtcctcaccggatatcacccaggatctgcgtctactggccatctacaacggcctgtccgagaaaatggatcgcttcgcacccgatgccgtatccatcgaacgagtgttcgcacaatccaaccgcaacaccgtactcggtaccgcacaggccgccggcctcgccatgctcgccgccgcgcaacgcaatattcccgtggcgttgcatacgcctaccgaagccaagctggctatcaccggtaacgggcaggcgcagaagattcaggtggagcgtatggtgacacgtattttgaacctcaccaaaatgccgactcccgccgatgccgccgatgccttggctttggccatttgccatgcgctgcgcccggcaggcgcattgcagggcggcgaacgcgaacaacatctgaccgccgcgcaacgccagtgggctgaggccgcacagaaatccacgcgccgccgcatcaaccacgaccgaggcatgtagtatactttcgaacagttgttcgagtcttgaatcctggagccctgaaggagtacctgtatgatcggcatgctgaccgggcgggttgaatcggtcgaaaccgataccgcattgattgatgttgggggagtgggctacgaagtgcgcatgtccgccaccgacctgagccgtctgcacgccgggcaagacacccgcgtcttcacctatatgaacctctctcaggatgccattaccctgcatggattcctggatcgggacgccaagaaaacctttctgcaactcatcaaggtctccggcattggacctaaagtggcccaatcgttactctccacactgacgccgagtcagctggcccacgccatcgccgacaacgacgccaccgcgctggccaaggctccggggctgggcaagaagggcgcacagaaaatcatcctcgagcttaagggctctattgatttgagtcagatcgagggtgcttccgctcaggcggcaatatccaagtctccggtggataccggtacggaacaggttgtcgaaggactgatttcacttggctggcgtcagcaggacgcccagcaggccgttgccgaggcttgcgccgaaaacgatattcccacgccgcttgccaccgacgatgtgccgcgtgtgctacgtctggctttggcgctgatggataggggccgctgatgagcgagacaacggattacggtacctcaaacaccggtgccaacgaagagtcgttgcgcatggtctcctcccagccgatcggcaacgagccggtcagcgacgaggagctgcgcccccatgttctcgaaggctttatcggacagccacggctcaaggcccagctgcaactgttcctggacgcggcccgcaaacgcgatgtgccaccggaccatattctgcttgccggccctcctggcttgggcaaaaccacgttggccatgatcgttgccaatgagcttgaagtgccgattcgcgtgacttccggccctgcggttcaacatgccggtgatcttgcttcgattctgagctccctcgacgtcggcgaagtgctgttcatcgacgagatccatcgtctgccgcgcgccgccgaagagctgctgtatatcgcggtgggggacttccgcgtcgatgtgatggtcggcaatggcccgggcgcaagctccttcccgctgaccctgccgcgattcaccgtcatcggtgccaccacgcgcgaaggtatgctgccaagcccgttgcgcgcacgctttggcttcaccgcacatctcgacttctatccgcatgaggagttggaaaagctcatcgaacgttcggccaacgtactgggcgtaaaccttgatgcgggttccgctcatgagcttgcgttgcgttcgcgcggcacgccgcgtatcgccaaccgattgctacgccgtgtacgcgactgggccatcgtccacgacctgatcgtggtgcggccggacgacgtcaaggaggcgctggccctgtaccagatcgactccgaaggcctcgaccggctggacatcgccgtgctcaatgccatcgtgcgcaacttcaacggtggacccgtgggcctgaacaatctggcggccatggtgggcgaggaatcggaaaccgtggaaaccgtgtgcgagccgtatcttgtgcgcgaaggttttatgattcgcacgcccaaaggccgcgtggctaccgagaaggcatggcagcatttgggaattacgcccaaagatgatgtcagcaagctcttctagactttctcctgtttgcacacttggcggcgtttcgtcaatgtcgctcgtttgaaggagttgtttcgtggaacaacagtacattatgctcatcgtgatcgtcgtcgtgttcggcggcatgatgtggtggcagtccaagaaggccaagcagcaacagcaggagaagcaggacttccgtcgcaacctgcagcccggcaccgaggtcatcaccatcggccaggtgatcggcaaggtcgtcgaagtcgacgagcagtatgaggagatcgtcatcgactccgaaggctccaagctgcgtttcggcttcaacgccatcgcccgtgagtacacccgcccggcctatgtgtccgatgatgaggtcgacgagaacggcaacccgctgcccgacgaagacaccgaggctccggctaacgatgaggctggtcaggttccgatcgaggcgtccgtcgtgtccgaggaagacaccgctgacgagaccggtgacgacaacgaaaccaagacgaagtaagctgttcgattcggtagcaccatccgagtatcgcatcgcaaaggcataaaaggggcgagcactatggcacagtcggacatcaccatcgacgcattgagcaaggtcgggcaacaggacgccgaatatctggtgtccttggtgcgttccataccggggtttcccaaggaaggcattatcttccgtgatttcatgccagtgctcgccgaccccaagggcttgaagattctgctcaaggcgcttgaaacggctctgccggtgtccccgagcgaattcgactccattgccggtctcgaatcgcgcgggttcctgttcggcccggccatggccgcccatctgggcaagggtttcatcgccgtgcgcaaggccggtaaattgccgcccgaaaccatcggtgaatcctatgacctcgaatacggcacggccagcgtcgaaatcgaaaccgacgccgtacaggcgggggagcgagtgctcattgtcgatgatctcatcgccacaggcggcaccgccaaagccggcgccgaccttatcgaaaaggcgggcggcactgtggtgggcttcagttttgtgatgcggctcgatggtctcgacggtctggataagctcggcggcaagcccagcagctcgctgatcgcgatgccggcctgagattccgtctcacccaacgtacagttagttttcaaggtccggcatgtactgtgtacagttatatgccggaccaattacatagtcagggaaggatcgatggatctttacgaataccaggcgcgtcagctgctcgaggaacaggacattcccaccccggacgccatctttgcccagaactcccatgaagtcgccgaagcggcggacaaaatcggctatccctgcgtaatcaaggcgcaggtcaagatcggtcatcgtggtcaggccggcggcgtcaagatcgcccataaccgcgacgaggcgattcttgaatccgagtccatcctgccgatgaccatccacgggcacaaggtttccggcgtgcttgtggccgaagccaagaacatcctgcacgaatattacgtgtccatctccgtggaccgcacctcgcgcgacttcgacgtgctggccaccgccaacggcggcaccgaagtcgaggaaatcgccaaggaacatccggaggccgtcaagcgcctgcacatcgatgcgctcggcgacttcgacctggccgctgccaccgaaatggcacagagcatcggcttctaccacgcggacgtcgatcaggccgcgcagattctgctcaagatgtggcgctgcttcaaagacaacgatgccacgctcgtggaaatcaatccgctcgccaagatcggcgacccggatgacgaatccaccaagcagctgagcgccttggacgccaagatctccttggatgacaacgcctccttccgccatgatggctgggcgcgtttcgtggatctcatcgttcccgaccccttcgaacagcgcgcccgcgaacacggcctgcactacgtgcacctgcacggcgaggtcggtgtgatcggcaacggcgcaggactcgtcatgagttccctggatgccgtctccggcgctggcgaggaacagggcaccaacatcaagcccgccaacttcctggacatcggcggcggcgcctccgcagccgtcatggccgaaagcctggagatcgtactgtccgaccctcaggtcgaatccgtgttcatcaatgtctatggcggcatcacctcctgcgtggaagtcgccaacggcatcctcgaagcggtcgccaagctcggcggttccaagccgatcgtcgtgcgtttcgatggcaacgccgccgccgagggtctgcatatcctcgcttccgccaacaatccgaatatccatgtgtccgaaaccatggaaggcgcggcagccaaggccgcgcagctcgccggtgaggcgacccagtccaaggaggttcgctgatgctgttcatcgaagacggcgctcccgttatcgtccagggcatgaccggccatcagggcatgacccacacggctcgcatgctcaaggccggcaccaatatcgtcggcggcgtgaacccgcgcaaggccggcacatccgtcaccttccccggtgccaagaacggtgccgacgtggacatccccgtgttcgccacctgcggcgaagcacgtgaagccaccggcgccaaggccagcgtggtgttcgtgccgccgaagttcgccaagtccgccgtggtcgaagccgtcgaagccggcatcgaactcatcgtggtcatcactgaaggcattccggtggccgattccgcatacttcgtcgaactggcgctcaagaagggcgtgcgcatcatcggaccgaactgccccggtttcatcacgctcggcaaccctggcgtcaacttgggcatcatccccgacggcatcgtcggccgcggcccgctcggactggtctccaaatccggcaccctcacctaccagctcatgggcgaactgtccgatatcggcttcaccgcatgtctcggcgccggcggcgatccgatcgtcggcacgacgctgctggaagccctgcaggcattcgaagccgaccccgacaccaaggctgtcatgatgatcggcgagatcggcggcttcgccgaacaggacgccgccgcatgggccaaggagcacatgaccaagccggttgtcgcctacatcgccggtttcaccgcccccgaaggcaagcagatgggccacgccggcgccatcgtctccggaggcaagggcaccgcccaggacaagaagaacgcgctcgaagcggcgggtatccccgtgggcaagaccccgggccaggccgctgaaatcatgcgcgacatactcgccaaggccaacatcgactgatcggttccaaccaatcgtgatgaaagccgtgattcgccaatgggtgcggggagccatagtcgccctcgcatccatggccatctatgccgttgcattaggttgctatacagcgctgatgttattggttgtctccatggaagagggcggcgacaatctcaccgtcggcacaacctcgctgacacaggccgttgtgcttctgagtgagggatcgggctctagaaccgattcgttcaccctcaccatcacgccattgatgttgaccatactgctgatatggctgatcaatgcactcaccatgcgaatcaaagcatacgggccgcatgcgtatgttgccggattgaatgtttggctcgggttgaacgaggcattccggcaatccgtacacctaggtcttgtcgatgaccagtggctggtgttgctgaaagcagccatcgtattctcgatcggtttcctatgcgcagccgtaccggaatcagccaagatgcgagcattcagggactggactcgcaagcaggtgccggcggacatacgccactgcctgaaaatcggcgtcgtcttggccgtcgcgatactgggcatatacctggcaattggattgattaccgtcatcgtatggtcggtacgcaaccatgccgctgtcgtatcgttgttcgaattgtccgggatggaaaccggttcacgaattctcaccaccgtcgccatgctgatctggctacccaacgtcatgctctgggctgtttcctggctcttcggcggcggattcgccatcggtgatttggccagtttcacgttatggctcggccaatccaaagagcttcctgcaataccggcattcggtattctgcccgaaccggtcagcagcgaactatggcgtaccgttgccttgaacgcgcctctcgccatcgctgcgctcgtgggcctgctggctgtattcctgccgcaaggattcgcctgcagaccgttgaatatacggaatgcgtccacccgcggcccagtactggtttcgctgatctactccgccgggtcattctgcctgagcgcgatgctgatctcactggcatccacattgctgttcgctctgtccaatggatcgcttggcgatcatcgtctcgctcacattggcgtcgacgtcatggcctccaccagagtcgtcggtcattcgaccgcattgggatttaccgcggcatggctgctcgcgctgattggcacagcgctcgttttttcgataggctggttggttgggaggatcaatgattcccgcaccaccgccgcgaccccgaagaccgtcatcgtccgtcaggcgcggtccctggcgtcacaaccacaagaatccaaggaggaacaggatgacaaacacgaaccgaccgatccgtcgggcactggtctcggtctttcataaggaaggcatcgaagtactcgcggaagcgttcgtgaaggcaggcaccgaagtcgtgtccaccggttcgaccgccaagaagcttgccgagctgggcgtcaaggtcactgaagtgtccgatgtcaccggattccccgaatgccttgacggccgcgtcaagacgctgcacccgtacattcacgcaggcattctggccgatatgaccaaccccgaacacgccaagcagctcgaggagttcggcatcaagccgttcgacttggtggtcgtcaacctgtacccgttcgccgacaccgtgcgctccggcgccaacgaggccgataccatcgagaagatcgacatcggcggcccctccatggtgcgcggcgcggccaagaaccacgccaccgtggccatcgtcaccgacccggccgattatgcactggtcgcctcccgcgtggccgatggcaccggcttctctctggacgagcgcaagtggcttgcagccaaggccttcgcgcacaccgccgcctatgacgccaccatcaacgagtggaccgccaagcactggcccaagccggcctctctggacgccgtcgaggtggacaaggacgatcagggcactgaagtcgattccgccaagttcccggcccagttcacccgcacctgggatcgtgcgcacaccctgcgctacggtgagaactcccaccagcaggccgccctctacattgacccgctcaaccagaccggtttcgcccacgccgagcagctcggcggcaagccgatgagctacaacaactacgtggacgcggacgccgcctggcgcaccgtatgggatatggctcccgccattgccgtggccgtagtcaagcacaacaatccgtgcggtctggccatcggcgcgaccgcggccgaggcccacaagaaggctcacgcctgcgacccgatgagcgcctacggcggtgtgatcgcctgcaactccaaggtcactcttgagatggccgaaagcgtgcgcccgattttcaccgaagtcatcgtcgcccccgactatgagccggccgcgctcgaactgctgcagaccaagaagaagaacctgcgcatcctcaaggtggccgagccgccgaagggccacgaggccatccgccagatcgatggcggcctgcttgtgcaggacaccgatctgatcaacgccgtcggcgacgatccggacgcctggaagctcgtggccggcgatgccgccgacgccgacacgctgaaggacctcgtgttcgcatggcgtgcaatccgctgcgtgaagtccaacgccatcctgctggcccacgaccaggccacggtcggcatcggcatgggccaagtcaaccgcgtggactcctgccatttggccgtcgagcgcgccaacacgctggccgatggtgccgatcgcgccaccggtgcggtcgcggcatccgatgcgttcttcccgttcgccgatggtgcccaggtgcttatcgacgcgggcgtcaaggccatcgtgcagcccggcggatccatccgcgatgaggaggtcatcgaagcggccaagaaggccggcgtgaccatgtacctcaccggcacccgccacttcttccactgatcgggactctctgaggggagcagctcagccaaaacgcacaaaggtgggattccgcctgacccgtcaacgggtccaagcggaatcccacctttgctattcgcctgctattgtggtcacgtaaccgttcgacagaaggaatcgcaacatgcacaaccatccctatgtatccgaagcgcatgagggcaagccatggtttgaatggtgcgtactcggcgtcgtcgccgtcatcacactgctggttgctttcggatatacgatggccgccacggtcatacttgccgtgacggccatcatcaccgggcttgttcgcctgattcttcaggacaaaagcccatggaaagtgcgctcagtggcgttcgactccttcatcggcatcgccttgggaatcggcctgctgattacctacttcagcttctttggactcttcggcaacatctttttccgctgaatcgccatcagacgaggcggcctgatcgaagaattcgccatcgtcgagcgtgtccgcgttcgcatcggcatccgtctgtggaagatcggcggcagccggcactttgggagtggtcatcatctgcgcgatgatcatgaccaacgccaccacagcggcggccaagaccgggctaatccagaacacccacagctgttgcagcggattttgcgtaagaccctcattcatcgcggccagtgcgataccggtggaacgggcgggattgagaccggcaccggtaaccgggtagctgatggcggcggccagaccataggcaagacccatggcaatgacatgacggtccgaggactcgccgtgatcacccagagaagacatggcggtggcaacgacaatcagagaggcaacgacctcgacgacaatcgccagcgtaatcgagaacgtaatgccatactgggtcagcagcgagtaagacacggagccgttctcgaaaccgttaacggccggagtcagccacactttggcagctacctgctcggatgtgggcagcagcttgaccacggcgaagccggcggcgatggcaccgatgacctgagcgatcacatagaggatgccatccaggattttcgtcttggaaaccagcacggaggctacggtgatggccggattcagctggccaccggacacgcgggagaagatggcggtgactgcggcatatgccaagccggtagccaacgcgaagaacacgatattgatgccatacacggccgaaccccatgtggagaaggcgtaaatggcaaagcacagcaggaagctgccggccaattcggcgcacacgcgcagggccagcggctgttgcttggtttcttccatgattgttcattccttttcatctgttggaagacgggcgaacccg

SEQ ID NO: 3511 - DNA, 7657 bp, Unknown
  R85_18m  MAG No. k141_11562
ccttgcccttctcaaggccgtaggccagagcggctgcggtcggctcgttgatgattcgcaggacgttcaggccggcgatcttgccggcgtccttggtggcctgacgctgggcatcgttgaagtatgccgggcaggtgatgacggcgtcggtgacgggctcgccgaggtatgcctcggcgtccctcttcagcttcatcaggatctgcgcggaaatctcctgcggggtccacttcttgccgtcgatgtcgacggtccagtcggtgcccatgtggcgcttgacggaggagatggtgcggtcaacgttggtcacggcctgacgcttggccacttcgccgacaaggatctcgccggacttggagaaagccaccacggacggcgtggtacgggcgccttcggcgttgacgataacggtgggctcgccaccttcaagagttgcgatgcaggaattcgtggttcccagatcgataccaactgcgcgtgccataatgtgtgctcctttgtgggacttgcgattgcccggccggcgccgccgttcgccacgacctgttcgggttgtgacgcgcggtgtgcgcgagccgtctcgcacgtgttcattctttcgtttttcgcccgggtttcggtcggttccttgtgcggttcctctcggttgtggggtttgcgttcgcaaccgcccattcccgcgcttccgaaacttgagcctacaccactcaactttaaaccgcaagtgcatattcccggattcggcaaaaaacttgagcgattctcactcaggtttctgcgaagcgcggcacacggcacgtatcgcatcacagccaaaagccgccggaaaaccatcgcccgccgggcatcggctcggcgggcgatcgttttccggcggctggacgactcgggattaccggtcggccaaggccgaatcaattgttcctggcgttacgcgcggccttgatgagcatcgcgatcgcaaccagcatcacagccgcgatggcgatggccatgacggcggtaccggtggcgcccagggcgccgaacggaccggagaccgcggaatcgttcggcaccttgcccgaagcgatcacgccgttcttgtcggcgcccggcttcttgtcggcggagccggcggccggcgcctggatggcgacggtcgcgaccttgccggactggcgaccggtgacggtgagcgtgtactcggcgccttccgacatcttgtcgagcgcgatcgaagtggtctgcgcgggcttgacacgcacgccggacaacggggtgctggaatcggacttggacaccacggcgccgttcttgtccttcagctcgtagctgagcagcgcgtcgccgttgaaaccgtcgacattggcgacgtacttgccggcctgcgtgcgggcgaccttcacggtgccgtccttggagagcgcgttctgctcgtcgggggaggtggccaggcccagggcgccggcgatggtgtagaagttatcggtctgatcggtcaggccgatgacgcgctgggcgccggggccggaagcggcgatgcgcagctgggtgccggtgtgctccatgtcgccgccgttgtagccgccttcggcgtcggtggaggcttcctgggcggtgccgtaggagacgaccatgttgttgccgtcggcggacttgagcacggtggacagcgcgtaagccggctgggcgttgaggacctgggaggtgtgcgcatgatcggcggtgacgatcaccagcgtgttcgtgaggtccacgttcttgatggcgtaggcgatggcctggtcgaagtcgtcggtctcgccgatctggccgcaggcgttggcggcgtggtcctgcttatcgatcgaagcgccttcgacctgcaggaggaagccgttcttctggccgttcgggttggcgttgagcagatcgagcgccttcttggtcatgtccttgagcgaggcaccacggttgccgagccaggcgtcattcggggtgcacacggtcgggttggcgtccttggccggatccttggcggtggccttggacgggttgaacttggtcggcatgttgccgtcgctcatcagggcgagcaccggctggccatccttgtactgcagggcgttcatcgcggccgggtcgttctcaacggtctggaagcccatgtccttggcctgctcccacacggtcttgcccttgtattcgccgccctgcacggtctggcggaagtacttggaaccaccgccgatggtcacatcggcgcgggtgtcgagcagctgctcggagatggagccgatgccgccgttctccttgagctggttggcgaggcactgcttggaggcgttgttggaagtgccgtcggtcttgccctgcgggccgtagcaggcacgctcggtggagtgcgattccagcacggccggggtggcgtcctggatttccgcggtggacacgttgccggtggccttgccggcggccttggcaagctcgaagagattcagctgcgggttgccgtagatgtcgacatccacggcgttgttgtaggtcttggtgccggtcgcccatgcggaaccggacgcggaggaatcggtgacgggggtgagcttgcccgggttggggttggcgaccagcttgccggtgccatccttgccgacggcgctgtccttgctgccgtcgccgagcgagaaggtcgtgtactggccggtgcccgcctgcacgtcgtcaagcgcgccgggctgaccgaccgcgtccagaccatcgaagtggccgttggcgcctttcagatagtcgcgggcgacggtgatttccgaatcgcccatgccgtcgccgatgaacagcacgacgttcttcgcgctcttgttgccgatggcggcgatgcgctgcgcggcgccgtgcttggcgagctcggcgaccgacttgccgttggggctgtaggtgccgttcgcggcatcgacagcaaacgccggagcggcgagcgcgccgagcgtcgcgatggaggcgaccgccgcgacggcgctcttcaaagccttgtgattgcccattgttcttccttcttccatgcagtgtcatctgcgccgtccggcccgcacttctccggccgcacccgtttggccacgtccgtcgtcgtcatgccttccagcttcgcggaaccgttccgcacctgcattgcttggatctttcgattccggattccacggtaggcatcacaagccaacgtccggataccgccggaagaacgccggatgaacattcttcgtcgaatcgggccacggcatcatcgccgcatgaaccggcaagccatacacgatccgcacctggcagtacatgttctcgaaaatccgccccgaattccccgaggcggcgttcgtcgccgaatgtgggccgaccgaacgaatcaatgcaggccggattcgacatggacttctacctcgactggcgctgggacggcccccaacgctctccccgcagtcgttcgtcgtgctcggatagcccgctaattgcccaactcaccgaatgtattgcaatcgttgtcaatatgagttacggtaaagacagaacagctcgaacattggtctgtcagattgccggaacctcaacgcagagcggccctcgaacagcaatgcaaacgactagcagtacccgatctgtaagcaaggagtcatcatgactgacgcgtacggcaacgacgcagcgaccagcaccggcaccatcgcagacaccaccaacgacgccgcttccggtgccccgcagcgcgcggaaagcgcggaacgactcgcccgtccgctggtcaagctggccaaagcatgcgggctttccacctcgttcatcgaccagctcggcacctacaccgaaatcagcgacgcggccttggtcgccgtactcaatgccctcgacgtggacgcatccagcgacgaggccatcgcacgctccatgacccaacttgaggtggaaaacagcaaacgtttgctcccctccaccatcgtcgccaccaccggcaaaccgaccggcatcaccctgaactgttcgtcggacgcggacatcaccgtctccatcgagctggaggacggcaccgcgtttggccactttgccctgctgccgcacctcaattccggcaagccggacttgaccatcgctcccgatctgccgatgggctaccacacactgaccgtcacggtggacgggcgcgagggcaaggcggccatcatcgccgcccccgcgcgcattcccgtgccggaggcggtcgccgagcaccagcggtggggctggatgacgcagatgtattccgtgcggtcccgcgaatcgtggggcatcggcgattacggcgatctgaagctgctgctggcggacgcggccgacaagtccaaggccgacttcatgctcatcaacccgattcacgccggcgcgccgattccgccgcttgagccatcgccgtatctaccggaatcgcgccgattcctcaacgtgacgtacatccgcccgcaggacatccccgaatacggcacgctgccggccgatatccgagcgcaggtggatgcgctgcatgattcagtggccgcacgcaacgacgaatcgaacccgatggacatcaacgcggcgtgggcggccaaacgcccggcgctgcgcctgatcttcgacgcgggccgcaacaacaagcgcgagctcgaattcgagcatttcaagaccaccgccggcccagacctcgattccttcgccacctggtgcctgtgcttcgaggtatggggcgcgccgtggggcgagaaccgttggttcttcgagaagaccatcgacgacccggccgtgcgccagctcgtcgaggagcaccacgacctgttcgagttcaaccgctggctgcagtggattgccgccgagcaggtgaacgccgcgcagcaggaggcgctggaccacggcatgacactgggtctgatgcaagacatggccgtgggcgtgcacgggctcggcgcggatgcctgggccaatccggaacgcttcgcctccggcggcgtcacggtcggctgcccgccggacttctataaccagcagggccaggattggggccagccgccgttcagcccacgctatctggaggccaccggctaccaggtgtaccgcgagatggtgcattcgatgtacgagcacgcgggcgcggtgcgcatcgaccatgtgctgggcctgttccgcctgtggtggattccgcaggggctcggcgccctcaacggcgcatacgtgacgtacaaccacgaggcgatgctgggagtactggccatcgaggccacgcgcgccggaggcatggtggttggcgaggatctgggcaccgtaccggattacgtgcgccgcattctgtccgatcacggcgtgctcggcactgacgtggaatggttcaaccgcgtggacgattcgccgaacgccggcgacccgtaccgcgcacccgaggactaccgcaagcaggcattggcctcggtgaccacgcacgatctgccacccaccgccggctacctgaacttcgaacacgtcaagctgcgcgaggagctgcatctcctgagcgagccggtggaggcgttcgccgcctcggcgatggccgaacgcacggccatgatgaaccgtctggtggagaacggctatatctcacagaccgtggcggatgatgtggaaggccatgtgcaggagatcgtggaagcgatgcacgccatgctcaccgatacgccgtcgctgctgctgcaggcagcgctggtggacggcgtgggcgaatgccgttcccagaatcagccgggcacttccagcgagtattcgaactggcgcgtgccgctggcggacagctcaggccacgtggtgcataccgacgaggtcttcgacctgccacgcgtgcagtccctagccgccgtgatgcgccgagagaagcggtgatcgattccgcaatgggaaattggtctaaatcggcttcgaggggctgatttggcctttcccggacatccacttccgcttcaaggggctggcgcccaagtagacccagcgcgagaacggcggaatgacgttggcacaaagtcgtttgcacttgtggtttcaccggcaaggagccccttgaaacggaagtagatgtccgggacaccctaaatcagcccctcgtaatcgagatagccgaagacgacgacttgttatgggcatgttatcgttgtcatgacaatgattgttcgcgacggcgaaggagcgacggcatatgaccaaggcaagcattcaggcagtggcccgcgaggccggcgtttccgtatccacggtgtcccggaccttcgccaagccggatctggtgcttcccgagactcgagaccgagtgatggccgcggccgaaaagctcgactactcagtctcacgctcggccgccgccctaaaatccggccaatcgttccgtatcgcactacttgccagcgagaccatcgccagttggttcaattcgaacatcttcgccggtcttgactcggcgctgcgcccctccggctacgacactgtgccctaccccatgcgcaacgccgccgagcgccacgacttctttgcggatttgcccgtgcggcgcaatgcggatgcggtgattgtcagctccttcgacatcgaatcggctgaggtggagcgactgaagcatatgcacgtgccgattgtcggcatcaacatcccctccaccgatgggttcgacgcaggcgtgagcattgatgattacgccgccacacgttcggctatcgagcacctgattgcactcggccaccggcatatcgcgttcgtcggcagcgcaccgaccgaaaccaatatgcgctacagtaccgaggctcgtttgcagggcgtcattgatgccgctgccgcccatccggggatcgagctaacgcccctgagcattcaacgcggtcttggcgaaagcaacgcggcattgaacgccgtactgaacgcctcccccagcatcaccgccttctgttttgaggatgatgaaatggccgcgcccgtgctgtatcgcctgcgtcaatacgggcggcgggtacctcaggacatttccatcatcggcttcgacgattccaccctgtccgccgccgtgggactgaccacgctgcatcaggacccgttcgcaatgggcgcgactgccgggcacatggtattggatgccattgccggcaagtcaatcgaaccggcattcgtacggccggacactccgctaatactgcgcgaaaccaccgcgccgcctgccgcgacagcagcgcccgcgcaggcgtgagcacgttaccaccgcaaaacgccgataaatcgatttttgcatgcgtaattcacatgatatcgttgtcatcatcaatacaacggttgggccttcacacagcagttcgggcgcgaccggaacaacccaaccacaacgcacccggaacaggagggaatcggcatgaccgcaaataacctcaatgacgactggtggaagcaggccgtcgtctaccagatctacccgcgcagcttcaaggacgtcaccggcgacggactcggcgacatcgccggcgtcaccgagaagatggactacctgaagaacctcggcgtcgacgcaatctggctctccccgttctacccctccgatctggcggacggcggctacgacgtaatcgactaccgcaacgtcgacccgcgcctaggcaccatggaagacttcgacgcgatggccaaggccgcgcatgaggccggc

SEQ ID NO: 3512 - DNA, 8848 bp, Unknown
  R85_18m  MAG No. k141_11695
cttgcgccagaggagttgcctgcggggcttaaaatacgcaccgcctatgccaatcccggcgttatctcgtacctactgttgactgtgattcttaccggttggatgctgttcgcatgactgtcatagccggacccagagaggcgagtcgggagatatcatagattgtctgacgagccgccatcttcgacaaggtattcggtgcccgaaccggcgatggctcgcgccgccatatctttgatggtggaaggtagcacaccctcgcgcgcgaacaccagcacttggccggtcatgccgtaaggagaaaaaccggtgaacttgaccagcggtggctggccctccagtgccacgtcggcggtggctttggttacgcggtcgagaatatccctgctgatcgcggacggatcgccggaggccttggccgtgaattcgagcgtggccatgccttcgctggccggcgtgagcttggtcaaggcggccgtattgagcaccgaattgggaatgaccatcatgtccccggagcgggtgcgcaccacggtctgtcgccaggtgatgtcatgcacggtacctgtgacgccttgaatggtcaccagatcgccgggttggattacgcggcccagcatcaggccgaagccgccgatgatgttggcgatcgtatccttcagacccagcgagatcgccacgcctccgacgccgagggcggtgaccagggtggtcggattgatgccgaacaccggttgcagcaccatcgccgtaccggtgacccagatggtcacgcgcgtgagattcacgaaaatcgaggcgctgggaatctgcgaactatccagaaccctgcgcagcacgcggctgatcacgcggtcggccgcgaacacgacggccagcacgacggccagccagatgagtttgccggcgttcacctgaaaccagcgtgcgatgtcttgtgcatattcggtcatatgccctactgtatcgaccatttctggtgaagtcgtaaacatgcgggcccacgtcgggttttggccgttgcggtggtgccgatggtgcgataccggtggcgtgccgtcggcaccaccggcaccaccgcggcaccgcggtgcagcatcgtcgtggtgatgacgtcgccgtgacgcctagtcccgatgctcgcggcaggtttggccgaggccacgggccagtcgaatcggatcgagaatctcgtccagctgctcggcgggcaggtcggtgcgttcgccggccacctcgcgcacggtacggccggtgtgcacggcttcggcggcgatgtcggccgcgtgctcgtagccgatgtaatggttgagcgcggcggaaatcgacggtgaggactgggcatatgaacgccccaggtcagcattgatttcgatgccttccacgcagttgacgcggaacgtctccatggcgcgcgtcagcaacgccatgccggtcaacagctcgtgcaccatcaccgggtcgaaggcgttcagctgcaactggccctcggccacagcccagttcacagtcacgtccatgccgaagatcgtgaagcagcactggttgacgcattcggggatcaccgggttcactttggccggcatgatcgatgatccggcctggcgagccggcacgttgagatcgttgaaaccgcagcgcggcccggaattgagcagtcgcaaatcgtcggcggccttcttcaggtgcacggcaaggctcttgatggcggccgacgtggccacgtacgcgcccatatccgtcatggcggccaccggatcgggcgcggcggtgaccggcaagccggtgatctgcgccagatgcttgatggcggacttgcggaatcgcagatccgcgcaaatgccggtgccgatggcggtggcaccgaggttgagctgggccagcagcggcaccacgcgatcgaatgcagccaaatcagacttcaacagcgtggcaaacgcatggaattcctgaccataggtcattggtacggcgtcctgcagctgcgtgcggccaatcgtcacgtcgttgatatgtttgtcggccagatcgtggaaggccttggcgagtttcttggtggactcggcgagcggcccgatcgcgtcgataagcgcgagtttgcaggcggccgggtaggtgtcgttcgtggactgcgactcgttgacgtcgtcgttcggatggatgtatgtgtaatcgccgcgctggtggccggcgatttccagcgcacggttggcgatcacctcgttcatgttcatgttcgacgaggtgccggcaccgccctgcatcacatcgaccgggaactgatcggccagtttgccggcctcgatttccaggcaggcggcgcgaatggcctcggccttggccgggtcgatcaggcctaattcctcattggcgatggcgcaggcgcgcttgaccgtggcataggcgcgaatcagctcgggatgttggctatcggtgatgccggagaccgggaagttgccgatagcgcgctgggtgtgaatgccccagtagacgttcgccggcacctccatctggccgatgcagtcatgttccagacgggttttgttcgatgtttcgctcatgcttccatcttcctgtgtgagggctggaaacgccagcatgagaggctgattgcgccttgtgagaaacctcacgcgggggttcattcgacggaaacaatccagactcactggttttcggtcaagcggtgtacccggggaatcctgcggggccgttcgacggtgagatgggggatggcgcggcatgcgtggcggtggcctgcatgccgggggcggccgaatcctgcgcattgtgcacgaagatgcgattccagtaattgagcatgtccttttggctcatggccaggtatatgcccatggccagcacggccacatcttctttaagcaggtctttgatttcgatggcgtcgctcaattcgggccaacgttgcagcacggcgagcatgccgcccacggtgaactcgaccatgagatcggttttcaggtcaaggttcttggggtcgcgttgcaatgtgctgagcatttgcagacggcagaagtcgcgcagcgattcggtcagttcaagcgtgctgtgcgggccggccaacagggccaggcggtcgaggcgctgccgctgctccgggtcggagagcgtggcggtgacgcggtctcgccattgttcctcgggattgccatttgggtcgggggtgcggttgatcggaatcgattcgacctgatgcaggatggctgaatcggccaattcgggcaggctggagaagtgataatagaacgaattacggttcacgccagcctcacgcaccacatcggtgacggtgatcttgcggtagtcgcggtcggcgagcaattcccagaaagcgttctctaggcgttctttggcgggcagcacctcggaatcatggcgtggacgtggcatctcttcctcctgatgcaccagcgtgatatggtcacgctgtctaataacttattgggcagtataactattatttgtggacatgtctatgagctaatcggcgatttcagttgcgtcctccgctgagggcgaagctgcggtgtcagtgtcggtgtcggtatcggcgctggccggggccgcgctatctgttcctgtcgcagttcctgctggggtttcggctgttcctttggcggtcgcagaactcggcgcggaagccggggcgggcgtcggcctgcgtttggccgtggacgccttgaacagtatcgccagggcctcaaccaaatgacgccggtctgcgggggtcagccctacatacgcgccaagcatcgccggaatcgaagcggggaagttgctcatcacctcgctgaagctggtggcgccgttggcgtgcagcacggtgaacagcgcgtccaccgcacgctcgcgctgttcgggcgtaagcgtggcgatccaatggttcagctcctcgttaaacaactgcgagctggaactcaaatccggctcggtgatgaactggtcgccatccaatagccaggtgaaggcggaatgctgcataatgccatccgaatcggaagagaccacgcggcaaggctccggggtctcgaaaatcatgcccacaatcgacgaacttggcacgattttcgtcaccttcggctggatggtgcggtaggcggggctggtcacaatctccggcgggaaaccggggccgtccagtgaatagacatgctgaatgcgcttgcgcaccttggggtcggcgttcatggccgcgtaaatcgccagattgcctcccttggaatggccgaccagaataatcggaccctcccacagtcgcgccaccgtatccagataggcgctggctgaacgttgcgccggcaccggatactggaaagccatattgaaatcttccttccatccgatgagcgaatcatcggtgccgcggaaggaaataaccaacgtgcctttgtaggtcggctttcggcgcttgtggccgtcgggcagttggaaggtggcggcggcgaattgggtttgctcaccctgattgatgtgctcgaccaccgcgcccagacgaacgttggcgtagcgggggttctcgcccgcggcctggaacaggtcgtgggtcaggtccggattgaccactgaaaccatttgggcttcgtgcggcttgtcgtcggcatgcgtttccggcgaacgatgcagctcgcggttggcctcgtcaaggcttaccgattcaagctcgggatgccagatacccttcagccagatcagtggatgcttgggctcgaaagcgcgaatgcgtgcggcgaacgagcctgactgcgtctcatccagcatcaacgtcggacagatactggccacatcctcatagatgagcgtggagatgatcaaggcgtcgatttcattgaacggcaagtcggcgaaggagcgcgtttcggtgtgcgcgtaatcgataatgccggtcatacgcacctcctgcttccgttgatattgcatatccccttgggccatgtggtcttgcgattgcgtgcggccgtgcggctgcgcgcagcaattaaccatatacattccattgtagggattgtacggttttggccggcgcgatcgagcaagactgcaccgacggcgaacaattcgtgggaggattcccgtcagcttgtcgaaaattgtcgggtagcgggggttgcgatgccagccagccgaccaccctccggcgttacgtgccacttcccgccagcgggaggggtaaccactcaatccttttgacgaggcggaccgctggggccgtcaaaggttcggcagattgaagcgggccagatccacgccttcgtggtcgagcagttcggccttgatgtcgagtcggccgccgtagccgccaaatgcgcggcccgagccgactacgcggtgacagggcacgatgatggtaaccggattgcgcttcactgcgcctccgaccgcctgcgcggccatgcggccgccaccgcgtcgttcggccaattcggcggcgagttcgccgtaacttaccgtcatgccatagggaatttcggccaccagattccacacttcatgttggaatggcgtgccggcgggatgcaacggcggcgtctgatctaggccggggcgctcgccggcgaaataggcggtcagccatacgcgggtcatacggaacacatcgggttcacgatcgggttcgcgattcgagtcgagaacggcttggtggtcggtggcccaccaccagtcttcaagacagagctcggtcaggccctcgccgtccgaggccatcatcatccggccgatgggcgtttcgactgtggcccgcatcagttgtcgttgcgtcataccgccattatcgcgcgttgagggatgaagcccataccgtgcctgatttcatgaaggacgggtcgtgctgtacggtcagtattgcgtgctgggcagcgatatctgacatagtgggggttcttgggccggcatgagtgttctttccgacatcccaaccgtctaactccgtttcgaggggctgatttgggctgttccggaggtctatctccgtttcgaggggctcctcatccgggaaaccacaagtataaacggctccgggctaacgtcattacgccgtttttggcccgtgtctactcagccaccagccccttgaaacgggagtagacctccggagaaggccaaatcagccccttgaaacgcagcgacccctctgattggagtcaatcagaggggttcggcacattgctgatgcagctggtccgccgtccgccttgaggcggaacgtaaccaagattcaggcgggattactccgcaacgagcgccaggaaggcggcggccacggcggctgtcgggttcgggaattcctcgtcctggttgaagaacggcacgtcggcgtagttcaggaacttcacttcggcacggtcgccgatcagggccttggcctcttcggccagctgatcggttatcgtcatgcgttcctgatttccacggccatggccgtgccagatgtgcccatcgcttggttctacccgctgtttatgctggccatgcccatcgcctggctgctgtatacggccaccgcgagttatgtgcacggcggcacccgataatcgttggaaaaccggtgggacacgcgggggcttggctttttcctgagattggcgtatctttgtcacctgttgcccgtgaaggtaacacatgcggacatagcttagttggtaaagcgcaaccttgccaaggttgagaccgcgggttcgagtcccgttgtccgctctcggatggctggttcaggatgattgattcagcctgaggatgacccgggcggttggcgcagtggtagcgcacttccctgacacggaaggggtcacaagttcgaatcttgtatcgcccactcgatgaatcgccggcagaatgttgccggttttttcatcacagctcgggcgattggcgcagcggctagcgcacttcgttcacaccgaaggggtcgtaggttcgattcctacatcgcccacccgatatcacgctcgtcagtctatgatggcgggcattttctatatctgccgtgccacggttccttatatggcgtccggcctcgggtggtatttggctgtgagcggtttccgattatgagtggcgtccggccgtcgtgcaatcccgttgcgcgcggtgccgtttgggctgtaatacgggtgctttgaaccggccataacttcttcatatgtcccggggcttgtgtcgtgtgccgcggcgtgcttccatagtggatatggcggtgcggaaggggagccgccatacttacttacttacttacacaaggacgtcttggtccgccagggcaacgcgcatggaaaggggtttgcgatggtgtgcaccacgctgaatttcgcggagaaatacctgctgaaaaccgaagtcaggtccgttgccggtatgtccggcggtacttccgatgctggtactgatttcgatgtcgatttcggtggcgagggcgacctcggaagcgatcatgccaccggtttcaatcgctcgctatcggccgacgattattgggctgcagccggatatgccgatgagtcattgtattgatggacgtgatgacgcggtaagggcgcgtcgataagtgcggctggtgtcgcggctgatgccgcatctggtgctcgttcggtggtcgcggctgatgttccgtacggagcctgcaatggttttgcatcggtggtgcgtcaaaatccggaccgtcgccgacgctgtggacgtttggcggcgttgaaaggacagataatggattgtcaacgccgctgagaacgattggcgacggtggtgggacagcggatgccccaccaccgtcgccaagagtggtacttgtgtcggtggcgtccaaaacatggcccggcaccgacatcagatactctgaacgtcggcggattcccgttctgtgtcccagcgccgacgtttgattcctgcttatgcgagctggcgtcggtaaaaaggcagaacttggttcaccggcgatgtctcagcacgtttgcgcgcgtcggatccttctggagcagcaggaagacgagcgccacaacgagcaggacggcgatggagagcacgccgaacgaggcgtcgccggtcagggacgtggtggtggctaccaggaaggtgccgatgattgaggccgttttagggaagaaacaatagtgagaccggggaacccttgaaatcattggggaatcatggtggcgatgcatgcgattaacacatgttgttaacacagatgtggaatgaggaggcgcgtgaggctcgtggtctgcgacgcatgagtgtgaccgtgagctccccagctgatgagcgcaaaggcagagattggtttcacgcgggacttgtctgccgaagagcggcgattgatgcagggtctgtgcgatgctctgcagcagttgctgaacaagcagtaccagcggcacatgtgggactgttcgatagcctgaaaaattttgccgcagacaatctaggcaatgtgcttggcggggatttcaatctcggttcgattggtgatttgccggcggtaatcggtgagcatttcaatgccgatcagttgggtgaaatcaacaggtcgttggcgaccatttgaacgccgaccgacttgacgagctgcaggcgctggcggaggaaaacatctccgccgaccagatcagtcaggtcgctggcgcaattcaggagcagggtgccaatctggacctcggatccattgccgaacaagcaggactgcccgctgacatcatcagccagatttccggactattgggcaagtagtcgccttaagctttaacgctgacggtgttgtctcggctattgcgtgttttgcggtcgctcagcaaatcatatgggtcgtaggtaaccgattgcgagcgctgctgtacacaga

SEQ ID NO: 3513 - DNA, 11161 bp, Unknown
  R85_18m  MAG No. k141_11974
ctcatgatgtcgccggtgcgtgtgtggttgaagtacgtgaagtcgagctcgtgcagcttctcgtattcgtcggagacgaggcggtagaccgagttctggccgaaacgctccatccacatctggtagccgtatcgcgcgcccacgcggatgatggtcatgaggatcatcagtccgcacagacgtggcagttcgtcggcatgtccgccgacgatgacgcggtccacgatgataccggacagaatcggaatggtcagggccatcgtgttattggcgatgaacagtaggagcgcgcctgccacgcggggcaggtctggtttgcagtatggcagcacccatttgagattgcttgcgctggtatcgattcccggatcgacgtacatgtgaggagatcaccgtttcttggggattgtttgcttatggtatggtgcggcatgctcctgcgccgcacgcggcaatcgctgccgccacgattcacgatcagccgtgcttcgcactgcgcctgtcattggccgcacgaccggagctctccttcaccggtcgaagcacgttcgactttcgcaaacgcgtactagtctagacggcctgcgtccaatcgcaacagcccgcaactctgcgtgttccccgcattagcaacgcggcacggcccgctaagcgcaacattccccggaatgtgtcgcgcgaaacgttgcgcatgcggcaatgcacgctcgagacctgttgcataccagtcgatcaaattatagaatcataattaagtaaattacgattctataatttgcgcgtgtgcgccagggcagacagcaaagcaaggagacaagggccatgttcgtcgggcgagataaggagctttcggcactggaacgccgctggagctcacagcagttcgagtgcgtcgtggtctacggccgtcgccgcgtgggcaagaccacactcatcaaccgcttcctcgaagatcgccccacgattttcttttcggcaatcgaatccagcgcttccaagaatctcgaatcgttaagccgcagcattgctctgtatgaaaagggctcagaggcgttcgagacaacgcccgtataccgcagctttgaatccgcactggaagcggtgttcgcgctggccgcaaagcaacgcatcgccttcgtcatcgacgagtacccatatctggctaaagcagaccggaccatcaattcggtcctgcagcatgccatcgaccgccataaggatgacagtcagctcatgatggtgttatgcggctcttccatgtcgttcatggagcgccaggtgcttgggtatgagagccctctatacggcagacgcaccgctcaaatcaaagtggagccattcggctacgccgatgtccgcaagttcttgccaagatacagcaacgaggacgccgctattgcttacggacttaccgacggtatcccgcagtatcttcggcaactggacgacggcatcagcatccgagacaacatccgttggaacatcctcgacccaagctgctatctgtttgaggagccagacaacttgctgaagcaggagctgcgcagtccggccgagtacaacgccgtaatccaggccattgcctccggggcatctcggtcgaacaccatcgccaccgcatgccatatggaatcgtcctcatgcgccacctatttgcgcaatctcatcgatctgggaatcgttcgcaaggagacacctttcggcgaggacgctcctcgcaagacgatctaccgtatcgaggactcgttcttccgattctggtaccgatatgtgccgaacaacatgtccctcattcaatccggtcatgccgatctcgccgccgaccgtgttatgcgcactatctccgactttatggggcaggtgttcgaagacatctgcgttcagtggatatggtcccataacggtaccgaggcattgcctttcctcatgcttgatgccggacgttggtggggcgccaatccgaccacccgcagtcaggaggaaattgacatcgtggcttcaggagaaaaaccgaaaactctcctattctgcgaatgcaaatggcgcagcgtgccatccggtctgcagcagttggaagtgctgcgcaatcgcgccagactgctgcaccccgaaaccagccattacatgctgttctccaaatcaggcttcgacgagcatgtcgccgcccgcgcggcgcaagacggtacagtgacgcttgtcgattttgcggatatggattagtcggttcactccattgcggacggtaagggtgaagtaacagggctgggtcaatggaccgaacctctaggacgggcaacagacccaatccgcgacacattcccgggaaagtggtgcgcgttacatcacgctcaaacaacccagcatatatatgggcaggtattcggttcggccaacagtctccacgttgccatcatggaacacgtaggcatgggcaaaccgataattgtcggtatccagtaggttgttcatggcccgatgccgcgtatagtccttgcctgatttgatttcaaccagtgaaatatcatccagaccttgctgcacgacaaaatcaacttccccaatacggttctggttgaagtaatgcagttccaatccctgtgcaaacagttcctgagccgctgcattctcgaaaatcgacccgtaattcatactggatcggtgattcacaatctctaagtccacactgcgcatcaaacgggaggtcagcaaaccgacatcgttcatgtacagtttaaacgtgttctcgtcggcatgctccgtcagcgggtattcagggtcctgcacgcgcgaagtaggcaaggcgatacctgcgttcgccaaccaatcgaacgccgtctgcatatgagcgaacctgatattcttgcccaacttggagaacttgaatcgtttgttttccgcattgagctgacttggaatcgcctcgtaaatgctcttgatatgacgacgttccaccaaatcggagacatatttggtgatgtcgtattcataggtatcgaatatggcctgctgagtattgcggaccttgacaatatcggcagaatccacgaatgactgcactgcgtcgggcatgccaccaatcagcagatacttgtaccacaggtcggtgagccgttcatgtagataatcgggaacctcccgtcgatccacataacattcacgcagcgtatcgagagcggactgaggcagccggcatgcagcgcagaactcatagaaattgagcggatacatacgcatcgtctgcaggaagcccaccgggatcgaacgcacattgaacacatcaatgcccagcagggagccagaaacgatgacatccaatcctttggcgccagacaggaatttggtccacgtgagcatgtcctcacacgcttgtatctcgtcaagaaacagcagagtcttgcccggcgtaatttccgtgccggaaagtaccgataaccgcagtatcaggtcttcggtgtccttggccttgcttaccgtttcgaccgcctgaggcatttcgatgaaattcaccttagccacatgctcataatggtctgcaccgaactgctcaatcagcgtggtcttgcccacctgccgggcacccgtgaccaacaagccctgcttggttttacggttcttccaattcagcaactggtcgtatgcatggcgcttgagcatattcccctcctcttttgtggagaatgactgaaaacacgcaggtcatcacacaatcacatactgatatcatcttagcattcacgattttacatatgcaaaacgcactttgaatcacaaaaaacacaagaatagtgagtggttcattcacgttttacgtattgtgagacggaatcggcatctcccgcaacacgtgagataggcggattgtaggcgaaccggcgatacgcgataacccattcgtcggtgccgggaacgttcacgatgttgtggtgaccggtggcatacagcttgtgcgccgggtcctgttcgagcagcacgcgcggtccgcatgacggcgccaccaccaccgatttccgcaccttctccgacccggtcaagtggattgaccgcaagaacagcgtcatcgattcgaccatgctgcgagacgatgacggctggtggtaccgcgcttccaaggacgccgaaatcaccatcgaacgcacgcgcaatccgtacacctccgcctacgaggtgctgcgtaccgacgacgaccagcagtggtcgtacgtggggtcgctgaccgacattctcggcaatggccgttactcctggatgtacctggaaggaccgggattgttccgctacaacgataccgatgtcaagaccatcaacggccgcaagatgcgcttcggtctgatgtgcgatcagtacgccgaggccgccttcaagctgtaacccttaaggcttcaccactacaggccggtcgcggaccatatcccaagtcagcaaccggccgaaccatatctcgcggcttcagtcatccttcatcatcagtattcggtagcggtcctaaatcagctccgccatccggctcataatcactcgccaaccacgggcggaagcagctcccgactatccacagtgggacattggtcagccaatcctgctccttgtaattccgcatcgacgtacggtaaccgcaaatcccgtatttgtcgcacagccacttcaagctacgcttatgacgctcggtaccagctttggcctccaacggaatgattgcgccattacctgcaaagacaaaatcaacttctcccgtactgttcgcattcgaccagtacatcggtgtgatgccggcggccactaattgctggcaaacatactgttccgttaacgcaccacggaattcggtcagcccgccatcaccaaggaccacgcttgcgggagtcagatccagggccgctgccagcagcccaacatcatggagatacagtttgaacgcggaatcatcacggtatgacggcaatggtgccgcaggtttttcgacgcgatacacccgcaacgcaagaccagaatcgacaatctgctgaatcgcggattcatattgcgccgcccgagcgccacgagcgatgtggccaaaaataaatttatgattctcacgcgccagatgggacggaatcgaggaaaacaccaaacgcattttctcactatccacaccggttctgggatgtttggaaaagtccatgtcgtaattggataacaattctttctgcacggcacgcgcatgctgatagccatcttctacaaatgtctcaacgacttcgggcatgccgccaacaaaacagtactgacgaacccttcgctctaaacgttccgcaaatcccccaagtgtctcaatacgctggttccggatgcgttcggctatcactccatcaccgaccgcttccaagaactccacaaacgtcatcggatacatatcgatggaggtgacactgccaaccgggaatgacaggtcttcgtgctgagccatgcccagataggagcccgctacagcgacatggagatccggcatttcctcatggagcgctttcaacagagtcagtaaatcagggatttcctgtatctcgtcgatgcacagcagcgtcttgccgggccgaacgcgaaccccattaaacgcctccatggaatcaagcaacatgtgcaccgaatccacacctgtcaacgcagcctttgcaccgccatcgaacaagttgacataagaaaatgactcgaacttgtcccgacctagcaccttaagcacatgagtcttgcctacctgtctcgcgccgcacagcactatcggcttgtgctccgtcgcttcagcccatgccgacaacctggtatatatatctcgcctgaactccgccatgccgccctccctatcgcataggaccgtacatcacaaatcactgtcctgtcgctccatcataccgcaatacacatttttcctagggttgcaattcgcgtattctacatttttcctagggttgcgattgtccaagattacattttttctagggttagtaatgcagaatactgcacttttcccagggttagtaccctgaccttccctaatcacacggtgttgtaaaggcgagtggggaaggcgtcgcggtattggccgggggtgagtccggggcggcgcttaaagacgcgcatggagtattttgggtcggcgtagcccacgtcgtgcgcgagagcgtgcgggatttttatacgaattgtgttctttctgatcaaccggcaaagcaagcgatggcgcgcgaaatgcttggcgtaatttgcaatcctctaacttcgacgctgtggtgcgggttagggcaacgaaacattacagtagcagcagatggcaaatggttcgtagcggattcatgcacgtcgctgtcatcaagtatccaaggtttcgcactgccactcatcgcgcagaccgtcacgggctcaccggcacaggcgacgctgctggattcaatcatgaccatgatatcgtcggtattgcggctgccaggtggcgtggtacaagataagtacgaccgcaaaaaacttatgattgcgtttggcctgattggtttcgcactgttcggcatatgcgcggccctaggatgggcgggattactcatatacccggtgctgatggtacttgcgatatgcctcggcatacgctcaggcctcctaggaaccacgagcaacacgatgctacgaggcatcgttcccgatcaattgctgcccaaggcgtcaagcctcaatgatggccgcgatgccgccctcgaactcgccggcgcaccagtaggtggcgtattgatcggcggcggtctatggctgccattcgcagtcagcgcgctgctgaatctattggaaaccgcggcggcgatgcggatcacaaaatactggcatcgtggcgggcggaccaatgcggagggccgcgcccttgccgacgatgaggccgatgagaatggcgatgcggccaacatcactcaggccgctgacgagcaggcaacgaccacgacatcatccgcgtcacagtattggcgtgagatgttttccggattccgctggcttcttagcgagcgattcgaacgtcgcctgattttgtcgagcgcgctggcgttcgcgtgcttcaactcgttcctgctgattacggtgctctcgatcggctccgacccatcacatgtggtgtcagccagtttcatgaacgtttctgtgtctgtgggcgtcatcgttggctcgctcatctcttccgtgctggttcagcatgtgcgcggcggcatagtcgccgtatcgttctacgtgctgatgagcatcggcgcgctcggcgcagcgctggctccgtggattcttgcgcgtatggcgtttctggcaatttcgctgctggccctaccggccggcaatgcggtaatcaacggattccaatcattgctcatcaacaaggagcatatgggccgcgtattcgccggcatgggcatgattgagacgattgctgccccggtgatcacatttctgtccggcatcgccatgcaacactggggttactcagtcacgtccgtggctttgggcttgtgcatcgtggcggccgcgatccctgccgtgacaatgagggaactggtcacactgcctaagccggatggctgggaggaccatatccgcaaatccgggctcaccaagttctgacaacaagtaagggcgactatctcccggatttgtgacgctcggcaaccgtcagcgtcacaaatccgggaagaggaaggtggatacggtttcagccgcgcgggcagcaaggtggacaaatcgttgccgggatggaatcgcggcaagtatgcaaaagcctcccattcgcgcgcgacgcataagcgcgcaaacgggaggcttcccaaccgcagcatcatatgcagaaataaggagagtaaggcatatgctgccgcggtcacaccccgccgggaacctgccgcaggccgcgtccggcatcgaaagccatgcagtcgatgcgtgcggccggccgttcccggcgcggtggccatgtcagacgtcagtcagacgtcatcacttctgccagccgatgtcctgcggcaggttgccggcgaagccggacgggccgtagttggccagacccttcttcgcaccgaggtacgaagccgggttggagaccgggatggtgccgtacagcttgagggcttccttctcggcggcgttgacggccttggtctgctcgtcatagtcggagaggttgccggccttcttgacgagctcgtcgatcttcttgctgcccacgtaggagaagttggacgggccgtcggaggtgtacagctgcggggcggacaccacgaaggtcatggcgctcggagcctgccaagccatcggcagcacctggtagttgccggaagacacggtgtcggagaacttggactcggccacgttcacgaccttgaccttgatgccggccttcttcatcatcgcctggtaggcgttggcgagggcctgctgggtggcgttgtcaccgaagaaagtgaaggagatctcaagggtcttgccgcccttggcgtagtagccgtccttgcccatcttgtagccgtcggcctcaagggttttcttggcgttgtccacgttgtacttggcctcggcgggcaggttgttctcgtagcccttctggaacggcagcagcagctcggagcccggctgctcggccttccagttcaggccctggaactgcacgttgttgtaggtgttcacgtcgaaggcctgagtgatggccttacgcacctgcaggtcgtcaagcggcttggacttgctgttgtactccagcacgcgggtcttggtgctgtagccgatgcgcagctgggcgtccttgacggaacggatggccttgatgtcgtccttggtggaggcctccacggcgtcgatctcgccgttctggaaggcgttgagggtggcggtgtcggccatctgcttgtagacgatcttgtccagcttcggcttgttgccccaccacttctcgttcggcacgaaggtgacctgggagtcggagaaggagtcgaccttgtacggaccggcggcccactcgttgtgcgggttcttcacccagccctgggtgaaggtcttcgggtcggcggccttcgggttcaccagagcgccgaagacttcctgccacgggtagtacggggtcttgtaggtcaccttgacctgcttcgggctgtcgccctgctcaacgctggcgatacggtcgaagccgtcggtgctcggcgggttgtagtccgggttggagccgttgttggcttcccacgtggccttgaaggcggtccagtcgatgtcggagccgtcgttccacttggccttcgggttgatgtcgtactgcacgaccatcgggtccttgctcacgagcttcatgtcggtcaggaagtccgggttcaccttaatcggggagccattgacctggtcggtcatgagcaggctgggctggtaccagctccacagctcggacatgtagccggtgttgccgtcggaagacaggtagttccagttcgggccgatttcgacgatggacagggtcagcgtgccgccgtccttgacgttgtcacggctctggtggttgtcgtaacgctcggtgaccttcggcatgggcaggtcgccggtgtacgacgaatcgatgccggccggcggttcggtggcgctcgaggcattgctggaaccgttgccattgcccgcgccgcagccggcaagcagcatggcaagcgccgcagtggccgcggcgagcgcggtcagcttacgtgtcttgttcattgttatttcctcctctatatggttccgaccgtcatgcgaaatggcatgcaacctgatggccgctcggtcgggaagtgtcatacggccgcagcgccgggcgttcgccgcggcagcgggcctgttgttcggcgctcagcttgggcatgagcgggcagcggcccatgaacgggcagccttcgaacgtctcggtggggctgggcacctcgccctgcagcacgatgcgctggcgggtgcgttccgccttcgggtccggcaccggcacggcgctgatgagcgcctgggtgtacgggtgcagcgggtgctcgaacacgtcttcggtgtcgccggattccacgatgcggcccaggtacatcaccgccacgcggctggagatatggcgcaccaccgacaggttatgggccacgaacaggtaggccacgcccagcttgttctgcaggtcctcaagcaggttgatcacgccggcctggatggacacgtccagtgcggagaccggctcgtcgagcagcacgagcttcgggttgaccgacagcgcacgcgcgatggcgatgcgctggcgctgaccgccggagaactgcgtggggaagcggtccacctggtcggggttcagctccaccagacgcatgagttcaccgatgcgttcgcggatctgctctttggagtagtgctggaccttcatcggctcggccaggatgtcgtagatcggcaggcgcgggtcgagcgaactcatcgggtcctggaagacatactgcacggccgaacgcagctcgcggcgcttctcgcgcggaatcttgtgttcgagcttggtgccgaacatctcgatctcgccgtcctgcggctgcttgaactccatgatctccatgagcgtggtggacttgcccgagccggactcgcccacgagcgccacggtctcgccttcgcgcacgtccagcgtcacgtcgtccacggccttgacctcgccgatcttacggcgcaggaatccgccggcggtcagcgggaaggtcttgcgcatgtgcttgacgtcgagcaccatcttgcgttcgtcgcgcgggatgccggcgaacttcgacttggcggcctcggccaccgtgtacacgtcgtggaaggtcaggcccttgtccacgatctcctgggtgcggtggcaggccacgaactggcccgggcggcccggcaccggctccatggccggctcggtggtgtggcatatgtcggtggccagcgggcagcgcggcgcgaacgggcagcccttgggcatgttgaccaggttcatcggggagccaggaatcggcaccaggcggctgttgcgttcgcggtcggaacgcggcacggcacccagcaggcccatggtgtacggcatggccgggtggtcgaagatggagtcaacgtccgccttctcgaccgggcgaccggcgtacatgacgacgatgtcgtcggccacgccggc

SEQ ID NO: 3514 - DNA, 7949 bp, Unknown
  R85_18m  MAG No. k141_12251
aagccaaccacatccacaaggctttcggcgagcgcgtactcatcgacgacctgtccttcacgctgccgcgcaacggcatcgtcggcgtgatcggcccgaacggcgtgggcaagtccacgttgttcaagaccatcgtggggctcgagccgctcaccagcggcgagctgaagatcggcgacaccgtcaaaatcagctacgtggaccagaaccgtgaaggcctggacccgaacaagaacctgtgggaagccgtgtccggcggcctcgacttcatcgaggtggccggcgtgcaagggccgacccgcgcccacctggccagcttcggcttcaagggcgccgaccagcagaagctgaccggagtgctgtccggtggtgaacgcaaccgtctgaacctggccctgaccctgaagcagggcggcaacctgctgctgctcgacgagcccaccaacgatctggacgtcgagaccctggaatccctcgaaaacgcgctgctcgagttcccgggctgcgctgtggtgatctcccacgaccgttggttcctcgaccgcgtcgccacgcatatcctcgcgtgggaaggcgacgacgacaatccggccaagtggtactggttcgaaggcaacttccaggcctaccaggagaacaaggtggcccgactcggtgaggatgcggcccgcccgcaccgcctgcacaagaagcttgtgcgcggctgagatacgccggcattagtgccacaacgcgctttatacgtcgaaagccgtccctcaggggcggctttcccataattgcccccatgactgccccgccccgcatcccataaaatcccacagtcacctacggcaacgcaccggcaacacaccggcagtgcagcagcaacgtagcggcaacgcaccgcataaccaaccgtttaccttccaaacagtctcgttacatttcgctcccggaactcttaacccccaccggatagactgccaaccataggttggaatacgataaccgaatatcgaacacagcagaacaggaatcgaggaacgccatggctcaggcaaccaccgtaactccattggaccatctggtgaaggtgctgaagttgggcgagccttccgcttaccgcaatcacacatacatcaatggcgagagtatgtacttccccactggccgcgtctacggtggccaggtcatcgcccagtcggtgatcgccgcgtccaaaaccgtgggcccttcacgcctgccgcattcggtgcatggctatttcattgccgccggcgatattcgtcaagacctgctgtttgacgtcgagaaccttcgcgacggccgctcgttctccgctcgtcgggtcaacgtcacccaagccgaggggtcgattctcacggccatcgcctccttccaggagaccggtcaggagggtgtggaatttgccgatccgatgccggaaaacctgcccgatcccgaaacgttgacttccgccaaggaactcatgcagccgttcgccgaaaagtcgccgttcgccaatttctatgtcgagaaatcgccgttcgatatccgccacgtgacgccgaccgtgatgctgcgcgcggacaaggattccgccgagcatgattccggcaagcagatggtgtggatgaaggccgatggccacgtcgatgtgccgcaggtcatgcatcgtgcgatgctggcactcggctgcgatcaggtgatgatggagccggtgctgcgccgcgccggactgtcgatttccacaccgggcatttcctatgcgtccatcgaccattcgatgtggtggtatcaggatatcgatatcaacgaatggcatttgtatgtgcaggatacgcctatcgccgcgcacggacgcggactcggcatcgccaaagtgtatgcgcagaatggcgacttggtggcggccatcgctcaggaagctatggttcgcgtgccgcaggaatagtgggaatcggcttggccgatggtgtggtttttcttcttctctccccagtcggctatgcctacggccccctcgtcagagggggcttatcacggattatcttttgtaggccagggctatgtcgctacggcgcttggcttccttgattttcgggttttcggggccttcgttcggcggtaactggcacaaccattcgccgataatgccgatgatcatgtcggcgatgcacaccacggccacgattgcgcactcggtgacggcgtgtgcatagaaatccgcctcgatatggctcaggctcatcacaatctgaccgccataccagccggcgagcgttgcgcccgccaatcccagtgccttagacagcaccagcgtatacaccgcgatagtgggattgatgaagctatgcggacgcttcttggggtcggtattcgcgtatttatgcacttgcagggccaagatcagcacgataacgcccagcacggccagcaatccggtcacaatccaaggcgcaccaatcagcgacagtcccgagctttcgccgtaggaggccagaccgatacccgccaacaggcccagcacggcaccgatcacatactgccaccatggtgttcgccgtgttttcatgtccggcctccttatcgttgcgttgctgtttgctgtttgcgaacggccctcgcgcctgggctgttcatcttgatttggttttcgtcactgccgtgcccggctgttcgaggccggagactggtccgtcaccgtctggtttctagcctaccgttcgtaactggttctgccatcagctcaactgttcgacagtatccagttgtccgatagcaatccgacctgtccggcatccggtgccatggccaaaaggaaggccaccgggtcgccgcccagagaagcattcgggtccatatccagccaaggtgccaataccgacgcatggttacgggccgacggccaaggaatgctgcagttgggctcgtcggaagtcacgccttccatgtcgacaaggtcaaggtcgactgccagatcatgaacactttcgatgctgcccaatacggcaatcaggtcggcgggcggcaacttggtttcgatttggatgaccgcgctcatcgcgtccgggccgtcgaaatggctgacatggtagagcggcgagatgccctgtacctgattgccaggaacactgtcgatggaaacgatggtttcgcggaacagccgttcgacatcctgcgaggtggaatccagcgaaataatcgccttgcgtgagacgggtgccgactccgacgctgatttttgcttgactgcatgcccgccgagcatccagtcttcgctctcgagctgcacggcgttacggtccggtgcggcggccagcaaatcggctacaggcccctcatgggctccggcaagtttggcgttcggattcagcgccgcccagggagccagcacaaacgcgcgctgccaagcacgcggatggggcaatgccagatccggatccgcgctggtgatgccatcaaagtcgataatgtccaagtccaacggcctggaatcccaatgattctcacgaattcgcccatggttcgcctcgatgctttgcaacgcggcgagcaattcgtggctgcccattgtggtttcaagctccaccacggcgttcaggaaatccggcgtaccgtcagccatgccccacgcggccgtgcggtaaagcggcgaaataccggtcacctgtgtgccgagcagcgcgtcaatctcccgaacggcggctcgcaaggtggattccacctcgcccacattgccgcccaaggccaccaccgcgttatggatggcatgctcttcagcagtacgtccattatcggtggcacgcacgcgcgagatggagaccgatacatctgcaaaagccacgacgatgggcgcatgaggcttgtgcacggtgacgtcgatggaggcgacggccggcgcatcggcaaggatcttatccgcgatacgttgggccagacgctcgatcaggtccacatgagggccttcgatgacagccgtgatgtccttggccacacggccgtaatcgatggtgtcgttgagatcgtcggattgaccggcggcggccagatcaaggtgcagggtgacgtccacgacgaaggtttgtggccgttcgtgttcaaaggcgagcacaccgtgggtgccgttggcatgtacgccggtaagtgtgatggtgtccattggtaaggctttctgctcaaatgctcccctcagtcgccttcggcgccagctcccctcgtccgaggggagccaagacctagaagcaaccaaaacagggagccaggggaatcatgcgtattcgcgccaggtgttgccggcgatgacggcggcgcggcttttggccacgtcgtgtacgcgcacggcccatgcgccgtgttcggcggacagggcggacaaggctgcggtcacgtcatcgcgctgggccatgatcggcccatcagcaccggcagcgcccgcctcggtaagcatcgccgagatgaagcgtttgcgggactggccgatcagcaccggatatccggtggcgcggaaggtctcgagtccggtcagcagcggcaggttgtgctcgatgccgggcttggagaagcccaggcccgggtcgatgataatgcgctcaggctttacgccggcggccagcacaccgtcgacttggcgcatgagttcgtcgtgtacgtcggtcaatacaccgtgctcgtagacggaggtgtcttgatcggggttcgcgcccttggagccggcgagccaaccgcgccaatgctgcacgatgtacaggcagtcgtggtcggcgaccacatgcggcagttcggcatccagcgtgccaccggagacgtcgttgatgatctgggcgccctcgctcagcgcagcggcggccacggatgcgcgcgtggtgtcgatggacagtatggcaccggccggaatcaatgtcttgacggcaccggtgatgcgggccagttcgtcggcctcggacacgcgcttggcgccggggcgcgtggattcggcgccgatgtcgatgatggccgcgccggcggccatcatgtcgcgcccgtgttgggccgccttggccgggtccagccacaggccgccgtccgaggacgagtcctcggtgatgttgagcacacccatcaccatggtgtgcgtactgtcatgcaacgcctgcaaatcagtcattatgtttccccttctatgtaggtcccaagtgagctccctatgatgagggagcttagtagacactatttatccaaaatgaggctcatggcttcggctcgggtggccggattgcgcagcatgccgcgcaccgcagaggtcaccgtgcgggcggaagacttcttgatgccgcgcatagacatgcacaggtgctcgcattcggtcaccacaatcacaccacgtgcgcccgcatactcgaccagcgcgtcggcgatctgctgggtcaaacgctcctgcacctgcggccggcgagcatacacctcgaccagtcgggcgagcttgctcagccccatcaccccgtccttggcgggaatatagcccacatgggccacgccgtggaacggcagcaggtgatgctcgcacaccgaatacagttcgatgtccttgaccagcaccagttcgtcggtatccacgtcgaagtgcttctccagcacatcggccggggaagcctgcagaccggcgaacagctcgcggcacgcgcgggcgatacggtcaggtgtttccaccagcccctcgcgctcgggatcctcgccaatcgacttcaggaacagacgtacggcctcgcgcacgccttcctcgtcgtatgtgcgtttctcccgctggcaagactctatatattcgttcatctcatctctcccttgtcattgtccacaacgacgtcggaccggcctgcgtacgtgagaaaccacatgaacaggtcgggccgaatcgtcatcgtgtctactcttccggcttcatgccgaccgagcgcttaaggctttcgggaatctccaccggcggcttgtccgagtcggggcgacggtcgttggacagccacaccggacgaaccggagccttcttgatcggcgcgaagatcgccgcaagttccttctcgttcagggtctccttgaccaacagctggcggaccagctcgtcaaggatctcgcggttgtcgttgatgatggtccacgcctcggtgtgcgcggtctccaccagcttgagcacctcgtcatcaatcacttcggcggtgcgatcggagtacttgcgcggctgcagaccgtccatcacagtggtctggtcatcgtcggaaccccacttgatggcaccgagcttgtcggagaagccgtattcgatcaccatcgtacgggcgatgttcgtagccttctcgatatcgttcgaggcaccggtggtcgggtcgtggaagacgatttcctcggcggtgcgaccgcccatcgcgtaggccatctggtcgagcagctggttgcgcgactgcgagtagcggtcggaggtcggcatgacggcggtgtagccgagggcgcggcctcgcggcagaatcgtcaccttggtcaccgggtcggtgttgttcagggcggcggctaccagcgcatggccaccctcgtggtatgcggtgttgcgcagctcttccagagccatgcccttggacttgcgcttcggtccggcctgaacgcggtcgatggcctcgtcgatggcgcggttgtcgatcaactgggcaccggcacgggcgcacagcaacgcggcttcgttgagcacgttggccagatcggcaccggtgaagcccggcgtgcgcacggcgaccatgtgcaggtcgacgtccggtacgaacggcttgcccttggcatgcaccctcagaattgcctcacggccttccagatcaggggcggccacgcccacctgacggtcgaatcgacccggacgcagcagagcggggtcaagcacgtcagggcggttggtggcggcgatgatgatgaggttggtgtcgttgtcgaagccgtccatctcgacgagcagctggttcagcgtctgctcgcgctcgtcgtggccaccgcccatgccggagccacgcttgcggcccacagcatcgatttcatcgatgaagatgatggcgggggcgttcttcttggcctcatcgaacaggtcacgcacacgggaggcaccgagacccacgaacatttcgacgaagtcggagccggccatcgagtagaacggcacgccggcctcgcctgcgatggctcgggccagcaacgtcttaccggtgccgggaggaccgtacagcagcacgccacgcggaatacgagcgcccagcgccttgtacttggacggatccttgaggaagtccttgatctcctcgacttcggccacggcctcgtcttcaccggccacatcggcgaacttggtggtgggggtctggccatcgagtagcttgccgctgttcttcttgccacccatgccgagcatgccgccggcaccgcccatgcgactcatcaggaaccagaacaaggcgaagaagatgatgaacggcaggatcgaggtgatgaggtagctcatcatgctggtctgctcgatattcgaggtccagcccttttcgagatcaccgttctccacggccttggccacctgtgcgccctgcgcgaaggtgtagtagaactgcacgttcttgccgtagttggtcaccttgccggtgtcggcgtttttcttggtgtagtcgttcttcagcttaaggcggacgacctgcttgttgtccgtgatctcggcgtaggtggccttgccctgattgatcagcgcgaaaccatctttggtgtcaatggtcttcgtgccaccgccggcgaacatctggaacatcagcacgaccatgaccacgagtacggcaccccacagccagggggactgccatatcggccggttctcgttgttgttgcctttgccattgttcccgttattgccacggttgaacgggttggtgaacgggttgccgttgttacggttgttgttcgggttcggattattg

SEQ ID NO: 3515 - DNA, 6718 bp, Unknown
  R85_18m  MAG No. k141_12382
cacacgcacttcgagcagcatgcgcgaggcgccctgacgcttcgcctcgtcgaccagtgcctgaagcaacgcagcggcgatgccttgccgctggtatgccttgcccacgccgatggtcatgagctcggcgtcctcgccgtcgtaccagaagccggcgtagccgcgaacaacagtctgttccgtctcgccaaacacgtcgagcagatatgtgcgggtgggtgcatccagttcctcgcgcaccatgttctcgttccacgcgccacgaccgaacagttcgccttccaactgtgcgatggagtgaaccgcaagatcacgacttacggcagtgatatcaacaatcatcgaatcaacccgtctcacgccttatcggcgccggcatggccgagcacgtgcttcagcgggttcggcacttcggcgtccggccggcgcaggtacaacggttcgaccggcgtatcgggattacggttggcaaccagttccgcatcagtggcaaagatagcgagaccttgctccccttggtccaatacggattcatcggtgatgtcgccaagctgctcgattgcacccagcgcatccgcatatttgcgggccccatgacccacaacatccacgaccacatccacattgctgtcttctggcataagtccgtcgcggtacgtatgaacggcatcattcacgcgctgcgcgatggatgcagggtaatcgatatccatgtcaatcagagccgtcgccacggtttcgccatcgggatcgccaacgagcgggtccgagtacaacgcaaaatagagttgcttgcggcgtgcgtcgtttacggcaagagtgagcacatggcatttatgagtatcgccgagagtgccggctttgccacggcgaatgagattccattgcacctgaggctcaagaacattatggccgataagcgtcgctcccgttgcgaaagccagtgccttggccgtaacgataccggcacgcagaccagtaaagggggctggaccggtacccacaatgactgttgcaatgtcagatgctgggaacccggcctcctcgaccgcgcgcgcgatattgacctgcagtttctccacatgggtgcgcgaatcggtctctacaatgggatcgcgccccacaatgccgaccgtcgagccgaatgaggtgtcaatcaccaacgtgcaacccatgaatcctcctagtcgtaaagcctctagagagtgtacatcgaggagtctataggcgcatggcttactgcagatcgaacgcggcccatcgcttgccgactgggacgaatgcgacggtacgagtgccgttgctggtgagttcgccgtctgatccagcggatgcggcatcggaggaatcgagaggtcgatcgatatggatttcaagtcgttctggcgccaaggcggtggccatttgttcgccccactccataagcaccaccgtgttctcgccggggtcttcaagttcttcgtccaatcccagcgattccagctcgtccaacaaacgcccgatggcgtcctgccccggcgcataggctgagccgcccagacggtaggcatccacatgcaccagatgagacggagtgccgtcggcgaaatgcccgtcgagttcgcgggcaatggtgaatgtaggagacacgatgggttcggtaatgcccagccccgccccgaagccctgggcgaatgtggttttgccggcaccaagagggcctgagagcagcaatacatcgccgccgtgtaccattccggccacacgacggccgagctcctgcatggcctcgctggtgggagccgcaatagtgtgttcgctcataaatacccctttatcgacttttaccgacctttatgactgatgtcttcaatgcagcgttccagcgcatataccgggtcgccaccgtttgttttgctttgctcatccgcccaggcgagcatacggatgcaatgcgcgagtcctgccgaagtccagccgccaagttggcgcatcgcattcttcagcacccacggattggttttcgcttcggcctgggaaatcgtgccggcccgtaccgccgaggctttggcaatggtacggagcttcatggccaacgcgccgatcagcgcgatgggatcggtcccttgttccacagctgcacgcatcatgacgatggcttctgcggttttgccttccacggccttgtctgccacggcaaaaccggtgacctgcggattggcggtcaaatactggttgacacggtcgaagcccatcggattatcgtcaaagtcgaaacacagttgctcgcacatggcggcgagttcgccggttttgccgccgagtacggataccagctgctgtgcggccatcggttcgactctacgaccacgtttctcgaattctccgagcacgaaattgagctgtgcatccggtttcttcaaatccggcacgtcctctttgcgagcgccggctttcaccagttggtcgatgattttgcgccctttgacgccgccctcgtgctggcagatcaccacgctggagccgttcggatccttggcggcctgcttggtgtacgccaccagagcttcggcgagcttgtcgtcggcattctgcaggttgacgagtttgaccacggcaacgtcggaaagcaacgatgggctgacggcttcatcgaaggcatactggtcggccgatgcggcgtcgagttcgatgaggtcggcgtcgggccgcgcctccaacgcctgcgcgcacagtgccttggtgcgcgcgtcgttcaaatacgagtcgcctccgggcaccacggttaccggtgcattcgctgctgttttcgtcatgcccccatctcgccacacaggttggacaatgacctgccggcatcacgattttgccggtgccgtcaagatagtggtattcggctgggattgcgatggttgctgcaccgaataccgcattggctattcggcttgccgccgcgtaaagaggcgtctcgtctcctcacaccagagactgaggcggacgcgccaagcggaaccgaagcgcacgccagacattccggcctcataacgacggacatgctggaggcaacggctgacgaacaccagtagcatgccgataccgatttccgccgccacaatcagcacggcgcccgtaacgccgtctttccatgggatgacggccatcgtgctgccgcccagccacaacgccacccgttccatcaccagcgtgccccatgacgatatccacgcgaatacgccggccagccatggcgtgcaccatgcgcacgtcagtgccatcaatcccgccatcgtggccaatcccacgaacggtgacaccagcaggttcgccggcacggacagcaacggcaattccggttccatcaacacctgaatcggcagggtgaacaattgcgcggccacggtcatcgccatcatctcggcgatgctgtgcggcatcgctcgctcaaagacaccggccagccgccccgcaaacagcacgatacccagtacggcggccgaagacaaggcgaatccgtagctggccgacatatccgggttcaccgccaatacaccgattatcgtccagcacagggcgctcaacgcttgcgtacgccgtcccatcgcatacgccaacgcacctatcaatcccatgatgaacgcgcgggtgaccgaatcactggggaacatcgccaatgccagcagcgcatatactccagagaccagcaacgccgtcagccgccgatcaagcagcatccacatgcataaccgacgcaccagtcctgccaccagtacgaagtggccgccggatacggccatgaggtgcatgatgccggaccggcggaactgattttccaacgtttgcgcatacgtgctgttgaccggcatcggaccggcatcgccgccgatataatcctggccaagcacacccatcgtcaatcccggcaccaacacacgcccctgatcggacaattgttcggtcacggtgaaaaacgcctcctgcatatgtgcgatcgcggcgagatgccacggcggagcccgcacctgcgctaccggctgttttccttccaagagcagccatagcggtatgcgtccatatcgcgcttgctgcaatacgcccgtcaacagatagaccgcgcctcgacgcaactgcccacaatacgattcatcggcgtatacgcgcacggcgactgtggaacgtacgtccgtaccatccacagtgatgccgctcagccgtatgtccgtctgacaatcgtatgtgcgttggtccgaagcgatcacgggcgtcgtcaccgtggccatgacttcgtggtatgaactggattggcgagcttgtgcggaggcaggatcatgccaggcaatggtgtccgacgcgattgccgccatactgccgatgcacgccaccgcaacgcatacggtcaatgttcccgtccacctgatccgcaggcggaaagacaccacgatcatcgccgccacggcagcacatgacgccactgttataggcaatattcgtgtgacaggccattccatgccgattatggtggcgtcaatgccagctccggcatcggcttttacctgaccggtgccgagtccatcagacatcctccatgcgaataatgcgtgcgctcccagactcgccgaccacatcactatggcgatcggcagcatcctccaatcgcggctcccctgctcgcgcagtatccaatccccgctcatccgaccgtcacctgccctcgcatggtcgccaacgtcttggagccgatgcctttgacatccagcagctgatcgactgatgcatacccgccaatcgccgtgcgatgatcgatgatccgctgagcggtaaccggcccaatacctttgatggattgcaattcctcagcggtggccgtgttgaggttgatgagaccatgcgtggaagcgccggcatcgctgccgtccgtctgcatgtgcggagattgcgtggtatccgattcggggttcgctgtggcatcggaatgctccgactgctgcggatccgtgcgtttctcgtccgtggtgttctgcgatggcatcgtctgatctccagcggagccgcccgtggtctgcatggcggtcggttgagacagcatggccatattcatcgactgttggaccagcaatgccaagctgatgccaagggcgacgatcagcagcaatatcacggccaaggcatgcccaatggtgaacgacaatcgcggctgatcccgggtgagtctggctgattcgccgacggcatcggcggaacgtacgccaatcagatccgataacgcacgtttgtcacgggtcgcctgccgcaggccgctctgcgccctttgggacgggtggccggccggacgaatccgtgcatggccgggaggcggcggaggcgtcgtgggccgttccactcgcggttggggcatggcttcgctctgcctgctgaatgcgcgcaaacggttggcggcatggtctgcgcgatggttatgagaaacgcccatgcatccacgctgatggattcatgggcgtttgtccagctgaaacggggtatgtggttctagcttatgaagttatccacaattgaggtggggcgatatcgcacattggctacccctcagtcagctacgctgacagctcccctgacaaggggagcttagatggaatcactccgcgggaacgatggagacgatcttgggggccttgacgatcaccttgcgcggctccttgccgccgagacggtcggcgacggcggccagcgcctgccgttcgaggtcggccgggtcgatgtcgaccggcacttcgagcttggcgcgcaccttgcccttgatctgcaccacggcggtcacggtgtcgtggcccacgtaacgctcgtcggccaccggccacggctcggcggacagggactcggggtggcccagcttgctccacatctcctcgcagatgtgcggggcgatcggggcgagcatcaggaccaacggctccactgcggcacgcggcacggccttcagacctgtcagatggttgttgagcacgatgagcttggcaatggcggtgttcggacgcatgccttccatttccgcggtcacttcggcgatcgtgttgttgagcagcttcagggtcttctcgtccggggtttcctcggacacgtgcacctcaccggtggtctcgtccaccacgttgcgccacagacgctgcaggaagcgcatgccgccgaccacgttgcgggtgttccacgggcgggattcgtccagcgggcccatgctcatctcgtacaggcggaaggtgtcggcgccatagttctcgtacatgtagtccggagtcacgatgttcttgagggacttgcccatcttgccgaattcgcggttggcgtgttcgccgttccaggtgaacgtcggctcgccggaggcgtcggccggcccttccacgacctcgtccgccggcacgtactggccgcggtcgtcggtataggcgtaggcctggatcatgccctggttgaacagcttgtggaacggctcggccgaatccacatagcccagatcgaagagcaccttgtgccagaaacgggagtagagcaggtggagcacagcgtgttcgacgccgccgatgtacaggtccacaccgccttcatcacccgagtacttgttgtggttcgggcccatccagtagtcgaactcgtccttctccaccatgtgcttggtgtcggtcgggtcgatgtaacgcatgtagtaccagcaggagccggcccagttcggcatggtgttggtgtcgcggta

SEQ ID NO: 3516 - DNA, 3630 bp, Unknown
  R85_18m  MAG No. k141_12509
aacgacacgaccgcaccgtcggcgggcattggttcgtcgccggcgagcgcgcgcggcaattcggtgtccagttccggctcctccatgagattcacctcctgcacgctggccttggcatcggcgagagcggcgtcaaggcgtagtgcggccgtggcattgccgccggcggcctcgtacaggcgcacaatcagatcgtcggaaccgtcatcggcgagcttgacccagtccaatacgatggtgccggtgacgtcggcgagcgagaccagcggggccaagtcaggcaactcccctattacagggctgttgagtcgcgccgcctcgtccagcactgcgttcatatcggcgtcagcgaccagagaccatgcgaaggagtgcgtgccttggtcggtgcgtggatcggggtacagcggtgcggacaggagcgacagtcgcaccatggtgccgcggccggcgccgtgcgccgcggcggcgtggatcggactgacgtcggatccgtacgtggaggcgttgaccacagcggcggcatagccggcgtcggcgatacgtacgaagcggtgtgtgcagctttcgaatttggcatcatcgctgcgcgtgttcttgttgatcggacgttcgaccaacccgtactggcattcgtactgcgcgttcaccgcctgcaccgtgaccggcatatccaccttgaggaacttctccacggcatgccaatccacgtcggcggtaaaatcaagactgccggaccccgggcgcaacgtgatgacggtatggatctcaacaccgcgcgcacgggtgacgacgtgaatcgcagccgagccgtcgggcatatcttccacatgctcgaccatggcgtcggtgagcgtatcggcggcgaggaacgcatcacgctggatatcccatgcatcccaatggaatggctcatccttcaacagctcatagcgccccatgcggacaccggatggcacaagttcacgacgcaaagcgagatcgatcagggatgagacggtgccatccgcctcaatacgcacacgaagacgtccgttgtcaagtatgatggcgtttccgtcacgctcgacggaaaccggaatgacagactcttccacagccgttccaccaccgtcacgcacagcccatgaatactgcggattgcttgcatatggcgcaatcacggcatgcttcaccgtcgctatgcctggatcggcctctttaacggcctggccggcagccgcagcgatgtcacgcagacgtgcgatgtcacgcgcgtattcctcgcgtgcctgacggtgcacccatgcgatggcggaaccgggcagaatgtcgtggaactggttgagcagcagggtcttccagatacggtccagttcctcacgaggatagacgtaacctgggttcttgatactggccacggcgcacaggtattcgacgacacgcagcattgactcctcttggcggcaaccacgcttcatatcctgctgtgcggtgagtgtgcctcgatgcagttccaaatacagctcgccatggaagaccggtgtctcgccgcgggcatcgtccacgatatccttgcgcacgcgatcgaacagctgatcaggagtaccgaaatcgattttcggcgcaccggcgagattccgatcgcgtcggatacgcgcggtcatctcacgcgtgggaccgccgccgccatcgccgaaaccgtagagcaggattgcgttgcgggaaagatccttgtccaggaaattgcgctgcgaatacatgagctcgcgcatgctcatcgacgaacagtaggtgtcagagggcgggaaatgcgtgaggatacgagtgccgtcgatgccctcccacatgaaggagtggtgcgggaacttggtggtgtcgttccacgagatcttctgcgtgaggaaccagtcgaatcctgcacggcgggcgatctgcggccaggagccggtgtagccgaaactgtccggtagccagatgccacgcggcgtgacgccgagatgctccttgaaatatcggcggccgaacgtgatctgccgcaccaatgattcgccggaaggaatcatgttgtcggattcgacccacatgccgccgaccgggatgaagcggccctcggcgatgcgcgccttcatgcgctcaaacaaatcgggatgctcgtcttccaaccattcatactgctgggcggaactcatggcataagtgaaatccggatcctcatccatcagggcgagcacgttggacaccgtgcgtgccaccttgcgccgggtttcgcgcaccggccacagccaggcggaatcgatatgggcgtggccgatggcgatgtgtttgattgcgctggaggcggccggttcggcgagcactcctgcaagctccgcccgggcggcggccacggtctcgagatcgcgctcgtcatacaggttcatggaacgctgcagcgccttggcgagctgccagtagcgtgggtcgtcgtccttgagctcacgaatcagcgaggagacggtttccagatccatgtagtaggcgaacacgtcttcgttgaagatggtgacgtccatacgactcagtgtgtatggaaaatcacaggtgccggtggcctcttcgccgagttcggtgggtgagaacggggtggggccttcgacgaatgggttggcggcggcttcgatatagacggtgaagtcgccatgttcatcgagttctacggtgctgctgccgtccgcgtagacgagtggaatccagtggttgcgtgggttcgcggatttgatggcggtgccgtcggcacgatagacaagtccctcggattggaatccggggccgcggtgatcgagccagccgaggtctaccatgagttcgacttttcgtcctttgaccgccgccatgtcgatatggccgttcacctcgaaccatgtggtgccccatgtggtgccccagacgccgggaacgcggaaaggttcgaagggcacttggccgttgcgcactttggctagaaattcgctggagggcaccggttcgccgggattgtggaacgaacgcaaggtgcatgcggcgagtgtggtgtggatatgcggtttgacgcgctgctgcatgacgcggtcgcagcgctccaactgctgattgggcagaagaaacatggagagttctcctttgctgtgtctgatggaaatgatgggtgtggtgacaattgggaaaaccgtaatacgacatacttctgcctcctcatggttcgaggaggcagaagcgtcaggcgagaattcagcgcgtgacgcgcagggtggcgagctggaacgggccgaagtgcagtgtggcgccttcggcgttctgtgtgccgtcttgcagcgcgaccggcaggtcggtggccagatcgtcgccttccaacacgttggtctcatgcaccgaagcgcctgcgagcgccgggcagacgtgcagcgtggcatcggccctgccgccggccgcctcataggcgcgcacaatcaggtcgccggagccatcgtcggccagctttatccagtccaacaccacggtgccgtttgctgactcgatcgaggcgagcggcgctaagtcgggcatgtcatgaagcgtcggtgcgttgagtgcgcaagcggcgtcaagcgcacggcccaccgtggcgttggccaccacggaccagtcgaactc

SEQ ID NO: 3517 - DNA, 6747 bp, Unknown
  R85_18m  MAG No. k141_12516
gatgccgcgccgggaggcaactcagtcgaggttggactgcgtgcctgcggtggcttcgttggcggcttgctcggcttgtgcctggtcgagcttggctcgtacgtcgttgagcaggccctgggcgcgcttggccaaggcctcgccgatttcccattgacgcatcgactggtcaagattgaggccgccggtttccagtgcctggacagcctgaatcagcttgtcgcgcgcctcctcatatggcatctgggcgatgagctcgcgttccttgtccgtcagggacgaggcgggggtgttcttgtcggtgggtgtggtgttctcggtcatcttgttctccttatatatacggtatatatgcgtgaatgcatatggtgcattacgcggttgcggttgcggatgtggcggtggcggtaatgacgccctttttcagggtgacggtgatgtcatccccggtactgacccgcgaagcgtcatccagcacgtggccatcggaggactgcaccaccgcatagcctcgattcaatgtggattgcgggctgagtgcggtcagtgaggcgtgagctcgctcgacggtgagctgggcatcgtccacgatgcgtcgcaggccgatgtcaagccgctgcagggaatcgtcgatcagccgctgatgcggttcgagcatggtatgcggttgggtcaggcttggccggttcgcatatccctcgataagtcgaatctcgttctccacgcgcgaacggacccgcagtcgcatacggtcgatggcaccttcgatgagctgcgactgctcacgcacatccggcaccacgcgcttggccgcatcggtgggggtggaggcgcgcagatcggcgaccagatccagcaatgtccagtcatcctcatgcccgatggaggagattaatggtgtggtgcaggcatacgccgcacgaaccacacgctcatccgagaaaccgatgagatcctcaaacgagccgccgccacgggccacgatgatcacatccacgctcgggtcggcatcgagttgtgcaatggcctgaaccacttcggccgggcattgctcgccctgaacatgcacatggaccaccttgaaggttacggaaggccaacgaaggttcacattggtgatcacatcgccttccgcacgtgcctgaggtgcgcaaatcaggccaatagtcttcggaaactccgggagaggcagtttgtgatcggcatcgaacaggccctcgcccttaagctgcttgcgcaattcgtcgatcatggccttgaggctgccaccggctccgaccttgagaatcgtgtccccgcgcaacgacagcgaagtgcgcttcatccacaggttcggtttgccatgaatcaccacgcggtcgccctgaacgaactggctggccgcggccgcgaacctgccgaagccattgacttccatggcgatatcctcgaagtcgtcgcgcagcgtgatgtaggccgagccggcgcgacgggtattgatctgcgtgatctggccggtgacccacgcggacggccatcgttccacggcaccgtagaacttctggctcagcacacttaccggccacggattttgcgcgctggtttcagcggcgcgtgcaggcagctgatcgatagggcgaggctcattcggcagattgatggtgccctgatcaggcgcgaaagtgccttgacccggctcaaagccagccgaggccagtgaagcggcggtcggtggacggccggtagatgggtagcccattgcagtagtcatgcactccactataagtgcgttggttgatgacggtaaatatttaccgtcgcctgaaaacggtgtgatgatgaatgcgagaaccgtacgaagcgatgtatcagccgatgatggagatggtctggtgcatcagaagaaaggagtcattatggcgaagaaacgggtgctatgaagaggagtgagatatgcgttgcgctgacgattgagagtcgttagtgagctcgctgtgcgacacgcgagcagaaaacagttacgctaatcacacacttgtggttttggcggaaaatagccgaaaaccctataaatagttcgacacaccactgttgagcactagatatagtggtggagatgccgtattcttctagaggttcaaaaaacgacatcaatgtaatttcgtgtggcccacgtcgagtgcggccaaaatgcggaactcaggagagtgttcgccttataggaaaggggtgcccgatgggcgcacaggtgttggaggaaatcgtcaccgataacgagaccaaggtggccgccaaggcctccaccgtgctcgttgagaagcgtgatggtcgtgtggtcgacttcgaccccattaacatcatctctgcggtcaagtctgctttcggtgacctgaacaaggaagtcggccccgaagaagatgccatgatccgtggtttcgccaaccaagtcgaaggcgaaatcaaggggcgttacgccggccccgccaagatcgaggacatccagaacctcgtggagcacgccctcattgacgcccacctgtacgacgtggctcgcgcctacaccaactaccgtctcgacaaagacattcagcgcgccaaggccactgatgtgaacgaggccgtttcccgcttcattaatcatgacccgaccctgattcacgagaacgcgaacaaggattccaacgtctactccacccagcgtgatttgctggctggtgccgtgtccaaggctgccgcgttcaacatgctgcctccagcggtgtccaacgcccacatgaagggcgatattcacttccacgatgccgactactcgccgttcactgcccagtccaactgctctttgccgaacttctgggacatgttggccaatggcttcactcttggcaacgctccgatggcttccccgaagtccatcgccattgcggccacccagattacccagatcatgaaggacgtggcctccagccagtatggtggccagaccgccaaccgtgccgacgagcatcttgcccagtatgccaagaaggattacgagaagttccttgaggaagctcgtgagaccatccccgacggcatgccggttgaattcgcccgtcgtcaggtcgagagcgccaagaagaacgagcccgccaagctgcatttcggttcccgtgaaccgctgccgatggacaccccgttccacaccgacgttgacgaacttgagcaggagcgtgaaatcctcgccaagattcgtacccgcaaggccatctatgatgccatgcagaccatggaataccagatcaactccaaccgtgtgtccaacggccagaccccgttcgtgactgtcggctttggtctcggcaccgactggttctctcgtgaagtgcagcgcgcaatcctgctgaaccgtattcgcggcctcggcaaggaacaccacaccgccatcttcccgaagctcgtctttactgtgcagcacggcgtgaacgccgacccgggtgacccgaactacgatctgaagcagctcgccctcgagtccgccaccaagcgcatgtacccggatgtggtgttctacgagaacatcgtcaagatcacaggctccttcaaggctccgatgggttgccgctccttcctgcagggttggatcaacccggagaccggcaaggatgaagaagatggccgtatgaacctcggcgtggtcaccgtcaacgtgccgcgtatcgccatcgaatcccacggcgacaaggcccgcttctggaagctgttcgaggagcgtatggaagtcgcccatcaggccctccagttccgcatcatgcgctgcaaggaagccaccccggtcaacgccccgaccctgttccgcttcggtgcgttcggtcgtctcggtgccaacgacaacgtggaccagctgttcaagaacgagcgtgccaccgtgtcgctcggctacatcggccttgccgagaccaccgcggtcttctacggcaagaactggattcgcgaccacggctgggatccggaaggcaaggagttcgcgctgtccatcgtcaagcgcatgaacgagctgtgcaagcagtggagcaaagcggagggctaccactattccgtgtactccactccggctgaatccctgaccgaccgcttcaaccgcatggaccgtgaaaagttcggccgtatcgaaggcgtgactgaccacgacttctacaccaactccttccactacccggtgtggttgcagcccaccccgatggagaagctcagctacgagaaggacttcccgtactacgcttccggcggcttcatcaactactgcgagtacccgtgcctgcaggacaacccgaaggcgctcgaagccgtgtgggattacgcctacaacatcggcatcggctacctgggcaccaacaccccgatcgaccactgcttcgtgtgcggcttccagggcgacttcgagccgaccgaggaaggcttcaagtgcccggagtgcggtaactccaacccggacaagtgcaacgtcaccaagcgcacctgcggctacctcggcagcccggtccagcgcccgatggtgcacggccgtcacgaggagatcgcccaccgagtcaagcacatgagcggcgaaaccggtcgtgtgacgctggatgacggcaccactcgcgagtggttcgaagaggccaagtagggttattcgtgagtaggctcccctctctgaggggagctgtcagcaaagctgactgaggggagtccgaagagctattccgaagctcccctcagtcgcctacgacgacagctccccctcaaagaggggagttaatgctttccgcaaggagggaatcatgccggagttgcatacgaccaagcccgaacccaagcgccatgactttgcggccggcgagaccgggcgtggcccctccgtaccctccaacggtcttgccaacgatccgaaagccggtcaatgggatggccggcgcatgtccaagcggatgatcgccgactacaaaaccttcatcgtcaccgacggagaaggcgtgcgcaactccctttacgtctccgggtgccccttccactgcgtcgactgcttcaacgcctccatctgggatttccaagccggccacgaatacacgcaaaaacttgaagacaaaatcatcgaagatctgaaagccccatgggtgcaaggcattacgttccttggcggcgagccattcctcaacactcccgtgctggtgccgctcgcacaacgtatccgccaggaattcggtcataccaaagatatctggtcgtggaccggctacacatgggaagagctcatgcgcctcggagaaacaccagacaagcttgaattgctgcatctcatcgacatcctcgtcgacggccgctacctcaaagaccagaaggactcgctgctgcaattccgtggctccagaaaccagcgcatcctcgatgtgtccaagtccctagaagccggcgaaccggtcatctgggccaagctccacgatcaagaacgagatatccccgaaatctatttgagagaccgcgaagccggcgaaggccaacaggcctcgtagtagcaggtccggaatgccgcactcagcaatatcgtcggaactgttggggaacgcccttcccgtgagcgaaatcaccatgcccggcgtcacgttgggcaggtggtcggactaatattccagaagaagtagccgggcgaagccgtccgcaggtatctgccagccgtcccgaaacggctcatgatgcctgaaggcgcacatacccggaagtcggaattaagaggaacacatggttgacatcgtcactgacgcgagcgtaaagcccgcttcacacccgaagcccctgcgtgtgggattggacatcggttccaccaccgtcaaggccgtggtgcttgatcagtccgattccctgaaagacaccctcttctccgattaccgacgccaccacgccaacgtgcgtgccaccgttgccggtctgctcgtggacatccataagaaactcgtggacctcggacgaggcgacgaaccgattcgcctgtccatcaccggttccggtggtttggcgctcgccgacaacctgcatgtgccgttcgttcaagaagtcatcgctgaaaccgaagccattaataaggaatacccgcaagccgacgtcatcatcgagctcggcggcgaggacgccaaaatcacctacctgaagcccacgcccgagcagcgtatgaatggttcgtgcgcaggcggcaccggcgcgttcatcgaccagatgtccacgctgcttgacaccgacgccgcaggcctcaacgagatggccaagagctacgagaacctgtatccgatcgcctcgcgttgcggcgtgttcgccaaaaccgatctgcagccgctgatcaacgacggcgcggccaagcctgatctcgccgcctccatcttcaccgcagtggccacgcagaccattgccggcctggctgctggccgcccgatccacggtaccgtcatcttcctcggtggcccgctgttcttcatgtccgaactgcgcgccgccttccagcgtgcccttgaaggcaaggtcgacgagttcatcgtgccgaccgacgcccacctgtatgtggcctacggttcggcattgcaggccgacatggattccgacgatcagggccaccatttcgaggcccacacctgcgatgagatcctcatgcgtctggacgagctgaagaacctgccctccaacacgcccaccatgccgccgctgttccccaccgaggccgaccgcgaggacttcaacaagcgccaccacaaggagcacatccac

SEQ ID NO: 3518 - DNA, 45443 bp, Unknown
  R85_18m  MAG No. k141_12903
cgcatcgatgggcacgcacagcgcggacgggctcatcttaagccctctgatgatgacggttgacgatatcgcagctttggagggcgattacccgctcgtactgttgggtgaacgtttgttcggcgtcaacgcgccgcacgtggtgattcgcaatcgcgaaggggccgccggcgcgaccccgttcgatacacaaagccccgtgacgaatcccgtcacggggcttttaccgttttaagccccgcctagtacactcgtcaccatgcgagtgatcggacagcgaatcaaaagaatggcaaccatagcagtgactgccatcctttccgtatccctggcctcgtgcgggcaggccacggacgacaaccgtacggagatcagcgtatggagctgggaaccgagcatgggggaggtcatccgccgtttcgaaaaagccaatccggacatccgcgtgaaatggaccaatatctccggctacggcaatcttaataccgccattcaagacggttacggcacgccggacgtggctcaaatcgaatactatgcactgttgcagtacgcggtctccggccaattgcttgatctgaccgacaaaatcggctcggattattccaacttctttaccctcggcacatggtcgtccgtgcagctcgccggccgtacctatggactgcccatggattcgggcccgatgggcttcttctacaacgaagacgtgttccgccaagccggcgtggacgccaccaagatcaagacttgggatgactattacgaggccgccgaaaagctcaaggagatcggcgcgtatatcgccgccgactcgggcgacggcagtttctatgacgcgatggtctggctcgccggtggtcagccgttccacacgtcggccgacggcaaaaccgtgaccatcgatttggatgaggatgccggcacccaacggttcaccgaattctggcagaaaatgatcgatgaggggcttgttgacaccacctccgccacatggtcggatcggtggaaaagcagagtgggcgccggcaccatcgcctccgtgttctctggggcttggatgccgtcgttgctgctgtccaatgtgccgggcgcggccggtctgtggcgcgtggctcccatgcccacctatggtgggcagcctgccaacgccgaaaatggcggctcggcgctgaccgtgttgcaactgacccgtaagccggatgcggcctatcgtttcgtggactttgtggcgcatgacgcccaaggcattagcgcgcgtgtagacggcggtgccttcccggccgattacgccaccctgaattccgctgattttctggataaaaccacgattaccaatgaccgtggcattgaaatcccgtatttcggcgggcagaagttcaaccgggtactgtcggaggccgccgaggatgtgtcggtcggataccagtatctgccattcgaagtgtatgcgcgcagtgacttcaaatcgacggtgggccaggcatacgagtggtccggcagtttccacgcctatcagcagcgacaggaagccattgagatgggcatgaaggacgaggaaggcaacccgctcgaaccattggagaagcccggcaagaaagtcagtctctccgacggcctggcccaatggcagaaagacctccgagaatacggcctcaatcagggctttacgattaagtagggttttgagtaggtttttcggggagggacggaatcgactgcgctatgcgcggccgatgcctgcacaccgcgttacttcacattgcgcgagtagatgtatgccatgcctttgaagatcaggtctgaatcgtagacgtcgatcatgtcggtgtcgttcttgaaaatgcggctgagccctcccgtggctaccacttggaacggctcatcgatttccttgcggaactgctgaatcgtgcgctcaatgccaccgaggaacgtgtaatacagtccggcctgcatagcagtgcgcgtattggtggccagaatcgactgcggttgcgtgatctccacttccggcagctgggcggtctgcccccacaacgcctcggccccggtgcggatgcccgtggtgatgaagccggagcgaatcgtgccggaaccgtccacatagttgaacgtggtggcggtgccgaagtcggccaccagcaccgggccgccataggtgtggtaggcgccggcgcagtcggcgatgcagtcagagcccaaggttttggggtcgtcgagacgaatgttcatgccggtcttgacgccagggcccaccaccatcggttccaatccgaggaatttgatcagcgaggcgcggaaggaatacatcaccttcggcaccaccgagcagacgatcacatcgtccacatcgtcggccgtgtaatcgctcaaagccaggaactgcgtgatcatcagaccgtattcgtctgaggtgtgcgtcgccttggtggtgatgcggtaggagccgacgatgcggtcgacctccagaaaaccgatcacgatattcgtattgccgatatcgaccgccatcagcatgggtcaggcctccttgttctcgtcatcgacattgctcgcgccgccggaacgcaacgctgcgagccgcagcaacagtcgttgcgcaagcacggttttgtccatcttgtcccaatgctcgatcttcggggtgccggcatcctccgctccggacgtgagcacggtgacaacgttggtgtcggtgccgaacccggcaccggcgtcgcgcagattgttggccaccagcatgtcgcaatgcttggacgtcagcttcttctccgcattacgaatcagatgctcggtctccatcgcgaatccgcacaggatctgcgagccgtcgtcgcgcttgcgttcgccggcccacgccagaatatccgggttggaaaccagctccacggtgatgctgctgcggccggccttcttgattttctccggcgcaatctcggtcacgcggaaatcgcccacggcggcggccataatcgtgatatccgccgccgggaaggcgtcggccaccgcatcgaacatatcctgcgcggtcatgacgcgcaccacatccaccgcatcgggcgcggtcaaggcgactggaccggagaccaacgttacgtcggcaccaaattcggctgcggccgaggcaatcgcataccccatcttgccggtggaatggttcgtcagatagcggaccgggtctagcggctcctgcgttggcccggcagtgaccagcacgcgcagccccttgagcggggaagatgagggagcctggtcatcctgcgcatccgccagcagccgagcggccacttcctcgatgcgcgccggctcttccatacggcctcgtcccacgtcgccgcaagccagattgccttcctccggctccacaatctgccagcccaattcggcgcaggttttcagattgcgctgcgtggccggattgttgtacatatgcacgttcatcgccgggcataggatcttcggcccctcataggccagaatggtggacgtcagcgtatcgttcgccaatccacaggcgatgcgggcgatgacgtcggcgctcgccggggccaccaccagcagattggcccaggccgcatcggccacatgattgatggtcgttggcacggtcggattggccgtcacgtcgccgtgcgcggccggataagcggggaacatcgtggtacgggtgggttgatgggtcagtgaggtgaatgtcaggggagtgacgaagccttcggccgctgtggtttcgataacccgcacctcgtggccggccttggtccaatcggatgccagatgacaggccttgaatgcggcgatgctgccggtgacgcccagaagaatatgtgccatagctgcctcccggccttatgccaaggccgcacgtgtgcccacgccagcgcttcccgcgtcgttgcccgacgatgcgccgcgtgttgtggtcgccgcggaccctccgtcggcgccgcaatccagtatagccattgcctccggcgtgtccggggatatagtagaacgtggtgatcgacccgaatgggcggtcaaccacgcaagataacaacgaaaccatattcgggcgtaagcatgcccgaatacatcagggagtatccatgtcccagaacaatggtgtgcacggcgagtccggcgcaaccgaagacaggaacatcgacggcgcgaatcaagccgccagcaccgacgcgagcctgaacgcgcgcgcgaaatcatcaaacaacaagaagaacggcggcccgaaatggtggctgtggacgctgatcgcggtcgtcgtggccgcggcgctcatcgtgggcgtcaccgtcttcggcgggaaaggcaagggcaaggacgcgaacgcctccgtctcggccagccgatccgacaccgtggccgtcggcctcaaactcgccccggtcaatcttgacatccgccaccagtcaggttcggcccttgagcagatcctcatcggcaacgtgtacgagggtctcgtctcgcgcggctcggacaacaaggtccaccccggtctggccaagagctgggagatctccaaggatggcctgacctacacgttccacctcaacgagaagatgaacttctccaacggcgacaagctcgacgccgaggacgtggcgtggtccatcaacgagctcaaggcccagaagtactacgactacgagcaggtcaagagcctggacaaggccgaggccgtggacgccaacacggtcaggctcaccctctccgcgcccaactcgaacatgctgtggtacctcaccagccgtcccggcctggtctacgacaaggacgccacctgggatcagaagaacggcgcgttgggctcgggtccgtacaccgtggtctccttcgacccgaacgacaagatcgtgctcaaggcgaaccccaagtattggggcaccgagcacaaggcgaggaccgagaacgtgatcgtccggttcctgccggacgagaacgccagcatcaacgccctcaagagcggcgacgtgcaggtgctttcgcccatctccgccacccttgccgatccgttccgcaaggatccgaactatgtggtcaagtccggtgacggttccgacaagttcgtgctcgccttcaacatggccaacgacaagctctccgacaagcgcgtccgccaggccatccgatacgccatcgaccataagcagatcatcgcctcgcgcggcggcgtggacgcccccctcggcggtccgatccccaaggtcgatcccggttacgaggatctgagcggcctgtacccgcatgacgtggccaaggccaagaagctcatggagcaggccggatactccgagtcgaagccgctggacctgaccctcacctacgccaacgtgtacggcaccgagctcggcgaccagctcaagagccagctcaagcccatcggcatcgacctgaagatcaactacgtggagttctccacttggctgcaggacgtgcacgccaacggcaactacgatctttcgctcgtggaccatgccgaaagccacgacttctacggatggaccacgccgagctactacttccactacgacaacaaggacgtgcaggccctgtacgccaaggcgctggaggccacctccgatgacgaggcctcgaagtatctggccaaggccgcgaagatcgtctccgaggacgcgccggccgactggctgttcagctggaaggtcaccgtcgcctacgccaagggcgtggacggcttcccgcagaacctgagccagaccgtgctgcccctctggcggatcacctacaccaagtagtcccggaacccatcggtcgggcgcggcgcgggagtgattccgtggcgcgcccgaccgtggacggcccatccggccggtgacgccacgggcggtggcgagggaatcgataagggaggcgttatgcggttcttgatgcaacgtttgctgctgttcgcggcggcgctgttcggcatttcggtgctggtgttcgcgatgctgcgcatcctgccgggcgacgtggcggtcgtgatggccggcatgaacgcatcgccggcgcgtgtggcggccctgcgcgccgaattcggccttgatcggccgtatgtcgtgcagtatctcgactgggccggagggctgttgcacggcgacctcggcgtgtcggcgctgaccgggcgggcggtgacctcccaggtcggccaacgtgcgacgatcacgttcccgctgatcgtgatgagtctggtcatcgcgctcaccctcggcttgtccatgggcgccgccgccgtgatctcccggtcgccggccgtgcgcggtttcctgcgcgtgctgtccatcgtgggcggcgccgtgccggccctgtggagcggcctgctgctcatcctcctgttcgcacggggcgtgggccttgtcggtctgctgccctcgcaggggttccccgccgctgggtggggcgctcccgggcgggcggtctcgtccctgatcctgccggcgcttgccaccggattcgtgtccggtgcgggcatcatgcgttacacgcgctccattctggaaggcatcgccgatgagggaggtccgatcgatatggccatgtcctgcggcatgacccgcacccaggcgttggtgcgcgtgggattgcggttggcggctccgcaactcgtctcggtggtgggactggcgttcgcctcgatgatcaccggcgtgatggtggtggagaacctgttcgccctgcccggtctgggcgccctgttggtgggcgatgtcggcaaccgcgatctggtggccgtgcaaagcgagttgttcctgctcgccgcgttcttcctgctgatcggcctggcggtggatctgctgcacgcgctgcttgacccgcgtctggccgccggaaaggaggaatgatggttgatcgcaatggtcgatggcgtcgttcgggcgtggttctgggcaccatctggtcccgtggcaccggccgctactcgctgatcgtgctggggttgtggatggtcgtcgccctggtgtcgttgttctggaccccgcagtcgttgctggccaccgacggctaccacgtgtgggataagccgtcgtccgcgcattggctgggcaccgacggcaccggcgcggatgtgctgagctggctgatggccggatcgcgtacgaaccttgccatcgccctgctcaccgttgtctgctcggctgccatcggcatcctactggtcgggctgatggtcgcccgttcttcggcgctcgcttcggcgtcggtcgccgtggtcgacgcgctgatttccatccccaccgtgctcatcgccctgctgctcgccgtgccgttcggcgcatccgcggccgtggtgatcggcgcgtgctccatcggctacgggctgcatctggcgcgcgtcgcccgtccggccgccctgctcgccgcccgctcgggatacgtgcagtcggcccgggcgaacggcgccagcgggttcggcgtactggtcagacacatcgtgccgaacatcacgccggtgctgatggtgcaatcgtcgatgtcggcgggcacctcggtgctggccgaggcgggcctgacctatctgggcgtgggcgtcggcgcgggggtgccgagctggggccattcgctggccacctcggtcaaactcatcaacgtgtttccgttgacggtggtgtggcccggtctgatcgtcaccctggtggtggtcgcgctgaacctgttcggcgacgcgttgcgcgacgccaccgacccggtggctaatcccgcgttgcggcagatgactgtgcccggtgcggttgtgccggtggctaggggagccggtgacactgcggcgcagtccgcagtggcagcgccgaaggagacggatgatgagcgttgaaattcacgggctgaatattgctatcggcggcaaaccgattgtcacggatgtcgatctgtccatcgcggacggcgaacgggtcggcctgatcggttcctccggctccggcaaatcgatgatcgccaagtcattgctcggcctgttgccgcgcgaggccgtgctgtccggcaccatcacgatgggagaaaccgccatcctgtccggagaaaccgccgagtcgcggcatgggcaggaagatgactcaggatctgacgaagaacgcggcgcggcagataggcaccatgttgccggtgaacgcagggttgccacctcgggccacgattccgctgcgtacgccgacgagcatacgcttgccgatctgcgcggccggtatgtgggtacggtattccagaatccggcccatgcgctgaacccggtgatgaccgtggcgcagcagattgcgttgccgttgagactgcactacgatctgaccaaggccgaacgtgctgagcgagtgaataccatgctggacaaggtcggactggaccgtgacgtggccggcacatacccgcacgaactgtccggcggccaacagcagcgcgtgggcatcgccacggcgctgatcacctcaccgcgattcatcatcgcggacgaacccaccaccgcgctcgactccatcacgcaacgtcagatcgtggacctgctgacctcgttggtggacgacgccggcgcatccatgctgttcatcacccatgatttctccgtactcgcgcgtgccaccacccgctgctacgtgctggacgccggccgcatcgtcgaatccggacccaccgccgacctgcttgctgcaccgaccacgccgcaagcccaacgcttggtcgccgccgcccaaaccctcaccctccacacccccaaggaggattcgcatgagtaacagcagtgtgccactcctctccgcccactccatcaccaaatccttcggaccgcgcaccgcacgccaccaagtcctcttcgacgtctccgccgacgtccacgccggcgaatgtctggccgtgatcggcggctccggatccggcaaatccacgctgacccgcattatgctgggcttggaatccgcggactccggcagcgtggaatacgagagccaatccattgtcggcggccgaaaatcgccgggattcgcgaccctgcgccgcgaatcgggactggtgttccaggacccgttctcatcactcgacccgcgttggcaagtcgccaaatcggtggctgaaccgctgagtctgcagcgacgtgatctgaacaacaccgatatcgacgagcgggtggtcgcggctctgaccatggcgggtcttgaaccggcggacttcctgaaccggtacccaatcgacctgtctggtggccaggcgcagcgcgtggtcatcgcccgcgccatcatcaacgagcccaaggtaatcctcgccgacgaaccaatgagcgccatcgacgtggccgcgcgcatccagatcctcgacgccttcgccgctatccgtgaggcccggccgagcaccgccatcatcatggtctcccacgatctcggcgtggtgcagcacatcgccaaccgcatcctcgtgcttcacgacgggcgcgtcgaagagacgggtcccaccgccgaagtgctcggcaacccccaatccgattacacccgtcagctcatcgaggcagcctcgttatagacctttttggctcccctctctgaggggagctgtcgaatgcagtgaggctgaggggagttacgggtgccgtcgtactcccctcagtccgccggcgacacgcgcttgtcgcgggttgtgctatggtgtgaggcatgcagattatctcatgttgttgtcgctaaccgacgcccctgggcgagcggtcagtgacgcataacttgagatggagcattcgaatcgcggcgaatctgccgcatacttttcatgtatccgatggcataagcgtaatcgtgtaatgcgcgagccgtggttaacatgaaaaaccggttcacttttcggattcaccgtacagtgagcgggaatactcgattttcaaaccaaagccacagtccattcgtctgggaacgtcggttcacgaacgcaacgcagcaaaacccccacaaccccagcaacgaaggacttcacatgaccatccacaacagcctcgcagaactcatcggcaacaccccgctcgtcaagctcaaccacatcccgcaggcggccggcgtcaaagccaccatcgccgtcaaagtcgaatacttcaaccccggcggctcctccaaggaccgcatcgccgagcgcatcatcgacgccgccgaacagtccggccagctgaagcccggcggcgtgatcgtcgagcccacctcgggcaacaccggcgtcggcctggccctggtcgcccagcagcgcggctaccgcacgattttcaccctgccggacaaggtttccgaatccaagcgcgcggtgctgcgcgcctacggtgccgaagtcatcgtcacaccgaccgacgccggcccggacgacccgcgctcctactaccaggtcgccgaacgactggccaacacgattcccggcggcttccgcccgaaccagtacgacaacccgaacggcccgctgagccactactacaccaccggccccgagatctgggaggctacggaccacaaggtcacgcacttcgtggccggcattggcaccggcggcaccatctccggcaccggcaagtacctcaaggaagcctccaacggcgcggtcaaggtcatcggctccgacccggaaggctccatctactccgcttcctcacgcgacgaagtccaccagtacgacatcgagggcgtgggggaggacttctaccccaaggctttcgaccggaacatcaccgacgacatcgtgcgcgtatccgacgccgaagcctttgaaatgacccgccgtctggccggcgaggaggcgttgctggtcggcggctcgtccggcatggccgtggccagcgccatcaagtacgcgcttgccaatgatttggacgagaaccagattgtggtggtgctcgcccctgattccggccgcagttatctggagaagatcttcaatgacgactggatgcgtgccaacggctacggcgacatcgtggaacgcaccagcaagccctccctcgccgagcagtaccttaacggaactccctctgatgagggagctgcggatggactccataactagctatcaaaagaatcaataccaacatccgcactaactaaccgcacctgttttaccttcgaatacggaacaatcccgaaaggaacccaatatcatgtccgctgaatacaacgccaagttcgccaacaccgacatcgccactcgcgccatccacgccggccaggagcccgacccgaccaccggtgcggtcgtcacgccgatcttcgccacctccactttcaagcaggatggcgtgttgggcctcaggggaggccacgactactctcgctccatcaaccccactcgcaccagcttcgacgagcagctcgccgccgtggaaggcggcaagtacgcgctgagcttctcctcgggcttggccgccatcgacgtgctgctgcgctccaccatcaagcccggcgacaacatcctgctcggcaacgatgtgtacggtggcacctaccgcctgctctccaaggtgttcgtgccgtggggtgtgggcctcgacgtggtggacatcaccgatctgaaagccgtggaaaccgcattggcctccaagcactaccagtatgtgtgggtcgagaccccgtccaacccgctgctcaacatcaccgacatcgcggccaccgccgaagttgcccacaagtacggcaccaaggtcgcggtcgacaacaccttcgcctcgcccgcccttcagcacccgctggccgatggcgccgatgtggtggtctactccaccaccaagtacatcggcggccactccgacgtggtcggcggtgccgtggtggtcaacgacgaggagacccgtgagaaggtcgccttcctgcagaacgccgccggcgcagtgccctccccgttcgactcctggctggacatccgcggcctgaagaccctggatctgcgcgtcaagcgccacagtgccaacgccctgaaggtggccgaatggctcgaatcccagccctctgatgtgattgagcgcgtctggtacccgggcctcgagtcccacccgggtcatgaaatcgccgcccgccagatgcacggcggcttcggcggcatcgtctccgtgcagctcgcggccggtgccgaggcggccaagcacttcgtggaccacacgcagatcttcacactggccgaatcgctcggcggtgtggaaagcctcatcgaggtgcccgccgccatgacccacgcctccgtggccggcaccaccctgcaggtgcccgccaatctggtgcgtatttcggtcggtatcgagaacgccgacgaccttatcgccgatctcaagcaggcgttggatcgtatctgaccgtactgacggtactggtgtcaccgtattgacggtgccaccacgcttatcggcggactcgctatcgattggtacctacaaaaaatccccggcccacaagggtcggggattttccgttatcgattgaacatggatcgaatcagctggcgttgccgccctgccatccggtggcatccgcaccagccgggcgcaacgcctgaccggaagtcggtgtggtgccatcaacgaccacacgagtgccgatggtggcaaagtcgtacatccacttggcgtcggccacctgcatgttgatgcagccgtgcgagcctgggataccctgctgcacatagatggggtgctcgccccacatgtatgcaggaacaccgtgcagggcctcgccgccgttatagtaggaaatccacggcgtgcctggctggttgtagccttcgccaaccatggtctgcgattcgtacttgagatacacgtagaacgtgccggtatcggacagcatggaaccatcggcggtgggcttgccagaagcgatgttgaacttcttgaccaccgtggtgccctgatatgcagtggcagtctggttcgtcagatcaacatgaacccacttatcgccatttgccgtatcgaagttatgaggcacctcgacctgcttgacatcatatgggctgtctttcacagccacagtggaatcagtggactggttctgctcgatggcggtagccagacgttcgggggcgtccccggcaccagtcacttcaataccatccacaccgagtgtcttatcggcaccaatttccacgccgccttcgtctttcggcgtgatgtagacctcgcgtgtcaccttgggaacggtcagttctttggttacgctgtcactggtgacgtacttggtgatggcatcgcggtcgactaccagactcatggtgccacccgccttattcaccgtgggcttgaggaatgaggcaatggtatcggccgggatggtgacgctcttgttcacgccgttgtccacggtcagtttgaggccaagcttggcattggcgtcaaactgtgtttgctgtgcgctcgcgtcatcaatcggattctttgcagtctgtagcttgaccggcaccgtcgcattttcgcccggggtcgcgacggcctccttgactgcagcattgacaacattgatatccgggcccttgccatcctgacccgcggtgtaatcgaactgcttggtgctcttgttgtagacaacggtggcaatctgcgctcggtcgtcctcatcgaccaggccggcggtgacgaattgttcggcagtctctttgtccctggtggcggtcagagcgatatgcggctgatcgaaaatattgagcttggccacgtcgccggtcttcgcgttcaacagcgcatctacggttttatccgtgtcgacggtgacgccaaggtccttcagcgaggctttgacgctgttgccttcggcggtgaacgtcactgtggtgttattcagctgctgcttcacagtattcgcaagttcttcgcgggtctggcccatgacagagacattgcccaaatgaacaccgggcgcagccttgtcttggaagtaccaacgtccgacgaagaaataggctattaatgcggcaagcaacactgcaaatatggttatgatggcaatccgtgcggccttgccatgtgatttagcggtggtagatgccataacatgttcacccacataggctgtattgtcggcatggttattggtgccattgtcgctttgctgtggcgtggcggtacctgtggccgcggctgcgaacagcccatcggcggccacaggctgcagcaccgccgtctcctgatcgtcaggcgaggagaaggaaaatgtatcgttggccataaaatgccccgtcttagttctctcaaagcggcatatcgtgtgatatgccgggaataacgtttcttgacgcataataatacggaagggctacgtacatcgttacgaggtattccgttatacgatgaaatccatccgcggtcggcctacactggtcgtttatgacagcacatcaggcggcgctggaggcgctcacacgatacttcggctatgactcgtttaggcccggacagcaaggaattgtcgaggctttgcttgccggacacgatgtcttgggcgtgatgcccaccggcgcaggcaagtccgtgtgctaccagattcccgccgcgctcagcccgggtgtgactctggtcgtatctcccttgatttccctgatgcgcgaccaggtcgatgcgctgaacgacctcggtctgccggccgcgttcatcaacaccactcaaactcccgacgagcaggcgatggtgttcgcccaagccgccgccgggcagatcaaactgctgtacgtggccccggaacgcttggaaaccgggcgattccgcgactttgccgcccgtacgccgatctcgctgatcgccgtggacgaagcccactgcgtctcccagtggggtcaggacttccgctcgtcgtacttaggtatcggcgatttcatcgccgggctgccgcagcgtccaccggtgggtgcgttcaccgccaccgccaccgaacgggtgcgtcgggacatcgtgggactgctgggattgcggaatccggccgtcaccgtcaccggattcgaccggccgaacctgtattttgatgtggtcaaactggagaccaaatacaaggccgcatgggtggcgcggtatgtggccgaccatccggacgaatccggcatcgtctactgcgccacccgcaagaccaccgaagcgctcgccgacacgctgaaccagatggggcatccggccgtcgcctaccatggcggcatgtcgccggacgcgcgtgaggtggcccagcgcgacttcatcaccgacaaggtgccggtggtcgtagccaccaacgccttcggcatgggcatcgataagtccaacgtgcgttacgtcatccaccacaatctacccgaatccattgaagcctactatcaggaggccggccgcgcgggccgtgacggcgagcccagccgatgcacgctgctgtggaatgagtcagacatcgtcacccggcgtcggttgctggataacgattatgagaacgagcgattgactcccgaagagcaggagatcgttcgccagtccaagcgccggctgctggacggtatggtcggctactgccgcaccaccgactgcctgcaccggtatatgacccggtatttcggtcaggaattgtcgccgaatgctggttccgcggcgggtgaagacattgcggcggactcttcgcagtccggcagatgcggtgcctgctcgaactgcgaaagcacgttcgagaccatcgacgtgacccgcgtggcgcaggcgatcagccgttgcgtgcatgacgtggggcagcgcgtcggttccggcaagatcgtcaagatcctgcgcggttcgcgggcacaggatctggcatggctgaacccggagcggatgcccaccttcggcatgctcaaggacgtgaacgaggctcgcgtgcgcgacgtgttgagccagatggccacggacgggtacctgtcaatcgccgaagggcgtatgccaatcgtcatgttcggtgcgcgggcggccgaaaccgccgctcccgacttccactatgagatcaaacgggtggaacgcaagtcggcggcggccggttccggtcggagcgggggagtggctgatactgccgattccgccaatgttcccggcgatgcgctgggctcgtatatcccggacgatgacgaggaatcgctgttccagaagctacgcgaactgcgacgcaccatcgcccaggaaatcggcaagccgccgtacatcgtgttctccgacaagaccttgcgcgacatggcccgcatcaagccggttaccaacgcgcaatttctggcggtcaacggcgtcggtcaacacaagctcgacctctacggccagcgcttcatgcaaaccatcgcctcgttcaatgccgggagtgcgtcataacaatctcctatagcgaaccgcggagtatttgcgggcgttcttgggctggcgcgactacgatgactgttcgatacttcatgaccgaacactcagcaagtagaaaggcaacagcatggcagaagacaaggccgaaaagcccgtcgtcgaatcattccagcttgatcacaccaaggtcaaggcgccgtacgtgcgttacatcgacaccgaaacgggccctcacggcgacgtgatctccaattacgatctgcgcctgacccagccgaacgagcaggccatccccaccggcggcctgcacaccatcgaacacaccatcgccgtgctgctgcgtgaacgcattcccggctacatcgactgctcgccgttcggctgccgcaccggcttccacctgctgacctggggcacccactccaccgaggatgtggccaaggcgttgaaggaatcgttggagttcatcgcatacaaggccacatgggatgacgtgcccgccaccaccgagaagagctgcggcaactatcgcgaccacagcctgttcaccgccaaggaatgggccaagcagatccttgaggaaggcatcagctccgacccgttcgagcgcaaggtcgtctgattcgtctgattcgattcaattctgattcggctcccgctggcgggagccgggggcgaagccgactgagggtggctgtcctcaactcggctggactgtccggctcctgcggacggaagccattgtttattagtgtccgtcatgcaacgcggaggggatttcttgtgcctacggcatggtaggttggccgtcagttaatcgccggtcaccgtgccggcaacccggcatgtcggagaggtgagaagtgactcagtcgaacgctgcaaacaaggcgacaggccgccgtttccgccacgccaccatgcgcgatctgccgcagatgcagaaaatctacgcacgcgcacgcgcgttgatggccgccaacggcaaccccacccagtggggcaacgaatttccgcgtgaatcggtgattgaagacgacatcgccaaccagcgtacgatgctgctggtcgacacctgcaatggccacgaacgcattctggcccagttcgccctgtgcccgggcaaggatccgacctacgccaaaatcgacggcgcctggctggacaacgacacctatgtgaccatccaccgcatcgccgcatccggtctggtgcgccacgcggcccgcgactgcatcaggtgggccctgaagcactacggcaacgtgcgcgccgacacccaccccaataacaaggccatgcagcacgtgctcgaaagctccggcttcgcccgttgcggcctgatccagctgctcgaccggccggtcgacaccaccagaatcgcctatcagcgccacgagtggtgagtgtggctgccggctgatgtgctcgtttctgcaccgtcatcggtttctgacggtagaatcagtgtgtgagaagaacacgttgggtcgggggcgtcgtggcggtgcttgcggctgtcatgctgtcgtcgtgcggtggcgtccagtcgaatcccggggtaacacaccgttgccaatccattcaccgcgcaggtgaatggagaagacatggcgatgcctgtcggccgatggagccccatcggccgacaggcatcgaggaagtcaccgtggccggcggaacgcgcggtcgccgattggggcgaatggcttgtgtggttcgctttggtaccagtaggcgaccgtggccacgtcgtcctgtcgttcgaagttgccggcttcctcggtgccgatctgctgccattcgacgcgcaggtctcgctcgaagtagatcgggtcggggatgtgccaacggtataggccgcgggtcacgggggtggcagtgtcccagtaggcgctttcgcgtccggcgaggttctgcgagtagaacgggaagccgaggtatgggccggtgaaggtgcgctcgtacatgcggccgtgttcgtcgaattcggcgaagctccaggcgccgccgaagtagtcctcggcgccggtgctgcaccaggtggggtatttgccgtcgccgtcgatgtagaacttgaattcgccttcgccccaccagcggctttcgagcgcggtgagcgccaggtaggtgccgacgtaggtgccgtgtccttcgacgccatcgagcaccacgtagtcgtgggcgagttcggtgacgcgttggcggcgccactgcgcgtggaagcgcatcgtgtcggccggcagccggtcgtattcggtgtagtcgatttggtagaagaacgcgggcacgtcctcgttgtggtcgttgcgcagcacgatgcgcgcgtgttcgaacggcatggcgaagtagcagttgaagccccggttcgggttgaccatgacgggaattgagttgatggtgcaggactgggcgtgtccgcagcagaagaagtcgccgatcgggcattgcaccgagggggagtcctcgccgtcccagtagaattccaggatcaggttgcgtagcacgtcggggccggtgggggaggtgcggtcggttaccgtcatccagatgtgacgaatcacgccggggccctcgacgtccatcaatgtcaccgattccccggacctcaccgtgctgatgcaggggcttcccttgcgggaggggcccaacgcgctggccgccatggccgcgcggcccttgccgccgtccgggttttcggcgttgatgcagcgggtgcggccgggggtcctcatggccacggcatccaaggcgccttgtccgagccccggcgcggggttcgctgtggtgaatgcgtcgagcatgatgcttacttcctttcctgtcgcaggcccgtcccgccacggcgttttgtctggggtgagccgggctgctgggggggtatttcacggcaccggcggtgatgccctgggagagcttgcgctggggtagtgcccgatatcttgcgcactttggtcttcgcccgtccctgtggcgatgatcggttcgcttcccatacggtctcaccgagtcttgacatgtcgaggtagcggcgcgtcgaccactcgttcgacgtgacatagcgcacgcgtgcgcagacgagcatcaacgcgctgcgttcgtcggggaagctgccgaccatgcgcgtgcgccgtctgatttcgcggttgcgggggttgaccctggcgaggacgttgcgctcgaagcggaccatgcaccgctggtagcgggcatcgcgttcaaggcctcctcgacgctttttctgaccatacggtccagggtggtctccgacatggcctcatatcgcaaaaaccgtacgctgaaagtaactcagcgtacggttttcacgaaagcagccatcggctatcggtcagccgatagacctcagtcctcagtcgcagcgaccttggtgtcagccccggccttctgctcaaggccgagcttggagcgcttgcggctgtagccgaagtacacgatcaggcccagaccgaaccagatggcgaaacgcacccaggtctcccagttgagaccggcgatgagcacgaagcagaatacgatggccagaatcggggtgaccggcacgcccggcgcgcggaagccgcggggcgcattcggctgggtcttgcgcatccatagaataccggccgacacgatgatgaacgcggacagcgtaccgatgttcaccagctcgaacagcacgttgatgttgatgaagccgccggcgaacgcggtcagcagaccgaagaaccaggtgcccttgaacggggtgcggtacttctcgtgcacgtggccgaagaacttcgggaacaggccgtcacggctcatggcgtagcagatacgggactggccgtacagctgtacgagcatcaccgtggtcatgccgatgagggcgcctaggttcacgatcaccgcgagccagttcatgccggtctccagaatcacgccggccactggggcgtcgatgtacttggcgaactccttgtagggcaccacgccggtcatgatcatggtcatgacgatgtagagcacggtggaaacggccagggacagcaggatgccgcgcggcagtgtcttgttcgggttgatggtctcctcggcggaagaggacacggcgtcgaatccgatgaagctgaagaacacgatggatgcggccggcacaatgccgtacggctgggtggagccgggctggaaagtgtagatgccgtacggggagaacggctgccagttggacggcttgacataccacacggcgcacacgatgaacagcacgatgatggcgagcttgatgagcaccatcacgtcattggtgcgcttggtctggttgatgccgatcgagagcacccacgtgatgatcagcacgatgacgaaaccgggcaggttgaagtaggtggtgacgtccgggttggtgccgtaggcggcggtcagctcgaccggcaggtgcagtccgaagccttccaacaacttgttgaagtatccggaccagccggcggacacggtggccgcctgcagagcatactccagaatcagatcccagccgatcacgaaggcgatgagctcgccgaacgccagataggcataggagtaggccgagccggacaccggtgccatggcggcgaactcggcgtagcacaggccggcgaaaccgcagcagacggcggccagcaggaacgatacggacagggccgggccggcggtgagcgcgcccttgccggtgagcacgaagataccggtgccgatgatcgcgccgataccgagcatcgtcagatcgaaggtgcgcatcgtgcgcttcaggggagtggattcggcgacaagctgatccacgcttttcttacgaaacagatccatgttcttctctcatgaaacttaagatatggggctagaccggacggatttccgggatcccggcacgcctcaacgccgggaatcaaaggcggcttccgagaaaccgcatatcggtcattagtgtacgactgccgggcgaaaacaaacgattatgaccacacgtcacattcctgcgcaacaataggtgcctatgagcatgaacgcagcacccgaaatcgcattctcgtccgagcagggcaaggccaactatgcggccacccgccgccaataccccgcacaggccatcgtgaacctcaaaaccatgcgcgacaacatggcccacctggtctccgtggtcggcggcccgaactccggcacggcggtgatgggcgtggtcaaggccgacgcatacggccacggactgctgcccgccgcactggccgcgctcgccggcggcgcgacatggctcggcaccgcgcaatcgcatgaagcactgctgctgcgcaaactcggcatcggccccgaccgttgccgcattctgacttgggtctacaacggcaccgaagtgccattcgatgagctgatcgctgccgatatcgacgtatcggtcggctccctgcccggcatcgatgccgtggccgccgccgcacgcaagctcggcaagcccgcccgcgtacacgtcaaggtcgattccggcttcggtcgcaacggtttcacgccggctggattcgacgccgcgctcgccaaactcgtgccgctcgccaaagagggcgtgttgcatattgtgggtcagtggagccatctcgccgtggccgattcgcccgatgtgcccgaattcgtgtcctccaccgaccgccagatcgaaacattcaaggacttcacgcgccgcatggaacaggccggcattccgccggagatccgtcacctggccaacacggcggccactttggaccgcccggagattcacttcgaacttacccgccccggcatcggcctgtacggctacgagcccgatcccgcgatgggcaccccgcgcgactggcatctgaccccggccatgcgcctgcaggcgcagctcggcacggtcaaggatgtggaggccggccatggcatctcttatggccgcacctacctgaccccggacaacacctcgaccgctattgtgccgctgggctacgccgatggcatccaccgctccgcttccggtttcgatatggaaggtgccaagcacgtggagaagccgggcggcccggtgcgcatcatgaccactgaaggtccgaagctctaccgcgtgtgcggccgcgtgtgcatggaccagttcatcgtggacctgcacggatccgccgccgaactcggcgttcacgagggcgacacggtcgaactgttcggcccgggccgcggcgaggattacgttgagcctaccgccgacgattgggcccgcgccgccgacaccatcagctacgagatcttcacctgcctgcgcaaccgcatcccgcgcctttacgagcatgccgccgaagtactgcccgccgccgacctcgccaagctcgaccccgccacgctgctataaggtgcattaccgccatacggtggcaccccgtaatcccttcttcccgaatatgtgccgttgacatgtgctgagcgtcacatattcgggaaatcggccccaatctcccgaatatgtgccgttgagttgacgtcagtggcacatattcgggaagtcgggattactgcggccgatatgtgtgcctatgcttggcatatggaaacaacgttggatggggaacaggtgctgagcgatgagggctacaacgccttcgacgaggagcgatgggcacccgagccgcccaaatccaagtcgcgcacggctttcgaacgcgatcgcgcgcgactgattcattcgtccgctttgcggcgtttgggcgcgaaaagccagattctgattgccggtaccgacgatttcgcccgcacccgactgacgcatacgctggaagtcgcccagatcggtcgccaaatcggcgcattgctcggctgtgatccggacgtggtcgactgcgcctgtctggcccacgaccttggtcacccgccgttcgggcacaacggggagcgtgcgctcgccgacatcgccagcaatatcggcggcttcgagggcaacgcacagaccatgcgtatcctgacccggctcgaacccaagatctttcacccggacgggcgttcggccggtgtgaacctgacccgtgcggccttggatgcggccgtcaaatacccgtggaccttggccgaagccgaccgacaccccaagggggagcggtcgaagaagttctgcgtctacccggatgacgaaccggtgttccgctggctcaaaatcggcgcgccccaggccgccaaacccatggaatgccagatcatggacctttcggatgatgtcgcctactccgtgcatgacgtcgaggattccatcgccaccggcgcgttcgatccgattgtgctcgccgatccgaagatgctggaccacatcatcgagcagacgcgcgcatggtatggggcgaagtgggatgccgacaagctgctggccgcgttcatgcgattgcgccgagagcatttgttccctgcacatttcaatggttcacgcgaatcgttggcacagctcaagaacatcacgtccgatttgatcggtcgcttctgctggtcggtggaaaccgccacgcgcgacacgtatgggcccgggccgttgacccggtattccgcgaacatcgtgattcccgaggacacgaattacgagatcgtggcgttgaagggcatcgccgtgtacttcgtcatggcgcctcgcgagcgcgagccattccatcaggaggagctcaagatcgtatcggatttggtcgatgtgcttatggccgattcgccgctcccatccgacgctttggaaagccagttcctggccgattggaatgaatccaccaatgacaacgagcgcctgcgcgtcgccatcgatcaggtcgcaagcctgaccgacaactccgctctggccctgcactccatcttgtgctgagggcgtgttggacgggtgcttccctcagtctcgctgcgcgagccagctcccctcgggtgaggggagctgtcgctgtaggcgactgaagggagtttcgcggaagaaatgataaccgacggtaaaaatttaccgtgtctcaggtgaggcggtactctagagacttatggtcggaatgattaagaaagaggatgtcgagaaggtgcgcgccgccgcggacctgtatgacattgtatctgcgaccgtaacgcttaagccctccggcaccggcaccttcgtgggcctgtgcccgttccacgacgagaaaaccggcagcttcaacgtgcgcccctcactcggcgtgtggcactgcttcggctgcggcttgggtggcgacgtattcaaatacgtcgaacaatccgaaaacatcgacttccgcgaagccgtggaactgctcgccgacaagtaccatatcgagctgcactacgagaacagcggcaacggcccgaaccgcgagaacaccggctccaagcgcacccgactgctggaagcctgcgaggaagcccaacgcttcttcgtctcccagatcctgaccaaggaagcactgcccgcccgcaagctgctcggaggccgcaacttctcccaagccgactgcgaacgtttcggttgcggctacgcgccccaaggttgggataatcttgtgcgccacttggcctccaaggggtttacgcagaaggaaatcctcgacgcgggcttggcccgccaaggccagcgcggcatctatgactatttccgcggccgcgtgacgtggcctatccgcgattcgaccggccgcacgctcggcttcggcgcgcgcaaactatacgaagacgatcagatcgccgccaaatacatcaacacgccggacacgcagctctaccgcaaaacccaggtgctttacggcatcgatttggcgaaatccgccatcgtcaagaagcgacaggtggtgatcgtcgaaggctatacggacgtgatggccatgcacttggccggcattgacaccgccatcgccacgtgcggtacggcgttcggcgccgagcacgccaagattgtgcgccgcctgatcgccgacgattcgctgggcgcggtccagctggtcgggccgttgaaggtcaaggaccagccgttgagctcgcgcatcgtgttcacgttcgatggtgacgccgccggccagaaagccgcgctgcatgccttcggccttgattcggccttcctctcccaaaccttcgtggccgtggccgacgacaatctcgacccgtgcgacctgcgcatcgagcgaggcaacgaagcagtgcgttcgctgatcgcccgcgccaaaccgttgtatgacttcgtgatcgacgccgccatcagccggttcgacctgacctacacgcccggccaagtgggtgcgatgaaagccgtggccccgctggtggcgcagattcgcgaccgctccctatgggacgcttacgcgcgcaagtccgcgggccgtatcggcgtggatcttgaggtgatgcgccgcgaggtgatgaacgcgcgccggcagatgcatgtacgcgatgaggacgcctacgcgcccaaacgtcgattcgagcgtgacgagccgcgtgtggaacccggcaccaacccatacgccaatccggccacgcgcaaggcgttggagcgccgtgacgccgccgaacaggcatatttcaagatcgacgacgccgtattcatcgccgaacagcagttcatggccgtgctgattcaggtgccgcgcgccatcgaccgcaccatgttcgggcagctgaccatcgaccatttcatgacttcggtgttccgcaccctgttccaggcgatcgcggccgccggcggactgccatccgacgataccccgcaggggctgtggatgcacaacctcaccaaggccggcgggccgatgctgaatcaggtgatcaacgagctggccgtcatgccgttgccactgcctggcgacgacggtggtaatggcgcacaacctccgcagtcgaacgtgcctgggggagtcggcggtggtgccgccgcagtacagctgcgtcctgccacgccggaggagcagcgctacgccactgagcttctcacccgattgttggacatgggcttcatgcgccagatcggtttggccaaacgccgcatggcccagctgcccgacggcgaagagaagataaccctcctcggccagatcacccgcatggaaaccgcccgtaaagacctccaagcccaaatctacggcaacaccgtcggctaatacctcccactgattgcgcgcatcttcgaatacgtgccggatgcataaggccatacaaccggttgccggattggatgggtgcagaagttgcggattggccccatccaaattggactggtttgggtgggccaatccaatccgttcaataatgaagcgcgataccaagcagcgtcgaacgaagggaaactcatgacgcagaatcgtgcggaactcaaccgtaatctggcccagatgctcaagggtggcgtgatcatggacgtcaccacgcccgaacaggcgaaaatcgcgcaggatgccggcgcgtgcgcggtgatggcgctggagcgcatccccgctgacattcgtgccgccggcggcgtctcccgtatgagcgacccggccatgatcaagggcattcaggaagctgtctcgattccggtcatggccaaggtgcgcatcggccacatcgccgaggcccgcattctgcaggccatcgacatcgactacatcgacgaatccgaagtgctttccccggccgacgacgtgtatcacatcgacaagaaccagttcgacgtgccgttcgtgtgcggcgcgaagaacctgggcgaggcgctgcgccgcatcgccgagggtgctgccatgattcgtaccaagggcgagcccggcaccggcgacgtgattcaggccgtgcgccacatgcgcaccatgaacaagcagatccgcgagctcgtggccttgcgcgacgacgaggtctacgaggccgccaagcagctggccgtgccctacgacctggccaagtacgtgcacgacaacggccgtctgcccgtcgtgaacttcgccgccggtggcgtggccaccccggccgacgccgccctgatgatggagctcggtgccgaaggcgtgttcgtgggctccggcatcttcaagtccggcgacccggccaagcgcgccgccgccatcgtcaaggccaccgccaactggcaggacgccgatctgctcgccaagctgtccgaaaacctcggcgaagccatggtcggcatcaacgaggacgagattcagaccatcatggccgctcgcggcgagtgacgggagtcgaagccggagaggacaacatggttgtagctgttgaatatatttccaaagaagagtccgcggacgtcgaaaacgtcaagcacggcgtgaccggcatcctggccgtacaaggcgcattcgccgaacatgcggcggtgctggacaagctcggtgcgccgtggaaactgctgcgcgcggccgaggatttcgatgaatccatcgaccgcgtgattctgcctggcggcgaatccactacacagggcaagctcctgcattcgaccggactgttcgagccgatcgccgcccacatcaaggcaggcaaaccggtattcggtacttgcgccggcatgattctgctggctaaaaagctcgacaatgacgacaacgtctactttggcgcgctcgacgccgtcgtacgccgcaacgcctatggtcgtcagctcggtagtttccaggccaccgccgattttggtgcagcggatgatccgcagcgtatcacggacttcccactggtatttatccgcggaccgtacgtggtgtcggtcggccctgaggccacggtcgaaaccgaagtcgatggccacgtggtgggcttgcgtcaaggcaatatcctggccaccgccttccacccggaactcacggacgatacccgcatccacgagctcttcctgtcgctgtagtcgattcgtctgccgctagactggtatccgactgacgaatcaaggagacgatctgccatgcagcttgagctgaatcgacgcagcaaggtgccgatgtaccggcagctggccgccgggctgcgtgaacagatcgtctccggcgcgatggccgagggctaccgcctgcctcccgaacgcgagctgtcctcgcgtctcgaagtcaatcgcaccacggtgttgcaggcgtatcagcagctcaaggacgaaggtcttatcgcctccaaagtcggcaaaggcacgttcgtgctgccggctgcctccgcaagccgaacaccgcacacgtcaaacagtgacttcgggaatgcaataacgcgaacaacacgatcgtcggcagaaatgggaacatcgcaagcctcctcttccggcgacgtagaacgtgctacctccactggtttcttgacgacggaccagggcagcagctctgcggcggtccatacgattcgtgaaagccgctcggttcagggcccggagccaaccgtcgtgcgtccgccatggtcggtgttgttctctgattattccaaccggtttacctaccatgacatcgcctcggccgagcgggcgcagcgcggcgacaccattattgacttcgccaccggttcgccgaacccggcggatatcccggacgatctgctgcgcaaggtgagcatcgaggcgttcgaatcgcgggaattcgacggccaaccggaatcacctatcgagggattcgaagagttgcgtgcgctgcttgccgaacatatgcgcgcacgaggcgtacaatgcggcgtccgcaacgtgatggtgctctccggctccgagcagggcatcgacctcatcgtgcgcgcgttcatcaaccccggcgactgcgtgctggtcgaacaatccacgttcttcccggcattgcagaccttccgctcggcggatgcgcgcatcatcggcgttccagtggacgagcacggtatgcgtacagacctgttggatggctattgcgcgcgattccggcccaagctcatctacaccgtcccgacgttccaaaaccccaccggtaccacgctgccgcccgaacgacgcagcgaactcatcgacgtggcgcggcgctatcagtgtctgatcgtggaagacgatgcttacggcgatttgtggtacggcggggaatcgtccgacgcacatcgccccataccgcttaagggcatggagaatgcgggatacgtgatgtatttgtcgacgttctcgaaaaccgtcacttcgggcctgcgcacgggatgggttgtggccgacccgcatgtgattaaccggctggcggctctgcggcgcatggtcgaccagcatacgagcacgtcatcgcagcgcatctgtctggaactgcttaaagaaggccgcatcgccgaacatttgcgcggtttgatcaagacttaccgcattcgacgagatgcggcaatcgcagcattggagcggtatgcgccggatgaagtgtattggaccgtgcctgcaggcggctactatatttgggtttccttaccggacggcgtgcgctctctggatgtattggaatcctgccgttcccaaggcgtcacgttcatgccgggcagcgtgttcgacgttgacgaaatggatgattcccacatccgtctcaactttgtgcgcccggatgctgctgacattgataccggcattcgaatcattggcgagacgatagcacagatgtagccaagtgactggctcattgcggttgtcgagttttttgatggctgcatacccacatcgatgggtgcattcgacgaataaataagcgaggaagccatcatcagttcgctgtggcatgcgcatagtgttgtagggcgaacggggcagaccacgtggtcgttatgtgacctggccgatcgagccggcatcgcattgcccctggcgtagcgacgtaacaacgcagcaacgagtcgcgtcatcgcgagccgatgatgcgaaatgtggaaccggtcgcggccatcagcgggtatcatacatgcggaagcaacgatacgttggtgtcagcacatccatctgacttcagaaaaggacacgatatgaccacatcctccgtttcgccggtgaccactgaactggcgggcagcgaaaccggcatcacgcttatcattcacgccggagcgggcagtcgtggcaagcacagcacgcctgaacgcatcgcccaggtcgaacttgatctgcagcgcgccctcgatgccggataccagttgttggaatccggagcaccggcgcatgaggctgtggtcgccgccatccacgtcatggaagacgctcccgaattcaacgccggccgtggtgccgccctgaccagcgatggcatcgcccagatggacgcctgcctgatgaccggcgatggcgaggtcggtgcggtcaccggcgtaagcaccgtgaagaacccgatcgatgcggcgcgtgccgtcaaagagcagaccaagcatgtgctgttcgcggacccgaccgatgccgagatcgccgattggggcgtcgcgaccgaaagcaacgagtacttcatcaccgaacagcgtcgtcagtccttggccgaggctcagtccggtggcgatgagtgggagaagcatggcaccatcggtgccgtggcgcgcgatgccgagggcaatatcgccgccggcacgtccactggcggcatcaccaaccagatgcacggtcgtgtgggcgattcgccgctgcccggttgcggcacgttcgccaaccagtccacggtggcggtgtcctgcaccggcatcggcgaggcattcatcaaggtggtcgccgcccatcaggtgtcggatcgtgtgcgtttcgccggcgagaacgtcgaggatgccgcgacggccactttggacgaagtcgccgcgcatcatggcgatggtggcatgatcgttctgccggcggtcggccgtggcgtggtcgcctacaacagcgagatgatgaacttcggataccgtagcgcgcaaggcggtaaggtgcagggctgattgccccctgtattgcggcatatatcataatggccggtgtactgcggattcttggtaaggaatccgcagcacaccggccattcatgtatgcggcaagtgccgccgatcagtgcggcagtgcgcgctacttggtgatcgtgttgtacgtgggcatgttcgtgtaatcgaactgcacgttcttcacgttctgtgcagacacggcggcgaaacgtttgaccgggaatactggggtaatacgcaacttcatcgctcctcttcctcgaatgaaactatgttccattggtttgagccagtcacgtacggtattcgtgtctggcctgccacacaatgatgcagccgtatatacgggcacagcattgcgcggcaccggtccaaaaactcatgtccgccagcgcaacgcgactacgtaccttatgccggtctgcgcgtagaatagaacggctgcgatattgggttattcacggaggaatggatgcgacgctggctgatcaatgtagccaaaaatgagacgattctcatcgtcgccgcaatactcgccctgatttcgtgtttcattgtgccgccggacgccgattacaaaagctacattcacgccagcaccatcagccagctcatctgcctgatgattgtggtgtgcggattccagcgtatcggcgtgttccgcatcatcggttcgcgattgctggagaaggtcagcaccatgcgcggactggtcattacgcttgtcgctttgacgttcttttccgcgatgttcatcaccaatgacgttgcgctggtcacgtttgtgccgttcgcggtggccgtgctcatcatggctgggcaagaggataagaccatcctcgtggtcacgctgatgaccattggcgcgaacgtgggcagtatgctcaccccgatcggcaacgcgcacaacctgtatctcaaagccctgaccggcatgccgaccatggaattcctcggcatcatggcaccgtattccggcacggcggccgtgttgctggtcatcgtgatttccgtggtgtttggcggcaaaccggtcggcgacctgggcgacctcgaaaccggcgtgctggctcccgagcgcaacaaacaccagcccgacgagattcgtatcaccggctacggcgccggttatggcggctggcgcaccatcgtctactcgctgctgttcatcgtctgcctactggccgtctccgacgtgattcccctgtgggtgatgtgcgtgatcgtggtcgtcgtgttcctgttcaccgatcggcgcgtattcaaatacgtggattggggactgccgctcaccttctgcatgttcttcatcttcatcggcaacatgaagcgcgtgcccgaattctacgaactggcacgctcgctggtcggcggccatccgctggaggtggcggtcggctccagccaggtcatcagcaatgtgcccaccacgattctgctttccggcttctgcgaccaatggcgcgatctgatcattggcaccaatttgggcggcatgggtacgctcatcgcctcgatggcctcgcttatttcttacaagaacgtcgtgcgccaatacccgcacaagaaaggccggtatctggccgtctactccgccgtcaacgttctgtttttggccgtattgctgaccttgagctggatcatcgagccgagtctctgagccgccgttgtgggttgggccggtctaccgcgcgtatacggtgggggagccggtcagtcggctcatggccgactgcgggatgtcatgaatgcggccgatggtggcatccagcgtggatacgccggatacgccgtctgtgttggctgtggtggatgcagaggtgatgctggatactccgactgcggacgatgatacggccgcaaccatcggctgacgataggcgttggagttgcgggccagccgggcgagcgcagggcgctgcctgcggaacagattgataaacataccgcatactccttcatcgttggccggcggtcttctggccgccgtggtttccatcctgccctcccgtgcttgtattcgctatgggggatagcccctattattccctgaatctgcacgattccccctcatccttgagggtgattctaacggcaaaggaatcggcctaatggccgatgtcaatcagcgcgaagccaccagcgtgacgctgtacggcttgatcttcatcgccagcaatgaagacggcgacggcaatgtgtaagcccgacgttccggcacaatcgcccccgaagcctcgccgcggtatccgatagtggttttcgccgtcggactggcgcttaacgtcgtcacctccaaacgcaccggtcgcgatggcgaggcgcccagcccggccagtccgcgcgcgatttccaacgtcacatccaccggggaatcggaggtattgacgattttgatgtaacggcaggcgtcatccccgtcatgcccggtggcactgacatacagatgtttggcggggcgtgacgcggtctgctcgatggacacggcatatgtcgtgtcgcccagatgcgtggaaaacagccgctccacctcataattcaccgtggggttcacatgcgccggattgagttcgataagattctgcgcccaccccttagccgggatatgcgcgagcagcggtgcataggaggtcatgcgcaccacgtcggaattgcgctcgcaaccggtcaggaacgcggcctcgccgagtgccgacttccacgtgttcgcgccctgttcggtctgcggttggccggcaaaatagccgttggctgaatattcgccgaaatagacgccggcgccgcaacgcgggtaagcgtcgaatcgtgacgcttggtatgcaaaccattcgggggagtggtaagaatgttcgtcgacgataatcgcgtcaccggtggcggaatcatgtgccccggaatcggttgcggccaacgctcgcgcatggtcccagctgcgtttcatcgtcggctggaaggggaacagtccggcgctcatcacacacagcatatccgggtatcgttcgtgaatggcctcgctgatcatgtcaaacttggccacgtagtcagccccgaagttttcgttgcccacgccgatcatgtccagaccgaacggttctggatggcccatatcacgccggaccgcggcccacgagctggactccggatcgccattcgcgaattcgatgaggtccaggtagtcctgaatcacattgttgcggaaagtggccgaattgatatccatgtggcgcggatcgcggccgggcgactggcatgcgatgccggcgaacagagtgggcagcggcttggccttgaggtcctcgcacaggcagaaatactcgtagaagccgatctgatagctctgcgaatagctggaaccatccggcatcttgaacgaccacatcgaatactgttggcgtcgcgcggccagggagccgacggtatccttccagcgatattcattgccgggcgtcacaccttcgacgatgcagccgccggggaatcgcagaaacgctggatgcaacgcctgaatggtttccaccagatcgcggcgcagcttgccgtaacgccatttcgggtcgcccgcgccccaatagtccgcatccatgaactgcaccagatccagatcgaacgtggtgcgttcgccggcgtcaatggtgatacgcagcttgccgtaatcggtgttcaggccggttacgtcggcgttgaaccggtaccagccgtcacggccgatggcgatggcaccatccgacgaatccggactgatcgaaacgccggaatcctgcgcattggcaccatcgtcctgcctcagaccggtctcttccgtatcgtcaagcggatctgcgtccacgatatacgacaatcgagtggtgctggtgagcggcagaccgtacctatcgaccacgccgacggacagcttggcccgcccatgaaccggacgtaccgcgagactgacggaataggtgtggtcggcgacgatggagaacgcgggctcgcccccgttgtcgccgcctccgttatagccgaggttttccagatatgcagggccggtttcggaaggaacatcggacgtgatgcgagcgtatcggctatgtgcgtgaattggcggggcggggcagtcggtggtcacccgctggccgtgaatcccgcgtatctcactgccgaggctggcggcggaacagttgatgaaatcccagaaacgcagggaatcggcctgtgtacgccatcgttcggcgccggccatacgccacgtgtgatggtcgagatagacgccgtcaaaactgtagttgttcaccatgttggcgttcagcccgccatccgcaccatggttgatgtcctcgaagaacacgccgtacagccgcccgcttgtgtgatgggtggggcttcccacgctaatccgcaccatggttttgattgtagagggaatggagcggaaaggtaaacggaagagttcgctcaccgttcatgttgcggtcaatccaagtcgactgttcgccggtatacagccggtaccctcgaaacaggaatggaaaatacggacgactaggagcgcggctgtgcaatcctcggtgggaatacgtgagcgcatcgaccacgtgtatccgtcgctgcgtccggcggagcgcgccgtggcccagtatattcgggatcatatcgaggaggcggccgacctgaccgtcggccagatggccgacatcgcccacgtcagccagccgacggtgattcgtttcgcccgcaagctcggtttcggcggttaccgtgaactgcggtacgtgttgcgccatccggccgccgagcacaaagtgaccttcaatccgttggctggattcgatctgaatccgtgggatggcgaagatgagattcccggcaaagcggcctatggcgcgaaggcgctgatcgatgagctgcacagtgcgttggaccccaaggcctatcgcaaggcggtcgccctactcgccgaatcggagttcatcgatattttcggcgtggagaactcgttgacaccggcgatggatctgttcaccaagctcggctacctgggactgacatgccgtctcaataccgacgcttacctgcagcagatcggtgccgggcacctgccccacggcgctgtggccgtcgccttctcccattcgggcagttcggcggatacggtcaaagcgttgcgattggcgaaatcgcatggcgcgaaaaccatcgccataaccaatgccatcggcgcgccgctggccagctgggccgacgtgacgttgctgacgggtcgtgactcgcacacgatctatggcaatgcgattttctcgcgcgtggccgataccgcgctcgtggacatgctgtacatgggcgtgattctgtccgactacggccgtttctccaccgcgctcgacgaatccggtcgcatgattcgcgatcgcgtattcgagaactgagctgctgctttatcgtgccttgggctgtattgctctggtcgttgccgctttgttgccgctctggtcgttaccgtcctgaggcatgtgccagcgaatacgtagtggacttggcgtgcgtatgacgttcgatcttgccgctcaactccagctggtccaagagctgcgtcatctgatccttgttcaggccaagcgctttctgcatggttttacggctgagcttcacgccgcggaacgcgaggaaattgagcgtgaactgctccaacgtttgaggcgacggttccagcgtcgccgtatcgagcgggcgggtactgacctggtcgtcaccgtccgggcgctcgccgaatccactgccgagaatcagcgtctgcaatggcgcgcagccgatgatgcgtgcgccggccaaagcatctgcggcgttatccgtcatgcgctgaatcgtggggaatgaatacattttggcgcgctgcgcttcgtcagtggtgctgggcgcggcggaagcatcggtatcggtccgatgcaaggatgcggcctcggccgagaccgggatgggcagcaccatcgccaccgaagtggggcctacgcgcagttgcggactgaccgcgctctgcgcgtaggcgtccataatgcgttgaataccggtaccgcagttctcgcagagccccaaatcggcgaacaattcagccaaacgcggggtgcgtggctggcatacgccgttgagcagatcgttgatttccaaaccatcggtcaggccgccgagcgagacgatttccaggcgggaatcgaagatattgatcagtgtggggccggagtacgtgtaatcgcgatgttccagtgcgttgaccaatgcttcgcgcagggctatggccgggtattggccggattcgttgataccgttcagcagggcgctggcttggtcgagctggcgcagcaccgagccggtgaatgtgtgacgttcgcgaatggcgtttttgccattgccctcgaaaatggtggccttgataacgaacgggcattggttggacagcagggtggcaagcgacgattcggtggcgctggtgaaggtgttgttggcgccggtgttggtgatgctgccggcgggggcattgccggcatcggcagagacggatgcagccatgttggtcacaaccgggctttcccaatccctgccttcactggcaaaacgaccctgtgcgtatgtgaaagtgagctcaccactatcgcctgcgacggtctggcccgatgcggcgtgatctacgttgctctccgttgtccccatatcgccgatggtaccggtgcaagccgacgttacgccgaggtgttttacacccctacggctagacttacatgagtttggccccgtagctcagctggatagagcatgtgacttctaatctcaaggtcgacggttcgagcccgtccggggtcacgatgcaataaacccttggtccctcatcgtctgtgggggccaggggcttttgagtattatgccggtctgggtccgtctggagcctgaactgtcgaccttgagattagaagtcacatgctcatcatcaccatccgggaacacccttaaggggtgcggctcctgcataacggctatactctgacttgagatgtgctggataataaccagctatcgcgcgtccgccaatggcgacgaacgaaggaagaagggcccgtgccgcgagcaatcatcgaggtaagaaacctacgcaaggaataccccgtcgaggatgagacggtggtggcgcttgaccgtgtcaatctcagtatcccgcaaggccagatctgctgcattttcggcgaatccggctccggcaaatccacgctgctcaaccagttggccggcatggaaaaaccgacgcacggcggcgtgagaatcggcggcgtacccgtcagcaaactcgacgagcgtgagctggcggccttccgccagaagcatctcggcttcgtattccagtcgtacaacctgctgcccaatctgaccgcgctcgaaaacgtggcaatgccgctgatgttccgcggcgtgcccaaggaacagcgcgaacgtgcggcgcgtggcgtactcaaacgagtcgggctcggccatcgtctcagccattacccgcgccagatgtcgggcggccaacagcagcgcgtcggcatcgcccgggcgtttgtgaccaagcccgaggtggtgttcgccgatgagccgaccggcaaccttgactccaaaaccaaaaccgaggtcatgacgatgatctgcgcattcgcccatgacttcaaccagaccatcgtgctggtcacacacgatccgcagatggcctcatacgccgaccgcattgtcaccttgctcgatggccgcatcaccagcgatcggctcaacaccgacctttcccgcccaactgttccgtccacgccgtccgccccaaccacaccaactacaccgtccacgccgtccgcccatagaacccaaggaactgaccgatgaagcacctctcccaccacaccatcgccatcatcgtcgcgttgctctccacgctgtcactggcacttgccgtcatctcccttccgcatcaggcgtacgcggtcgacggcacagacggcacaagcggcacgaacagtacgtctcagggaagcgacggcgattccgcgccgatcgccggaccggtgcccaacatcatcatcaccaacttcgcgtatggaggtgattccgtggccgccggatccaaattcaatctcgacttcaccttccagaacaaggggcaggtggcggtgacgaacatggtcgtcaccgtggacggcggcgagagcttcgccatcgcgggaggcacgaacacgttctacgtcgacgcgctgtgggccggttacgccatgacgcaaagcgtgccgatgcaggcgctcgcctccgcgaaaagcggtgcccagtccgtgaccgtgaacttccgatacgagtatgtggacgccagcgcccgctcctcaagccagtctgacgtcaagatttccgtgccgatcagtcagcctgaccggttcgaaatcagtgatcccgtagtgcccgaccaggtgatcgccggccaggaaaacacggtcacgatggaatatgtgaacaagggcaaaggcgatatcgccaacgtcgaggccacgatggagggcgaaggtttcgatgccacgatgaaaacccagtacgtgggcaatgtggcttccggcgccaccggcacgattggttacgccttcacaccgcacgcgtcaggcgagctgaagaccacgctcaaagtcacgtacgaggattccgacggacagaccaagaccaaggaattcccgctcaccatacccgtaaccgatatgcagccgatggatgattccggcatggccgatccgaacatggaccagaacgccaatcagggattgccggtgctggtgtatgtggtcatcgtcgtgatcgccgtggtcattatcgtggtgattgtgctgctcgtgcgtcgcaggcgcaagcagaaggccaagaagaacgatattgatgaggactgggatgattggtccgaaggcaaggatgataagaccgataccggcgtgacggatggtgctgcggcagacaccgctcctatcacaccagtcaccccagcctcatcagtcgcaccagccggctcatcccacaaggcctgaaaggcccgaccatgcgattcggcgacatactgcggctctgcagacaaaacctatggcggcgtaaatcccgtacgattctgaccgtgctgggcgttatcgtcggctgctgctcgattgtgctcatggtctctttgggccaaggcattaacgagcagaacgagaagatgctcaaatcgatgggcgatctgtccatcgtcaccgtgtacaccaacggttatgccggtccgatggacgatggcggctcgtccaagatgggcgataccaagctcgacgacaaggccgtggaatccttccgcgcgatgagcggcgtatccggcgtgacgccgatgatgaacttcccttataacgtgacggccagagccggcgcgggcggccgttacatctatgattacgtgcagatcatgggcatcgacatgacccagctcgaccagatgggctacaagctcgtcggtggcgagaaaccggtcaaaaaagaccaggtgcttgccggcgaatggttcgcctatggtttcatggacactctgaagaacggcgaacaacgcaccagcacacgtggcggtcagtattcctcatgcacgtttaaccaggccaccggccagtgcgagaaagatcaggacgaagatccgttcttcgacccgctcgccacgcaaatcagtctgaccaccggcaccaattatcagggcgaccagtacagcatgaacatgtacggcggcggtggcggcggcacaggcggcgcgggcggcggtggcggcgcgggcggcgcaagcggcagcgccgcgggtcagtcggaaaacgtcaccctcgatgtgcgggcttccggcattgtggcgggcgactacaacaagggctatgccacctccgacggtctggtcatggatttgcaggcgttgaaggaactggccgccaaagtcgatccagccgccgccaaaaaagccaccgcctatgatcaagtgctggtcaaggccgccgacctcaagtccgtgcccgaagtcgaatcacagatcaaagcgttgggctacgagacctcctcctatgaagacatgcgtaagtcgttggaagaacagtcgcgcgcgattcagctgattctgggcggtatcggtgcggtttcgctgttggttgcggccatcggcatcgccaacacaatggttatgtccgtaaccgagcgcacgcgcgagatcggcattatgaaggcgcttggctgctacgttcgtgacattcgcgtcatgtttcttgcggaggccggcgcgatcggattcttcggcggattgatcggctgcgtgctgagcggactgatatcgctgggcatcaacgttgtcggcgcgttgtatgcgggcggcatgagcggcggcatgagcggcggcatgtctggcggtatggtcagcggtgccggcgggggctccggcgacggtaccggtggcggaacatctatctggaccatactctggcaggcgatagttggtggcgagaatgtgacccgttattcggtgattccgtggtggctgttcctgttcgccgtgctgttttccacgctgatcggcttgctattcggcttcggcccggccaataaagccgttaaaatcccggccctagacgccatcaaaaacaacgagtgatcgcctctgtcacctgctccaccgttagtccataacgttcgttcagttcgcccagcgacacgcggtcggtaaattccttggctgcgccgaagttcagcacacgaggattacggctgccgtccgagacatgatgattcgcatagtatgcggtcactttctcgccccagccgccttcaagctgcccgtcttcaagggtgatgacctgctggtggccatcacgcaacgactccagtacgtctgaatccagcgacgtgcactggcgcgggtcgataaccgttgccgtgatgccataatcgtcagacaatgcggcggccgtctgctccgccaacggatacgcattgcccagtccgatgatcgcgacttgcgagcccgtctgattgacccgccaatccagcatgtgacgcgcaccggcatgctgagccgttacgctaacggtcccgcggactgttgcggcagatatgcccccgctggcggagctggcggaggctggcagcgaagctgactgggggcggtcagcaatctgcccacccgtcaccggcagcagcgtcgcatcccgttccgccgccagaatcgcctcgcccggcacccgaatcaccgccggaccagcaggggcgtccgccgaaccggccggcgcggtagcccatgccaaatcagccagatagtcgcgagccgaagtcggcaccagcatcgtaacccctggaatattggagaacatcgtcacgtcatatgcgccggaatgcgtattgtccgaaccggacaagccgcccagaaaatcaagtaccgtgactcgcgaacggttcaggctcatctcctggaagaactggtcgtacgcgcgctggaagaaggacgccgtggtggccaccaccggcgtgccacccgcccgtgcgatgccggcagcgtacgccacggcatgcgattcggtgatgcccgtgtccacgtaatgcgaacccgcgcgttcgcggaattcgtgggtgatgccgttggagcccggcgtggcgggggagatgaccacgagtcctggctcggtggcgaaacgcggttcgagcgcggccatcgccattttgccgtaatgcttgcgcggatcgtccggcttgccgattgcggcatccggattctgccaatgcgaggcctcgcactggccttcatgcggttcgtgatcggacaggttgcagtgatccgaatgccacggctcgctgtggttcacgttatcggtggggtgcacgccggtgtcggagactgccggatccagctcatggacgttaccggccgaggcctaggatgcgccggccgcgtgaccagcgccgtcatatcccgcacccttcagcgtgtggatatggaccaccaccggatggtcgatattgcgcacttcctcgaaagccgcgaccagagcggaaacatcgttgccggccgccacataccgataatccaagccaaacgcgttgaacagattcggctgggcggtgccgccggacgcgcgcaggcgggcgagcggaccgtacatgccaccgaaatcgccggcaatcgacatctcattgtcgttgaacacgatgatgagattgccgccctgctcagccgcgttgttcagtccttcaaacgccacgcccgaactcagcgaaccgtcgccgatcacggcgatcacattgccgatgccgctgttcgggccttccatatcgcgggttttcgccaaaccgcaagccagtgaaatcgaggtaccggtgtggccgagcacgaactggtcgtgttcgctttcatccggattggtgaagccagtcacctcgctgaaacggtccgggtccagataggcgtcggcgcggcccgtgagcatcttatgcacgtagctttggtgggatacatcgaacacgatgcggtcacgcggcgaatcgaatacgcgatgcagggccaccgtggcctccaccatgcccagattggagccgatatgaccgccgtgccgatggccgtacgccaacagcgtggcgcgaatctcgcggcacagttcggcgagctcgtcgggggcaagggccttgacatcggccgggctggcaatgcggctcagcagatgggagtcgtcgccatgggaaggggtaatgctcggggggatgtcgtgaaggcgcgcggccccctcggcggcaccggagacggcgaaggaatcgcttgaatcaaatccgtttcctgacgcgttgcgcataccctcgaatctcccttcgctagtctttccgaagttgaatgctaacgcccggcattgtccgaggtccacatgacgaatcaatgcccccaacatctccgtaaatgggtgattcgttcgctgcgcgatgtgggacaatgaatgcggtaattccttttgataccaaggagcgcgcaatgaaggccgtatacgcatccaccgtcaaccatgacgatccgcttgccgcgttggcggtgggcgagcagcccgaaccccaggcccgcccgttctggtcgaccgtttcggtgcgcgcggtgaccgtaaaccatcacgacgtctggtcgctacagggtgtgggtctcgccgccgaacagacgccgatgatcctgggcaccgatgccgtgggcattctggacgaggacatccccggcaagcatgggctcaaggccggcagcgaagtggtgctgtacacgttcgtcggcaccgatggggcgggcgtggccccgggcgagcgccggacgatcctctccgagaaataccccggcacgatggccgagaagacttccgtgccgtccgccaacgtgttcgccaagcccgcaaaccttaccacggctgaggcggccgcactcggcaccagctggctgaccgcctactcgctgttgttcgatgccgccggcatcaagccgggcgactccgtgctcatccagggcgcgggcggcggcgtgtccactgcggccttccagctcgcccatgccgccggtctggaagtgttcgtcacctcgcgtgacgcggacaagcgcgccaaagcgctgaaacttggcgcgaacgccgcgctggagaccggtgcgcggttgccgcgcaaggtcgatgcggtgatcgagtccgtgggggcggccacatggggccattcaatgaaatccgtgcgccccggcggcaccatcgccatctgcggcgccaccaccggcgaccagcccggtgccgaactgacccggttgttcttccaggacattcgcgtgcagggctgcacgatgggttcgcgcgaggatttcgcacgattgctgcgcttcgtggagcacgccgacctgcatccggtgatcgattccgtggtcagcgggttggacgccgcccccgaggcgttcgccagaatgatcgccggcgacatgttcggcaagatcgttattgagctgtaagcctcacagaattatgtattgagaacgattcgctgcgtggcttaactccgctatcaggagtacagtgggccttattctcaataactagggagtaaatgataatggcaaatgaatccaagcccgaagtcgcagtggtcatgggatcctccagcgactgggagaccatgaagcgcgcctgcgatattctcgaccagttcggcgtcgggtcaagcacgccgacgcggaagcccatgtagcgggcggacaaagccatcatgcggccgagctggccgccgccgatgatgccgatggtcgatcccggcatcagcatcgaaacacgaccgc

SEQ ID NO: 3519 - DNA, 2658 bp, Unknown
  R85_18m  MAG No. k141_13041
catgccgagcagcaccacgacgttcttctcgaacggggtgttggcgaagtactcgtcgatctcgtggaagccgtgcaggaactcctcgaagcgggccgggccgaagacgacggccagagaggtgccgacggcggagtcgacggagtaacggccgccgacccagttccagaagccgaacgcgttgttcgggtcgatgccgaattcggcgaccttctccaggttggtggagacggcgacgaagtgcttcttgatggcttcggcgttcttctcgtcggagccgtcgatggcgcccttggccttgagctcttcgagcagccaggtgcgggcttcacgggcgttggtcagggtctccagggtggtgaaggtcttggagacgatgatgaacagggtggtctccggatcgaggcccttggtcttctcggccaggtcgttggggtcgatgttggagatgtagcgggcggagatgcccgcgtcggcgtacggcttgagggcctcgtacaccatgacgggacccaggtcggagccgccgatgccgatgttgaccacggtttcgatcttcttgccggtcacaccggtccactcgccggaacggaccttgtcggcgaaggcgtagatgcggtcgagcacctcacgcacgtccttgacggtgtcctgaccgtcaacgatgtacttgccctcgtcttcgaccgggcggcgcagcgcggtgtgcagcacggcgcggtcttcggtgttgttgatgtgcacgccggtgtacatagccttggtgcgctcatcgagcttgacggccttggcaaggttggcgaacagctggagggtttccggcttgatcaggttcttggacagatcgaagtgcaggtcgccggcgtcgaaggacagcttgtcgacacgctcggcgtcttcagcgaaccacttcttgaggctcacgccttcggcctgaagctcgtcatagtgcttctgcagggcagcccactcaggggtctgggtggcgtcaacgggcggattgatggccataggattccattcctttcatcagtgactggagcgccttcgctcacggctcggatgcgctccgtatcaccaaacagaatactcacaaattcggacatgaacagaacaaaaatcagtcagcgatgtcggattgccatcgtttgcattatcgaacagttcgtggcgcggcacaaccgtcatcttcaaccgagcggtcacgacacaaccgccaagccgccgattggacttttcgcggagatgtcttatacttaatttcttgtgcgcggctggcgaaatgccttccgcgaaccaagccactttagctcagtcggtagagcggctcactcgtaatgagcaggtcgtcagttcgattctgacaagtggctcggatgccctaggctggctggtctgtaatggctgtccggcctagggttttgtatatcttccacacctgtggaaacgcggatatgcacgcgcgagtggcggaattggtagacgcgcaggatttaggttcctgtgtctttgacgtgtgggttcaagtcccatctcgcgcaccggcttgagcctcctggaaacattggatcgccaacgattccgggaggctcttcgtatatgcgtgaggcaattgcaagcccttgcggacgcctctacatatggcaatgccaaggcggcaaatataatggtcacagcattgtgggtctgagcctgtgcgccgtgagcctgtgtgagccaaggagagaagtgtatgtccgccattcttacgccggttggcctattgctgatcattctcgccggctatctgttcaagcggttcggcctgttcgggcagaaggattatcgcgtgttgcaaaccgcggaattcaacatcgtgctacccggtgccatcgtatactcgttcgccaccaatccgcatgacatctcgctgctgcttatttcggtattcgcattcctgtttgcttttatcccgatcgtgttcatctttctggccacccgcaagcgcaatgtgaccgaccgcgccttcctgatgctcaatggcgccggcttcaatctcggttgtttctctttcccggtcgtccagtcattctggggtgcgggcgcggtggtgccggctgcgatgttcgatatcggcaactgcgtgatggtggccgccggcaccaatgtgctcacccagcaactgctgcatattcagcccggcaaaacacttgccgaacaacacgccggttcggttcccaccttgccgtacgaaaagcccaaggatcgcgacgccaaacggcttgcccgccgcgcattgctgcgcaccatcggcaagagcttcttcggctcggtgccgttcgacacgtatctgctcatgatcgcgttgaccgtcgccaacgtgaagattcccgattggatcgcctctataacccagccgttgagcggtgccaacgcgctggtgtcgatgctgatggtgggcatgctcatggatttgccccagtccaagcatgatgtgaaggaagtcatggccgtcatcgcttggcgtataccgttcagtgtcgccttcgcgttgatctcgtggttcctgctgccgttctcggcttcgattcgcgccgtgatggtgatctgcgcgttggctccaatcgccattttctccacgctgttcaccgacaaagtactcggcaacgccaaactggc

SEQ ID NO: 3520 - DNA, 5287 bp, Unknown
  R85_18m  MAG No. k141_13045
gccgcgattccgattctctcggccgccggctgcgatgtgtgcccggtgccgaccgccctgttctcggcgcacacgcgctatgcagtgttcacgttccatgacaccacagatattctctccggttacttggatgcctggcagaaggaagacgtggaactggatggcgtgtattcaggcttcctcggctcccccgatcaggtggcgatcattcagcgtctctaccgtgaatatccgaacgcgctgcgtctggtcgacccggtgatgggagacgccggcgaaatgtaccccacgtacacgccggaactgtgcgaggcaatgggcgctctggccgatggtgccgacgtgttgatgccgaacctcaccgaagcgagtattctcaccaagcgtgactatcccggccagaatattgatgaggccacggttgacgagcttcttggtgctctgctgaagttgggtgccaagaacgtggtgctgaagggcatcgaccatggcgatggcaaaatcgtcaactatgtggccagcgcttccaccggtgttgccggcaagatcgagctggctcatgaaaagctgccatacatgattcacggcacgggtgacgccttcgcatctgccctgtgcggcgcggtgatggccggccgcggcttggccaagtcggccgaaatcgccggcgagttcgtgcgacacgccatggtcagcacccgtgaccagccgcatttcgaggatcgtggcgtcagcttcgaactgaacctcggcgaactcaccgatttggtgaagtgaccgcaccttggctcccctctccgctcactgggtctgacgtattcagcgaacaactcggcgggttgtttgtcgtcacaggtaagtcggctggggagccttggtaaaccttctgaactaatggtggataaccgggttttcatccacacgttatccacaacacgccaaaccgcgtcatagtatccacatttgccggttgcgcttgtgctcttacataagtaacccgcacagtggaatcatgaacgctttaccacctacccagccgacgacgaagtccggcatcgacgccggtcttgcctttcaccagcccatgctggcttcacctgatccgcaggcaacgctgccttcggaacggattgcggccacgatgggcgaccgcaatctgacgcccaaacagttcggtgcgctcggcgagcagtatgccgccgcgtggctggaggaacacggttggacgaccttgagccgcaattggcatacccgttacggcgaattggacatcgtgatgctcaatcccgagtacacggtggtgttcgtcgaagtgaaatcacgccggtccatgcattacggatatccgcaagaggccatcacgccggcgaaacagcacaatctcaggaaagccgcctgcgattggctgcttgaccggcgtaatcgtgtgccgcatacggcagtccgtttcgatgtcgtcaccatcgtgcttcgggtgggcagaccgctcgtgcatcacatcgaaaacgccttctgaattcgtcccccaaaaaacagccacgttgcgaaacacattgcgaaaggagtagacatggctatcggcagcactctctcagtcggactgatcggccttaaggccttcatcgtccaagtgcaggctttcatcagccctggcttgccatacttcagcatcatcggattgccggatgcatcgttgtccgaagcccgcgagcgcgtgaaatcggcgtgtcaagccactggattcggttggccgcaaacccgcgtgaccgtgaacatgagccctgcggccatgcccaaacgtggttcgtcgcatgatctggccatcgcggccagcgtcctatgcgcggcgggtgccatagggcatgattgcttggaagataccattgtgctcggcgaagtgaatcttgacggctcggtgctgccgattcatgggctgctcccgatcatgctgcatgccgaggaacgtggcgtgcgcaaaatgattgttccccatcgcaatcttgacgaggcttcgatggtggatggactggatgtagtgggtgtgaggcatgtgggtgagctcatcgaactgatgggcggcgatgccacctatacgattcccgatacaccggttgccgacgagaccaccatggatcaatcgcccacaagccatcccaacgattgtggcgatatgaacgaggttctgggtcaggaacatgccaaatgggcgctgcaagtggcggcggcaggcggacataatctcatcatgaccggcccgccaggcagcggcaaaaccatgctggcctcacgtatgcccggtatcatgtgcccgttgaacgaggcggaacaactggaggtggcgtcgatacggtcgctgtgcggcatactgcctcagtacggcatcaccgacatgccgccgttcgaggcaccgcaccacaccgccagcacggcggccttggtgggtggtggcaacggcatcgccgttcccggcgcgatcacgcgcgcgcatcgaggcattctgttcctggacgaggcaccggaattcagcgcacgcgccctgcagacgttgcgcgaaccattggaatccgggtatgtggcgctttcccgttcaaaaggcagcacctattacccggcctcattccaactcatcatggcggccaacccctgcccgtgcggatactattacggcaccggcgaacgttgcgcttgccgggaaaaagaccgtatacgttatttctcgcgattgtccggaccgatattggatcgtgtggatattcagatggcggtgccaccggtctcgcgcattgccgtgcaaagcgagccaatcggcgagtccagtgccggaatacaagctcgtgtgattcgcgcccgtcaagtggccaaggaccggttcagacagtatggatgggtgtgcaacgcgcaagcttcgggcaaatggctgcacgccaatacgtcgctgaaagcgatggaattggtcaatcgggccctgtccaatcatcaactcacattgcgcggggccgatcgcgccatgcgtctgtcttggacgctcgccgatctggccggccgcgtgtcccccaccgagcaggacgtccatcagggcatcgaaatgagaacgaggatgacatgagtaacgctactgatatccgacaatctggcggcaccgcaggcagtgtggatcacaccgatacgggcctcgctgtttcgcgcaccattcccatgcctcccacggatacgttgtaccgcgccgcgctcacgttctgtcttgatggggcggatgtgatgatgtacgccacgctcaaaggcgcggaaagcgccgaatccctctggcacgcgttggcgcaatcccatccaagccagccatctggaatctgcggcccggcgctgtcacgcattgaccgcatgttcgtggatggcctcacccgatggggccgcaaggcgtcggcgaacgcgatgcgctccttccgcaatgcactggccggctggcataaccgcatgatggacctgccctcgcaagacatcatccaactggccgactggttcactatggatggcacgcaatggattatcggccccggccatccatgttggccctcgcagttggccgacctgtccattcgctccgattgggcgccaccgctgtgtttgtggatcaaaggcgatccacgcgcattgaccagttgcgccaaaccggtcggcatcgtcggttcacgggacgtgaccgaatacggccggtatgtggcacacaccgtagccgaacaggcagtcgttgccgggcatctggtcgtgtccggaggcgcaatgggcacggatgcggcggcacattggggagcgttgaatgcgctgcacggcagaatgcccgccaatgtgggcagaaccgttgccgtattcgccggcgggctcaaccatatcggaccgatgcgtaaccgcacgctgttcgaacgtatcgaggcgcagggtggtgcactgatcagtgaactgtgcccagggacgattcccgaagcccgtcgttttctactccgcaaccgcattatcgcggccatgtcttccacattgattgtgacgcaagcccggttgcgttccggagcgctcaacaccgcgggatgggcatgcgaattgctgcgcgaagtgtatgcggttcccggtgacatcaatcagccttgcaacgccgggtgcaataagatgatcggcgaccaccgggcgatgattctgtgtgccgccacatccactgaggatatatgccatgaacggcataagcccgttatggcggcatgcccaggcataccgaaatccacaggtcaggactcgtccgaaaacgaggaggccatggaagtgccggcaacgactccgttatcgccagcatcctcggaatcatcggcgtcacaggagtcgtcacaagattcaggtcattcgaaacatcttaggaccaagcatactcagcctacactcgttcaatccaaggatgggccggcgagcgcaactgccgaggccggtgccaacaagagcaagggtgaagagccgccctcgtcgcatcagatgccggatcttcgtgtcaagccgaagctcgatcccgagaaggaagcccaacaacgtatcattatcgccaagctgccggaaatggaacgcacattagtggcattgattcgtgaatgccgtaaacgacatctcatcgtcaccccggacgcactattgcgtgtggcgcgagagacggtacccgacgagattcccaatatcggcaccatacttgagctactcggcgcattggagctgaagggagtgatcgagcgggatgccggcatactcaagctgagcagccgtgtcggctaatcggctttcatgacacggctcgaagactgttcggcgggtgtgcgagaatcgaacccatgagtccgaaacgtttggaagatatgtatgatgcggtgatcgtcggcgccggagcggccggcctgtcggcggcgttgggactgctgcgctcccccaaaatcaccgagctcaaggaacaaggcgtggacccgaagatcctcgtggtctccaaactgcagccgctgcgttcgcacaccggttcggccgagggcggcatcgccgcgagcctgggcaatgtggagtccgatgactggcactggcattactacgacaccatcaagggcggcgactggctcgtcgaccaggatgctgccaaactgctcgccgagtacgcgccgcagaccgtgatcaacctggagcgtcagggcgtggccttctcccgtaccgatgacgggcatatcgcccagcgccggttcggcggccacacgcgcgagttcggcggtgcccc

SEQ ID NO: 3521 - DNA, 3340 bp, Unknown
  R85_18m  MAG No. k141_13321
ccagcggaatgtcaatgtcgatgttcttgaggttatgcactcgcgccccgcgcacctcaatcgcctgcggccgttgactgttggtcatgctcggcactgctccgccgccgcgctatctgacctctgttcaagtgtcacgccgtcacctctttctcgacttcgcccttggctgccgccgcctgagcttcatggtctccagtatcatcacggccaacgacggcggccgaacgccggacgagaatctttcgtcttgggcaccgtccgccacctgcaattcgaactagctgaaccagcgtgacgatattgtcggctatcgatctgccgtgatcgtaatggacatcgtcgtccggaagcacgtcaccggttccgagaggagtcggcggcgcgctttcataagggcacacaatcccaagatcacacccacagatcaataccgatcaatactcgtacgtgatcgcggggtcgccgatggtcggcgtctgatccagtttgaggttggccgagccggccgcggtggtcacgtcgtattcgatggtcaccgtgtcctgaggcgccagggagatgtcgtccatgtaggtcatatggtccttggcctgcacctgtgcgaaggaactgccgttcgacgccgacacgttgctgacctcgcctccggccggcgtgtagatgaccacgcggttcaccgccacgcctcccttggcgttcgccgtgatgtattccggcagggatccggcctcgcccggctgcagggtgttggtgaacgaatacgtaacgtggtaggtgttgtcgccggtcctcttcaccgtcgacttgcgctggatgtaccagtccatcttcgaggcctgcatctcgttgaagtagacgccggtcaccgggttcttcgcgtcgttggtgatctcgccggtgacgccggcgctgcgcagcaccgcctgatcctcctcgtggaacgaccagaagtacaggtgccgctgctcggccatccggagcatcgtcttggcgacggtcatgagcttctgcgtgttcatgtcgctgaacaggtgggcgaccgcctgggcggcggtctcgctgaagtactggtcctgagcggagggcgtcagttccttgtaggcgccgttgagcaggaattcggcggtgttcgacccgttgagcacgcgtccgtcagacagggtcacgtcgccggtggcgccgatcatcgcctgcagcgcgacggggtcgagcgacatcacgccgtcggacgatccgccgaacggagccgcctgccagaacttctgggccatggacgcgacgcgcgggaagtccggcgtggacgaaagattatggatgacttgaccgaagtacagtccgctgtacagcgtgccgtcaccgtcctggttgacgtcatccaacgcggcgttggaggggaactcggcatccgcgtggaactcccccaccgcgatcttgccgttgtccgcgctgaaggaaccggccgagccgatcaggccgccggttccgcggatctcggaattcgtctgggccagcagcacgtagttgcgggcgccgttcgcaccgaggaagttcggcagcatgttgagcatgccgctcaggttttcggtcacctgcgccagggcggccatctgcgtcttgccgttctgcagcgcgttgttcaccacgccgagtttggcgtcgggaagatcctggatcgtcctggcctgcgattgcacggactggtcgaccgtggcaagctgctgcgccgcggcgatgatcggctccatgttgagctgcccatcgccactggagaggctggcaccggtcagtgtggtgacgaccttgcccagctggggcagcgtggtctgcgcgaagtcatcgatggtaccgatggcggtgcgcgccgtcttcacgtcaccgccgaccacgggcatcttctccgccagcgtccacagaccgccactgacatcctgcttggcggcggccgcctccttctggatgtagctcacgtcggacagcgccttgaccatgtcgtcggtggaaccgtccttgatgaccttggccgcgttgacgacattgttgaggtgcgctttggcgctcatcgccgacttgtacagtttgaatccgctgaagccggccgccgcggcgcacatgaccagcaacagcagcacgacgagcagcgcgttgcgaacgcgatgggttgtcctggtgaccgtgcgtgcgtgtgatggcatgggctacttccttacgttatgacatgtatcgatactggctggctgcccggttacgctttcgctggacgggtagcccggcggacggcacgtagcagtgcacgacgtgcgcaccgcgtatgatgccgggggttgtcagcgcggctgactggggtggccgcggaccggtacctggacttgcagctgccctccggcgatgcgtgtcacctgcagcggggaacgtccgctgcagttacggctattaccggccagccgacagcaatcgctggtttagttgttggtcttttccggctggtcacccgttcccatgagctggcatgcacctttcagcgagtatctctcctaccgcatgccagtctacccatgcctgcgggataacccaaaaagccttgcaagaataccgaatttctttacctttggccctgatcgttcgacggctcgcaagacggcgtaacctcatccaaccggccgatccccggaggcggaaccagcggaatcctcgtgaccgggaatgcgatcgttcccgcttgcgcgatggcggatgcgcgcaacgccagccacaggtacgagaccgactacttccgtacaggatccgttgtggtcgcattccatcgttcagcgcaacgggccataacgctctaaacgatgccagccatgtacaacggcacatctcggatcggccccacatcccgataccggtcagcagagaaacgataagcaagcggataaccgtgcctcttctgcatgattacaagcgatttggtctgtcgatgagtcccctccttcacttccacgggcaccgctttgccattcccctcgaacagaaaatccaactcaccactggagttctcggccgaccagtaatagggtgaatggccgttcatcatggtcaattgctggcatacgaattgttcggcgatcgaacctttgaactctcgaaacagtgcgtcaccttccagcaacacacgaacattcagaccgcccaacgctcctagcagccccacatcgaggctgtacagtttaaacgcagagccgtctgcatatgccgccaatggttcaagaggcgtactcacccgattcacgcgcaacgccaacgacgcatcgacaagccactgtatggcactctcaaaatccttgccacgtccacc

SEQ ID NO: 3522 - DNA, 18327 bp, Unknown
  R85_18m  MAG No. k141_13450
ccttgaaggcggcacgcagtgcgatttcggttttgccgaagcccacgtcgccgcagatgaggcggtccatcggcacgggcttctccatgtcggatttgacctcgtcgatggtggtgagctggtcggcggtttcctgataggggaaggcatcttccagttccttctgccatggggtgtccgggctgaaggcgaagcccctggcgcgctggcgggcggagtacagcttgatcaggtcgtcggcgatctcgtggacgtgtttgcgggccttggccttggtggccgcccagtcggagccgccgagcttgttgagcttgggggcttcggcaccgatgtatttgctgacctggtcgagctggtcggtggggatgaacagtttgtccgccggggcgccgcgcttggacggcgcatattcgatgaccaggtattcgcgagtggttttgttggcgccggtgccgatggtgcgctggcgcatttcgatgaaccggccaatgccgtgctgctcgtgcaccacgtaatcgccttttttgagttccaccaagtcgatggccttgcgccggcgtttcggcgttttggccacggccacggctgaagtgcggccggtcaggtcgcgttcggtgagcagggcgattttggcggctttgtccacgaagccgtcgatggcctgagagcggatgacgtcgaaattggcgatgccggtagtgttgatcgcgcgcctgagcctggccaaggtgccggccgcagcggcggtgatggtgacgtggaagccggcgtcgagcaggccttcgatgccttgggaggccttggcctcatcccctcggaattcggccgggttctgggcgtcgagctgcacgtggccggtcagcgtggtgtccacgccgaaactggtgaggcgaatcaccggatgttcggagtattcgagggagctgatggtttccgcatagtcgaggaagctggctttgtcgaagctgatgggcgcgccggcgccgtggccggaggcggccacatgccagctggcggccaggaactcgttcgcggtttttgccaagtcttcggcggaacggcgcagtttctccgggtcgctcaggaggatcacggcgtgcttgggcagcatggagcccaccggttccagatggtccacgagcgcgggcatcagggattccatgccttcgaccggaatggcgttggcgatggattcgagcatgtcctcagcattgggaatcgaaccgaccaaggctttggcgcgggcgcgcacggcgtcggtcagctgcagttcacggcatgcggtggcccagatggtcttgaggccgtcgccgtaggtacgctggtcggaggcgtggaattccttgatggtgtcaatttcgtcgccgaagaattcgatacgcaccgggtgcggtgcggtgggcgggaacacgtcgaggatgcctccgcgcaccgcgaactcgccacggtccatgaccaggtccacgcgcgtgtaggcgttttcgatcagacgtttggcggcttcgtcgaggggcaggtcctcccccacggtgaacacgagcggctcgacgtcgcccagtccttggacgaccggctggatgagcgagcggatcggcatgacgagaatgcgaatcgggccgaacatcggatcggtatcgctcggatgcttgagtctgcggaacacggccatgcggctggccacggtgtccgcgcgcgggctcagacgctcgtgcggcagggtttcccaggcttcgagctgggcgatgtcgtccgggtcgccgtcataccaggagcgcagcgagcccacggtctcttcggcttcgcggccggaggccacgaccagcacgaccggcttgccgggtttgccggtcacaccctgcccgatggcggcggccaaagccgggcgcaagccttcggaaacaccggccagaacggaattgtcgatgtcgtccgaaacctcgatgtcaccagtggcgagtctaaggaaggtcttgtcctgttccagctcagacaggatgcctaccagtgagccgttgatcaggtccgggtgcgtcgcctcaccggccattgaacttctcctgggtcttggcaagaccgcggaagatgatgtcctcggcggcgtcggcgccgtcagccaggaattcgggcagctgcttgcgctggtccggaccgaatccgcccagcacccagttcaccgtgttgtcatgcgcgttcgcaccgcgcttggagtgaccgacgcccatgcgcacacgcgcgtatttcggcgtgccgagggaacggtcaatcgacttgatgccgttgtggccccctgcggagccgcctgccttgaccttgatacgaccgaattccaagtccatgtcatcgtgaatcaccacgatatggtcgggctcgatctggtaataggcgctaatggaagccaccgcattgccggaatcattcatataagtcagcggcttggccagaaagaacttgacggtgcggccgtccaggttcatcacgcttttaccgagcatggccagacctttgtggtcggcgaagttcaccgtccaacgttcggcgagcacgtcggcggtcatgaagcccatgttgtgccgcgtgtcctcatattttttgccggggttgcccagtcccgcaatcagccagaaatccgatgccataatccactcctcgtccgtcttcctatattcccgtatgcacgttctgtacgttccgtacgtcatgcgcgcgttcgcctcgcgcactggcccatgcccggccggattcaaccgtcaagattgtactcaacgccgccgtcaagccttggaatcggcaagcagcaaggcacggcattgctcggcatccatcgatcggaccgatgaatggtgaaacgcttcgacgtcacgagtcacgatgacgtcggcgtcattgtcctcggcaacggcacggatgagcccgtcctcgaagtcgggctcatcggatcggtacgacatacacgcatggcgttccataagtggacggatgtcgaacaattccatcagtccaccgatatcgtctcgcgccgcccgctcctcgccataatgcttgcgcaacacgcaatacacgtcattcaatgacgataccggcgccatgatctcaatgtttggctgtgcaacggcttccatgagcaaatcaacacattgtttatggaaaggcgctcgtttgtcattgcacaaatcgagcagaatattcgtgtcaaacagcagtttcatcccgtcccccaaatcgttccatacgtgcctgcgcgagaatctcctcatccgaaagatcgccttccgcctccggcaaattccggtcggcgaaacgttgaatcaactcctgctttttcctacgctcccgctcctgaatcagggagagcgtcagacgctcgaattccggcagttcccccgtatccgcaaggtagtcggtcagatcacgaatcaggtccgaataggtgcgcccattacgcttaagcactttctccgcgtcgcgcttccgttcggcattgacgcgcgccgtcaccatggccatagtcatatcgcacctccttgtaataccagtattacaagagatggggacgagtgaatcgcgtctattaggcggtgccgccagcgaccttttcgcgctgtttgccgttgaggtaccagtaggccagcgccacgaacagggccgccgaggatattgccgagcgtggctgcggacaggttatagaggatgcccgacacgtcgagcgccgcgacacccgccgcgtcggcaccgaaaccaaacgttttggcgaccaggcccatcggcaggaagaacatgttggccacgcagtgttcgaagcccatcgccacgaatccggcgatcggcagcaggatgcccagcaccttgtcggatacggagcgcgcggcgaatccgatgcgcacggccaggcagacgagcacgttgcacaggatgccgcacacgaacagcgtgtcccagcttggcgtcactttaacatcaactccggttggaaaaaatctcagtatgtagcattcggttctcaaataggagaaacatgcagcggcaatcaacaacttgtcgtttacgacgccaagcaagggaaacagctcagacagatgacgcttccctgcaatcggatgacatattgcgggacggcagcggattttgggcgttcttggcgtggcatcccgcaagcgttatcgcacgttatctgcaccgaatcataagaatggcagaattccaatgatttcgcaggaagagttgcgggacgcgagctatgtgcatcgtttgacgcgtgtggcatcccacgtgattgcgggataccacgtcaaaacggacgaaaatcgcgtgccgtcccgtagtttgccgttatctgggataagcgcgtccgatatatggcgttcgaggaaaagagctgatccgatacaactttttagtgttataggacaccggaatccatggagagcaagggtaaaccgcctcgggcctacaggtccaaataccagtaggacatgtcccgcatggtgccggtggagtcggtggcagcggcgggcatgaggccgaattgggtgaagccgaagcggcgcatgagggcaatggagccgacgttatcggcgaaaatgatgccacaggccttgcgcatgtggcgggcccgcgcctcggtgagcagcctgtcaagcatgaacgtgcccactcccctgccttgccatgccggatcgatgtaataggccaaatcggtgacgccgtcatacccggcacgatcgtagaacacggagagcgcaccgaagccgatgattgaaccgtcttccgattccacaataaaaacgccgtagggcggcgtatgggattcgacccaggcgcggcgttggtcgagggtgcgcggggtgaggtcggcggtggccccacccgccaccaccgcagcgttgtagatgtcggtgatggcttggatgtcggattcgacggccggatggaaggtgtatggcatgaagttcctttgaatacgcaaatagcccgtccttatgataaggacgggctatgtcagttgaggtaaccgactcccgtcagtcgccttctgcgatagctcccctcaccctgaggggagccggaactacttgtcgagctcgatggccttgttgagggcgtcttcaagctccttctgcgccttgccgtaggcggtccagtcgccgttcttcatggcggactggctgtccttcatggcttgggcggcatcgttcaacgcctgctggagttcggggctgcggtcggaagacgagccggaatccgactttccgtccgtggtgccggactgaccaccattggtatcggaaccagattggtcaccggacacgttctcggcatcgcccgcggccgcaccggaattgccaccgaacacctgatccaaggcctcatccaacgtatccgcgaatccaacctgatcaccgaatgcgaccagcgtcttcttgagcaacgggaatgaagtcacgcccgaagacttgacgtacacgggctgcacgtacaccagtccgccaccgagcggcagggtgagcaggttgccgcgcaccacttgcgtgtcgccggattgcagcaggttcagttccttggatacatcggcgttggcgttgaagttgttctgcgcctggccggggcccggtacgttcgaatccttgggcagctcctgcaatcggatggtgccgtagttcgagcctatcttgcccttctcattgccggcatccgagtcgaccgacaggaagccggtcaggatctcacgggtggactggccagccggaatgtaggtggaggtcagcgagaacaccggttcctcggtgccaccggtctgcaaggtcaggtagtacggcggctgcaggatgtcctggtcctgctgggactgggattcggtcggatcgaccggcgtctgccagaagtcttcgcctgagtagtactggctggcagaggtcacgtggtacttggagagcagctcgcgctgtaccttgaacaggctttccgggtagcgcatgtggctcatcaggtcgccggagatatcggagagctggtggtactggccagggaagatcttctcccatgccttgatcaccggatcggattgatcccacacgtacaggtccacggaaccgtcgtaggcgtccacggtggccttgaccgagttgcggatgtagttggccttctgagagcccagggacgagaccgttgcggaagagacggtggtggaatccttggtggcggagccgaggtcggttatttgcgagtacgggtaggcgtcggaggtggtgtagccgtcgacgatccacttgacgcggccatcgaccacggccggatacacgcggccgtcaagcgtcaggtacggtgccaccttggccacgcgctccttgggggaacgatcgtagagaatctgcgattcgctggtcacacggtcggagaagagaatctgatcggagccgaagcggatcgcgtagagaatcctggagaacaggttgccgaccgaagggccgccgtcgcccttgaacgtggtcagagcaccttccgaaccggtcgggtagtcgaactcccaagcctgcgtgccttcaggggcaccgacaatcgagtattcggtggtgttcggcgagaagtagatgcgaggctcgtacttttcggattcggtgagcttgccctgggtggggatgccggattcgaagaattcgggctggccgtcggcggtcaccttgttgccgtaggcggccaccacgccgtaaccgtgggtgtacacggtgtggtcattgacccagttgcggttgtcattgccggccagatcgagctcgcgggcggcaatcacggtgtcctgggagacgccgtcaatctcgtacttgtcgaccgccagggtgtcggcgaaggtgtagtactgcttggactgctgcaactgtttgaacgtggggctgacgacctgcgggtcgagcagacggatctgcgcggtggtgtcggcctccttggccagagcgccctgctcacccttgtcggtcaccttgtattgctcggtcttgagcttgtcaagaccgtaggcggcgcgggtggcgtcgatgttgcgctggatgtaggtggattccatctcctgtgcgttcgggttgacgcggaagcgttgcaacagcaccggccatgccacggtgagcacaagacccaccacgaccacgacggcaatggaggtcaccggcacacgccaggccttgagcgcggcggaagcgcgcacgccgatggacgcctggccttcgagcgtgtgggagcgcatgagccagatgcccagcaccacgccgaggatggcggtcagcacgaccatgatgaaggtgacggggatgttggcatgtacggcggtgtaggaggcaccggtgatgcgtgaaccctgcacggtgagctggtcgaagacgccaatcatctggcgcactgcccaagcgaacatgttgagcatcagccagatgccaagctggcgacggcaacgcttggtaatggagaacaggccgcgtccgttaaccggcatggtaatgcggataccgcccatcagcacatgcgtgaccacggaaaacacaaggcccacgcccagcagcatggccacggcggcgagcacgagcttcaggcccggcagcacgaacacgtagaagccgttgtccagaccgaactgcggatcggtggtgccgaacgactgcgcgttgaacatgagcagaatctcgctccagttcgcgttaaactgggaaccgaagatgacgccgacgatcagcgaaatcaccacggccacgcggcgagcggttttcgagctgacggatttgccgacctcgaccacatcgccgttaatgcgaatggtggaaccgtcggccgaatcagggcgtgctcgaatggccagccaggcggaaacgaagccggtcagggccatgagcagcgcgtaggccacccacagaccgattttcaccccgagctgggtccagaccacggactggaagccgagctggccgtaccacatcagatcggtgatgaatcgggacaggccgaagaacagaccgacgatgatggccaaggccagcaccacgccgatcagaatcttgctgccacggctggctcctgagccaccggacgctggcttacgggtgatacgcggattggccggaccacgtggagggcgggatgacccggaggggccagcgttggtgttgtgggccggaccgtccccatcggcctcgacatcgaggatgatcggatcgtcattgttcgcattgttgcgtcgtgaatcgccgccattgccgaacagtactgagaaaggatcgttaaaagacataactcaagcctatcgaaagggcgggaggtcggttatgccctgagcacagaatgaggcaacatcctgttctacgctctgttctacgcttgccggtatggacagacaacggccacaacatatgcgtccctcagcacacgccacacgccaacttcggcacaggagcattccaatcgtggcggcaatatgtgctttggcggtggtgttggccggtgtggcagtctacggatggcatgtcggatggttcgccaaatccacatcaaacggcaacaccaccactccccagacctcccagacgagtgcgttaccgcgcaccgacgttccttccccgaagaagaacgacgatccggcggcacaagcccaacgtgcggtatccgccatgacgcttgaggaacgtgtgggacagttagtgatggtgccgttgttcgccggttccgaaccctcctcgttggcttcaacaatcgccgacgagcacattggctcggccattctcattggcaattggaataccggcgtcgatacggtcaagaccgcgaccgcgcaactccaaggatatgcgccggccggcaatcgtctcatcatcgccaccgatcaggagggtggtcaggtacagcatctgactggtaccggtttcgacacaatgcccagtgccgttgagcagggcacaatgtccgctgacgcattgcgtcaatcggcaggcacgtggggttcgcaattagccactgctggcataaatgtcgatttggcaccggtgcttggcacagtggttggcaatcgtgcctcaaatgctccgattggcgcgctggatcgtgatttcggattggatgcggccggcaacgccgaacatggcatcgccgttattgaaggtttgcgagacgctcaagtcggtgcggcggtcaaacattatcctgggttgggcgcggtaagcggcaataccgacttcaccaccgaaggcattctggatacgaccaccacgttggacggggccgaggcaggtgcctttgaccaggcgattaccaaggccgatcctgcaatggtgatgatgtcgtcagccacgtatcaatccatcgacccgaataatccggcggtgttttcttctacgattatcgacggtcatattcgcaacgtcctgaagtacacgggcgtggtgatttcggattcgatatctgccgaagcgttgagcagctacgatgtaagccaattgggagtaaatcttgtcgaggcgggcggcgacatgtcctgcatcggtcagacggattatgtaaagccaattgtggacggcctcaacgaacgggcgaagtccgatccggctttcgcttcgaaggtgacggcggcggcgactcgcgtaatgacattgaaaatcaagatgggactggcctgaccgttcatccttgcactggcgaggattgatgcgcgctgattcgcgctaatcctcaccagccctcgtacaaatgcacactagtcctcgtacgaatcgtcagtcctcgtacgaatacagaccatgcttgccgatgtattgcaccacgccgtcgggcaccagataccagaccggctcgtcgtgttcggcgcggcggcgtacatcggtcgaggagatggccaaggccgggatctcaagcgtatcgaccttgccttcgggcaaggtcacgccgtccgggctggagtagccggggcgcgtgacggccacgaagtgagcgaggtcccacatgaggtcggcgtccttccactgcatgatttcggccacggcgtctgcgccggtgatgaagaacagctcggcgtcgggatgttgggcgcggatatcgcgcagagtgtcgatggtgtaggtgacgcccggacggtcgatgtcgacacgcgagacggtgaatttggggttggatgcggtggcgatcacagtcatcagataccgatcctcggcgttggtgacgtgcttgtccagcttgaacacaggtcggccggtgggcacgaaaatcacctcatcgaggtcatacacccaggcgacttcagaggcggcgaccaagtggccgttgtggatcgggtcgaacgtgccgcccatgatgccgacgcgcaggcgtgtatgccagttgccgcgtgcggaaagcctgcctttgccgtggctgctggccccggccggtacggacaggtcggacatgcgccgttcggtttcgccttgggtgacggcaatgatttcggcgggctcggcggattccactgttttttcggactgaactgacgcagccgttttgtggctgccggtaacaccactcatgcctggccgccctcgccggcggcgtcatcggctgattcggtttcctcttcgatttcgccggcggagggattgtcttccttgggatcgatcttgcccatgtcttcatcccattcgtcttggaccacgcgacgaatctcggcgaaggtgggcagcgggaagtccggctggtagaggcggcggacctcggccacgcgctcggtgatgcggatgagcgtgtcggtcatgccgtcgaggtcgccgtcgtgctccatctggctgtatttgccgatgtagccttccatgagttccatgtgttcgcgcacgatcttgagctgggcatcgttgaggtccacgacttcgggtgaatcggtctcgggccagccgatgagcacggcgtccgcgtattcgagcgacgcacgctgggcggcggaggcgatgccgtcctcaatctgcacgaggaacacatagcggacgatgctgagccgttcggccgcgatcttcaggccgagcttgggatcgttgaggtcgatgtcgggccgcagttcgcttgccttgtttgccgtgtcagccgtagtgttcatgttgccgtcctcgttcatgcgcgcacctggcctgttccgtaaccgatccacttggtggtggtcatctcccgcaatcccatgggaccgcgtgcgtgcatcttctgcgtagaaatgccaagctcagcaccaaagccaaacacgccgccatcggtgaagcgagtggaggcgttgaccatgaccacggccgagtcgatgcgcttggcgaattcctcgatggccgcataatcctcggcgatgatggattcggtgtggcccgtggaatgcgtgttgatgtggtcgatggccgcgcccagatccggcaccaccttgatgcccatcttgagggccagatattcagtgtcccaatcctcctcggtggcgcggttgaggtcaaggccctcgatcgccgcgccggagatgatgtcatacgacgtggtgtcggcctgcagtacaacgttcgcctcggccagagcggcggcgatctgcggcaggaattcggcggcgacatccttatgaaccaatagcttctcggcggcattgcacacacccacgcgctgggttttggcgttgatgatgatcaggatggccttggcgagatcaccggacttgtcgatgtagatatgcacgttgccggcaccggtttcgatgaccggcactttggagttgcgcacgacggcttggatcagacccgctcctcctcgcggcacgagcacgtcgatatggcctcgcgcctccatcatggcggtggctccggcgcgtccgtactggtcgacggattgcaccagtgcggattcgaaaccgtgtgcttcaagcaccggggcgatgacgcccagcgtggcagcattggtgcgttcggcggcgtgaccgcctcgcagcaacgcggcattgccagatttaaggcacaggctggccacgtccacagtgacgttcggccgggcctcataaatcatgccgatgacgcccatcggtacgcgcgtctgggtaaggcgcagaccgttgggcagattgtatccgcgcacgatttcgccgaccggatcaggcaaggtggccacatgacgcacgccttgggcggcggcggccacgcgcggcacgtcgaacagcaggcggtcaagcttgcccgcatccatgccgttttccttggattcgagcatgtccagcgcgttggcggcttcgatgtccgcggcgtgcccgtccagcgcgtccgcaatggcgagcagcagttcgtttttggcttcggtatttgcctgtgcaagacgctcctgcgcgcgtgcggcctgatcggcctggcggcacaccgcgtcgaacacctcaggactcaattcatcgctcataacagtcaagcgtaactcacaacgcggctgattgcttactccgacccgcttgttatgggatgtctgacgttttgaatcgcaaacagaaccggctcccctccgtctcaggcgggaagccggtgacgtgatgcgctccggtcagcgaatcatcactaaccggtgcaccacggtggattagcgaatcagcaaatcagtggatctggtccaggtcggggtagagcgggaagtcttcggcgagcttgtcgacgcgagccttcagcgcggtcacgtcggcggacggtccggcggcgagcgcggtgccgatgatgtcggccacctcctcatattccttcgggccgaaaccgcgggtggccagggcggacgtgccgattctcaggcccgaggccaccgaggccgggcgcgggtcgaagggcacggtgttgcggttgatggtgatgccgcaggcggcgagcagatcctcgccctgctggccgtccatctcgctgttgcgcaggtcgaccatcaccaggtgcacgtcagtgccgccggtcagcacgctgatgccgttggccttgacgtcatcggccagtagtcgttcggcaaggatcttggcgccgtcgagcgtgcgctgcatacggtccttgaattcgggggtgccggccaccttgaagctcacggccttgcccgcgatcacatgcatgagcggaccgccctgctggccggggaacacggaggagttgagcttcttggcgtattcctgcttggcgaggatgaagccggagcgcgggccgccgaaggtcttgtgcgcggtggaagagaccacgtcggcgtacggcacaggactcgggtgcaggcccgcggctacgagtccggcgaagtgggccatgtcgacccagaatttggcgccgacctcgtcggcgatctccttcatggccttgaagtcctcgatgcgcgggtaggcggaccaaccgccgatgatcatggccgggtgggtttcgagcgcacgctggcggatgatttccgggtcgatgcggaaggtctcggggttcacgccataagcctcggcatggtagaagcggccggagaagttgattttcatgccgtgggtcaggtggccgccgtggtcgagggccaggccgagcacggtgtcgccgggcttgacgagcgcctggtagacggcggcgttggcttgggcaccggagtgcggctggacgttggcgtattcggcgccgaacagggccttggcgcgttcgcgggcgatggtttcgacttggtccacgtattcgcagccgccatagtagcggcggccggggtagccttcggcgtatttgttggtcagcacggagccctggcattgcagtaccgctcgcggcacgaagttctcagaggcgatcatctcaaggccattgcgctggcggcccagttcggagtccagcagttcggcgatctcaggatcggtttcgcagatcggcgcgttgaaagcatcggtcgctttctgcgcaaggggtgaagcggtcatgggtgctcctttggtatgggcgacaattgattcgccgttgccgccttactgtatggccggtttgtagccggcctgtttcatgatatggccggtccccgttcgatggcaatggtgattttcgccggtttgaccggtcggctacgcgagacggacggcccttctgcccacggcccacgctaaactggtgtggattcatcatccctttcaggcagaaggattcatcgtgacaaccaccttccattccacccgcagcaccaccgattcgctgaccgccaagcaggcgattcgtaagggcatcgccgatgacggcggcctgttcgtttcggacgcgttgggcaagaccaaggtggacgtggcctccctgccgggcaagtcgtaccagcagatcgccgccgaggtgctgggcgcgctgctgccggacttcacggccgaggagctgggccagtgcatcgccgacgcctacggcgaacagtggtccgatgagcgcatcaccccactcaagcccctgggtgacgattacgtgctcgaactgttcaacggtccgacttccgcgttcaaggacgtggcgctgcagatcctgccgcgcttcatggcgcacaccacgccggccgatggcgacgcggacgagaagatcatgatcctcaccgccacctccggcgacaccggcaaggccgcgctggccggcttcgcggacgccccgggcaccgcgatcaccgtcttctacccggaaggcaaggtctcccaggtccaggaactgcagatgaccacgcaggccggctccaacgtgcaggtggccgccgtggaaggcaacttcgacgacgcccagtccgcggtcaagcgcatcttcggcgaccgtgccctggccgagcgtctcgccggcaattcgcacgtggtgctttcctccgccaactccatcaacgtgggccgtctggtgccgcaggtcgtctactacttctccgcttacgcccagctgctcgccgaccaggtgatcaatgtcggcgatgaggtcgagttcgtggtcccgaccggcaatttcggcgatatcctcgccggctactatgccaagctgctcggtctgccggtcaagcacctcgtggtggcttccgacaagaacaacgtgctgttcgacttcctgaccaccggtacctacaaccgccagcgcccgttcttccagaccatctccccctcgatggacatcctcatctcctccaacctggagcgcatgctgtactacttgtccgagggcgacacccgtctgatctccatgctgatgaacgacctcaacaagtggggcacgtacgagatcccggaagaactgctggccaagattcgtcagatcttcggcaccggttgggccgatgaggatcaggtacgcgagtccatcaagcactgctgggacgagaaccgctacgtgatcgatccgcacaccgcctgcggctactacctgcttgagcagatgccgcgagacccgctgaccccgcgcgtgctgctctccaccgccagcccctacaagttcccgcgcgtggtgaacgaggcattgggcttcgacgccaccggcaccgacttcgagtgcatggatgtgctggcccacgagaccggcaccaccgccccggccgccctgcgtggtcttgagaccgccgacgtgcggttcaaggacgtcgtggccatcgacggcatggaggactacgtggagaaggccgcccaggcgctgtaaaacataccagcacattggctcccctcagagcggggagccattttttacatcagaattgcgtttacatcagtatcgcggcgactggcagtcctatggcgattgccaacagcacgatagtgccgatgatcacgctggggcgtgcgaggttgacggtccagccgacgccgaaacgtttggggatcatgatggcaggatcgtcacggttgatgtagatgatgccgccaatccagtgcaggtcatcgtcatacggcatggcattatcgtccgaaatgtcaccgccgtcactgtgccgaacaccggcatagacgcgcgccccgttctgcccgtaatacacgccgatcatcagcgcgccgaccagagccgccacggcgatgaacatgccgatgatgccgattagattgatatccagcacgccaatggtgacaagctgaacgcctaggcccaatccaccggctgccagcagtccgatgaccagcacgtagatgctccagacccgcgagaacacaccataggcatacccggtggcggcggggtggtcgggatcaatcgggtgcttggcgtagatgatcgcggcatggctggccaccatcaccgctgccagcaccacctgcgcgagcacggcgtaccaaatcaccatcggactcttctcggcccaaccgttcacattgccggcgatatccgcatgaatcggcacccgctccggcatccggtcatagcccagcaacccgacagcaatggtgacagcgagacaaacgacttgcagcaattcccacttcaagctcatcgggtcgggattgtcccgctcacctatcaatgctgcacggcgggcactggacgcctcccatccctgatcgactttgatggatagtactttgcggcgaaacatctgctgcagcacgaaaccacatatcgcaatcgccaccgctgcgatggacacagtccagaacgccgcgtcgactccgcagagttgccaaacggccagcgagaccagtatggcgcatacgccaagcgccaccgtaattcccgaaaacgcgactttaaatccgcgaatgcgcgtattgacatgggcggcggccggcactgtgacaccgaacacctcatgccggtcggtaacccatggaacccctgccaggccggcggtcactatcaccggcaacagtaaaaacgcacacaacgcgatgttcatcgacacgactgtattattcatcgttatctcccctgatttccttttgttgcaccgtcagtaacgctctgcgaggagcgcacgccgtatgcccgttcgcattgccgtttggtggcatcgaggaatgcggccgaatcaccgccgcgcgccctgtaggccaaggcaaggcgatagagttcctcgcccatccgctcatcctgtgcttcggcagttcggttcggtgcttctcccccgccgtcatgctcggcgacggttgcaccggcaccacgacgcataacgatgtatccctcgtcacgcaacagcgcataggccttgttcaccgtgtgcaggttgatgccaaggtccacggccagcgagcgcacggacggtaacgagtcacctggcgacagctcatcgcccgcgatggctgcgatgagctgcctgtgcagctgctcgtaaatcggcacgtcactgcgctgatcgatttccacaatcacggtcaattccacccctctcaagaactgttctatttgttctacatcaaatataacagttttgccgtatgagtcaagatatgcgaatctcggttgaacatccggcaatgggccaacggcgtgttgcttgaattttctaggaaggcgggaatcgccatgctgccggcgaatgggaaaatccatgtggcttgtcagattctgttcctgcaactgaatagtcccatgagggagtagacagcattgcggcgaagggctcggcccaaaccgcaataaagcgtgccgagcgccaaagccgccaacaccggtatgacgccgctgcaggagaagctcgcgaagctggacgaacttcatgggcggcaccgccgaacagcagtcgaccattctgttcacgctgttcgtggtgttccagccgttcaacgccttcaacagccgcgagctgggcaacgccagcctgttcgccaatctgctacgcaataaggtgatgatcggcgtgttcgcgctgatgttcgcacttcaggtgctggtggtgcagttcggcggagcgatgttccgcaccgtgccgctgccgatcgacatgtggctgaagatcatcgcggtcggacagatgcgcggttagagttctttggctcggtagatgcggatggctataagcatggagccaaaatatgcgagcagacacaacacggcgagaacaagcgccgtatgccaccagatcgtcaggaaatcggtaatattcagcaaaagccattgccagtcaacaggcaatcgggccagcagcgcaatgacggcatacaagccaaccaggaccacgccagaggccaccatcatcttgcggaaggtgaaccggtatgcacaggccagcagcaccgacccaagaatgatagccaaagcgaagatgaaagcacctgctgccaaggtaccgatccaccccatatctgctatatcgccaaagacaatgaagacgccgccgcatatcaccacgtccaaagcccagagcaggccaaccaccaacagaaaaaggtaccgacctacaacttgtgcagtgcgtgaaacaggaatcagc

SEQ ID NO: 3523 - DNA, 8292 bp, Unknown
  R85_18m  MAG No. k141_13475
cgcaccatcgcggagaacaagaacgcctactacaaagcattcatggaggcggaggacaagctgaactgcggcgaactcacgctcttcgtgaacaccatcctcggattcatccaacaagcccaggatgagctgattgacgaactcagtatcaaggtcgatcagctcgacaaaggtcggatactctgtacacagcttgaaaagaggcatggcctatcgcgcaatgccgtctcggtgctctatggcgtgattcaggaagaactgttcgactcgtccaaatccatgtcgttggacgaagtggcccatcacatcggactgtccaaacagagcgcaaggaaatacgtggaagagctcttggccgcggggctggtcgtacagaccggaaaacgcccgctgaaaatacaggtggcgaaatcattgaggaatgttctcgccacaggagccgacgagaacgcggaagcctaagaaaagtagacgcaaacatctcatctcaacgaggttcataaaggttcgtaacatgaagaaaggtctgggcaaccaacactgctcggacctttccgcaacactcccgtcagtcgctttccgcgacggctcccctcaggaaggggagccgaggaaaactacttgctgacgttaaatttgaactccacaatatctccgtcggccatgacgtagtcgcggccttcctgacggagcttgccttcctccttgatcttggccatggagccgtcggcggccacgaaatcgtcgtaggagacgatgtcagccttgatgaagcccttttcgaagtcggtgtgaatcacgccggcggcctgcggggcggtccagcccttgtggatctgccaagcgcgcacttccttgacgcctgcagtcaggaaggtctgcagtccgaggatgtcgaagcccacgcgggccagttggtcgagaccggactcgctcaagccagcgtcggccagcatttcgcgggcgtccgcctcgtcgagctcggtcaggtctgcctcgaactgagcgttgaggaacacggccggagccggggccacggatgcggcgagctttgcctgcaggttcttgttggccagctcgttgtcgtccacgttgaacacgtagatgaacggcttggcggtcatcagatgcaggtcgtagacggaatccttgtcgaagcggccttcgcgtgcggccttgtcgagcgtctcgccggcttcaaggatggtctttgcctgcttgactgcgtccatgtaggccggctcgatcttcttgcccctcagatccttctccagcttgggcagcgcgttttcgatggtctgcaggtcggcgaggatcagctcggtgttgatggtgtcgatgtcgtcggccggatccaccttgccgttgacgtggacgatgtcgtcgtcctcgaaggcgcgcacgacctcgcagatcgcgtccgcctcgcggatgttggccaggaacttgttgcccaggccttcgccttcggaggcgcccttgacgatgccggcgatgtccacgaaggtcaccgtggcgggcacgaccttttcggtgtggaccagcttggccagcacgggcaaacgcttgtccggcaatggtacgatgccggtgttcggctcgatggtggcgaacgggtagttttcggccagcacgttgttgcgggtcagtgcgttgaacatggtggacttgccgacgttgggcagtccgacgattccgatagtaagagacatgattccagtctagggagaagctggacacattgaacgtgcatgtggtgaaccggccatatgcaaaggcctccgagcatacggctcgaaggccttgactgtgatatgcgaatatacgcgaactctgattggcagtcagccgacgatggcgtctacggcgtcgatgaccgagccgcggaacccgtccttttcaagctgggcgacgcccttgatggtggtaccaccgggcgagcagacggcgtccttcatggcaccgggatgggtttcagtggccatgtagagcgcgccgacaccttcgaccatcttggcggcgagccggtaggcggtggctcgctgcagaccgtactgcacgccggcgtcgcccaaggcctcgatgtacatgtcagtgaaggcgggcgcgcagccggccaccaccatggcgatgttcatatgcggggtgtccacgcgctcgatgaggctgatggggccgaatagctgctcgaaggtttcggtttcgtcgtaggtcagtgtgttgacggattcggtgacgagcacgcccttgcccacggccatcggagtgttcggaatggtgcactggatatggatgtccggggagtcgacggattcgccgtcttcggtggtgaacaggtcctggtacttcttgagattccagccggcggcgatggagacgacgatcttgcccggcttggcaagttcgtcggccagcggcttgacgacggcggcgatctggtagggcttgatggcgatgatgaccacgtcggcggccgtcaccacttccagcgcattgcgcaacggacgcacgccaagttcggcggtggtcttctcaagcttgtcgtagtgggcggcgcaggcgaccatctggccgccggcgaccacgcccgcgtcaacgaagccttgggcgatggcctgggccatgttgccatatccgataaaaccgatggtgaggttctgagtcatacgttttcctttcgtgcatgtatacagagctccctcatcagagggagcttgcttccttgagtcagaacagttcttcgaggtcgccccggttaagggcttcgtcatagagatgcttgaagacgagcgggccgtgcagaccatcatgctcgaattcgttggtggtccagtagtggctgttgcccacgcggctcaaggtgtcgagctgcaggccggaatcgacatacatgtcgtcgaaatagacggcggcctgcaacggcacctcattgcgggccagctgttcttcgtcatagatcacgccgaagtgcgtgtcttccatgagcaggtccatggccggcctgaacggacgtaacgcagactcctgttcgaacatccacgggaacatggcctcgccggtgaagttgagcgggcgttcatcagcaccgaattcgggcttgccatcgcgcacgcgctgggcggcccaacgaatgggctcgtcaagctcaccgttggcgtagatgaactcctgcagcggccagtacagtgggcgcgacgacgtggcgttcatcactttggtcaaaaattcgtcagacaacggcgagtcggcagaagcggaaccatcgccatcaaggaaggcgtcgtcaagaatccaatggacacgctcgaagctcggcttcatgccaaagtcggatcccaagcactggaagcgttcgacggtgagcgggtcgccgttcggcatcagcgggaagccgtgggcggccatgccggcgatcacgccaagtcgatgctccacatcggtaccagccatcggattcagtacggaatcggtgagtttgccaacgaattcggcgacttccgcagtagtcggcagcttgtcggcgatggcggccacgcgctccttgtcctgtgggtagcgctcgtagaactgagtcgtcttgcgcaccatgcgcgggaaggtatgctcgtacacttcagcggcgtcggccggcacgtgcgggatgccgccggtggtgaagctggcgattacgccggccgggaacagggacagtgtggtcagggtcaggaagccgccgtagctttggcccatcgtcacccacttgcggccaccgaattcggtcaggcgcagatgttcgaagtcacgcacgatggaatcggcaaggaacttcttcaggtagtcggcttgggctcgtgcgccggccgcggcatcatcgtcgtgcgcggcggcgatgcgggccatggcgtgcgtgtccacgcgcgaggagcggccggtgccgcgctggtcgggcaggatcacccggaagtgcctgatggcctcctcgatccatccgtcggaggtcgggctgttgaggcgcgggccggcaccgccgggaccgccttgcaggaaaatcagcaggggcaggtcgtcatgcacgtgttcgggcgcggtgaccacgcgatagaacagtttgatggtttcgccgtcgaacgcttggcctggctcatggccggtccagtcgagcggaacatcgatggaatggtcctctatggccagtccgggcacgtagtatttgctcagcattgtcatggttcaagactctagtccataaatcctcctgaagagtgataccggttcgtcgccggacacgctagccttgcgcgttatggagattatggcgcgcgtgagggcatggtgcgcacgggagtcgacccgcacactgctatgggacacgttgctcgccgcggcgctgatcgccggctgcgtgccgttcatcggcgtcaccagccctgattcgacgggcggcatattgtttcccgcaactcaggcgtcgatgacgctgtggtcgctgccggtcttcgtgccgctgatgctgcgcaggtattgcccggagccggcggcctggctgttcgtggcgctgaccatcacgcatcttgtgttcggcccggcgatcatgtatttcgatttctacgccctgatcatggtgtattcggtgattctgtacggcaatccccgacattcctggcggttcatcgtcacggcgttcgtcatgggactggtcgcggcgatggtctggtcggtgtctttcaacgtgggtccgctgttcgacggaccttcctccggttcgcgcgtcatccgcgacggctggctgtccgatgccatcacgatgcccacatgcccggcggtcaccggcgtcgtgggggcaagcggcgccgtcaactgcggggccaagatgctcgcggacttcggcatggaggcggcgttcatcgaatcgagcgtgctgagcgtcatcatcatggccttgtggcagcgagcgcgcaacgccacgctggcggccatgcgcgagcgcaacgcttccattgtggcgaaagaggccgaggagacgcgcatcgcggcgctggccgaacgcgcacgcatcgcccgtgatatgcatgatgtggtggcacatacgctctccacgattattgtgcagtcggatggcggccggtatgcgggtgcgcatgatctggccatcgccaagcacacgatgggtacgattcgccatgaagcggaacgcgcgcagcatgatatgcagcgtttgttcaatgtgttcggtgcgagtggcagtaccggatatgccgacatcgattcgctgtttgacggtcatctggtggtgtcccggcatatgaccggcaaagcgcaacctgaccggctgtccgccgacgcggaaaccgccgtgttccgtcttgtgcaggaagcgctgaccaatacgcgcaaacatgcgggcgagggtgctaaagccaccatcgatgaaatctggtcaaacgatgtgctgtcgattaccgtatccgataacggccgtggcgcgacgtctgcagcagacggtcataagcccggatacggattggttggtatgcacgaacgcattgagtcgttgggtggcagcgtgcaggccggcccagggccgaatggtggctttattgtggcggctacgattccgctctcccctgccgccccacagtctggcaccgatacggaggatccggtgctaaccgttatctcgcgtatacgaggattgatggatcgggcgcgccccaaagtactcgaccaaggagatacgcgtgagtcgaactgggtgggtcgatttgcgcagtggaccgagcggcactatcttctgatggacgttatcgccactatcgtgctgattgcgctatttgattccgccacgtatggcgatttgcaaatgatcggcaatgccccgtattcgccgaaccgcgtgccgactataacgctgacgattattatgctctcgcctttggcgttccgtcgccgcttcccagagggcagcgcgctggcgatggcggtgctgtctgctgtgcaactgttgttcttgccatcgattttgaccatcaatatgtttgcgatggtatccgtgtattcggcggtattgtatggacgagagtccgcttggcgctgggtgagcgtggcgctggcagccgattcgtggcttgcgggcatcaaggtgatggctgggtggaatggatacagtcagctgttccatctgtttttgcccgatggtagttccatgctctcaaaatggaggctggttttgtccggcttgctgccgggcgcgggaatcatgttggtcggttttgcctgcattgcgatggctcgatggagccgttcgcgtggcgcaaacgctctggtgctgttgcgacgcgaggaggcgctgcgagccgagcaggagcggcaaaaggtgctggcggccaacttagagcgcaaccgtattagtgcggcgatgcaaaccgaagtactgaccacgctggaatcggtgattgcgcaggctgacgagggactggtgatgctcaacgccgaacctgcgcctgatagtatgcagattgaagcggcttttgccgcgattggtgctcgggggcgcgccgcattggctcatatgcgtcagctgttgagagtgttgcgtgaaaccgggttcagcgacgaggcccatgagggtgtgcagccggatatgcagttgcgaccggcggcttcgttggatagtcagatgcaacacgcgggaacgttaccccggtgagagacttgcccaataagaactcagggaacaatcagggtgtttatggagcggcgctccgataggaaacggatacagtggagagcatgaacgagagcagaagcattcgcgtgattattgcggacgaccaggagctggtacgtgccggttttgccatggtcattggttcgcaaccggatatggaggtggtcgggcaggcgtccgacggcgcccaagccgtggcgttggcggaatccctgcatcccgacgtggtgctgatggatgtgcgcatgcccggcatggatggcattgaggccacgagccgtattacctcactctccgccgcgccggacaacgcggccgattcggccagcccggccgccgacgcgaccgtctcggccgaatcggctgacgaccggccgacgcgcgtaatcattctgacgacgttcgatttggacgagtatgtgatggcggccatcaatgccggcgcctcgggcttcctgctcaaggacaccgaaccggaaacgttgctcaattcgattcgtactgtattccaaggcaatgcgattatcgcgccttccgccaccaagcgactcatcgaaaagatgatgcaggacggttacgcgcagcatggttcgctgaccggcgatgtcgcgcgctccggtgccgtgtacggttccgccgtcggcgtctctggcggtgcggccggcaacggtgccggctcgatgaccggcatcccctcccctgccggggccgcttccgacggttccaatacgtcacgcccagcatacaccgatcccgaactggatctgcttaccgaccgtgaacgcgaggtgctggtggagatcgcccatggtctgagcaatcaggagatcgcggacaagctctttatctcccttcccaccgtcaaaacccacgtggcgcatatcctcgccaaaatcaacgcccgtgaccgcgtacaggctgtagtcttcgcgtacgataacgggctggtgtaacaaaaaagctccctctgatgagggagcttattgctctacgcttcggccaaggcttcaactggtggcgttttgacggcccggcgggcgggtgccacgctggccagcagagcggcgagcgcggcgacgccgagcaccacaccgttggtggcccattcgaacgggaacacggtgtcgccgtacaaactaaacaccatgtaggatccgagccagccgaacagggtacccaataccactcccaccacgccggagacgagcgaaagcagcaacgcctccaccgccagcgagcgccgcagttggccgcgcgtcatgccgatggcacgcaaggtggcggattcgcgtgtgcgttcgatcaccgacagactcagcgtgttcgctacgccgaccaaggcgatgagcacagccaccgcaatcaaaccgaccaacaatgccatcatgccgttgatcatggtctcccattgcgtacgttcggccaccggaccggtcacggtaacgccagcactggcggagaacacattctgcacgttggtgaatacgtcgttcagcgcaacacccgcgccctcggcgtcaatacgcataagcatgatatgcccgtcggccttgattccaccgttggtgaagtggctggcgtccacg

SEQ ID NO: 3524 - DNA, 6343 bp, Unknown
  R85_18m  MAG No. k141_13565
gactgggcggcttcggactgagtgccttcagaatgctgtgcaacagcgtccaccggctgagaatcgtcggtattcggagcggactgaacgttttcggctgacttgcttgcgccagccaccacatcggattcaacaaccgccgccgacgccactgccggctcgcttgtgctgggagcgtgcttaacaacggcatgggcgatggcatctaccgggacaataccggagatcctgctgtgcttggatgcgggcgttacagtcgtcgactcaggttcggtctgctgcttcggcagtaccacggagtccatggcctgctggtttttgcgttcggtctcctgctcggcatgctgggccaacgcatccgcgaacaggtcacggggtatggccggctcatcgtttttcgtcactggctgcgtgatattcagcgagccaagttcaagctcgtcgaccttgcgtcgaacattatccgcgctgaagatggcggtcggctcgccggcccgcaaatcaagaatatcgtcgacagacatatccgccgcatccggctcctgcggtgcttcgtgaaccgcatagccaaacaaatcaggcaccttaaggtcgagtggctttgccactggatcgtcgatacgaatgaagtccgcaggcacatcaccgaactgcatgcgcatgggagacgtcggcaacaggaactcgacattggccggcaagcgcaacaaatcaccattttcccgcaccacatacgatccattggtcgatccaagatcgcggaccgaagccgtaccattgctttttaccgtgaacatggcgtgccgtttggacatcgatttggtctgatcggcgacgtcaaggcgggtgttgccatcatcggcaagggggcgtaacggcttacggccgatttccacgcactcccccggcttgacgctgatccggtcgacaccgttgatcttcaccgtccactcgctcaccgtgaccgccttcctggacacactatttgaccacactacgtgccattgtgtcatcttttaccggcttttggcggattactgggcacagaattgacaactttcgctcattgccagctttgtgattccacgccggatcgcgttctccgcctcgccctcgtcaactagtctactcagtatgcggaaaccccgcagcctgaaacacaggtgcggggttcctcgaaaagctgtgattgcggcttatgccgcacaaatcacttgagctcgacggtggcgccagcctcttccagctgagccttggccttctcggcatcttccttcttggccttctcgaggacggccttcggagcgccgtcgacgagagccttggcctcggccaggccgagggaggtgatggcgcggacagccttgatgacctggatcttcttgtcgccgacggcggagaggatgacgtcgaactcatccttctcttcctcagccggagcagcagcgccagcaacagcggcaacagcggcaaccggagcggcagcctcgacgtcgaacttctcctcgaaggccttcacgaactcggagagctcgaccagggtcatctcgccgaaggcttccagcagctcatcgttggtgtacttagccattatggcttcctttcaatcttggcggcggacgaagtggtagatccgctgcctaataaaccttattgtttaaattatcgaagcgactgattcatgccgtgagggcgtaaatcaggcagccttctcctgcttttcgcgcagggcgtcgatcgtacgcacagccttggtaggcagggcgttgaacaggtacgcggccttggccatcgatgccttgatgtcgccggcgaattcggcaagcagctgcgggcgggacttgaggtctgccagcttcttggcgccctcggcatcgtagacagtgccgtcagcggcggcacccttgatgacaagagccttgttgtccttggcgaagtcacggatgaccttcgcagcctcgatgaagtcgcccttcacgaaggtgatggcggtcgggccggagagaatctcgtcgagaccctcgatgcccgcttccttggcggcgatgcgtgccagcgtgttctttgccacggtgtaggaagtatcgcggcctagcttttcacgcagatcggaaatctgcggaacggtaagcccgcggtactcggtcaggtagacggcgtcagcgttacggaattcttccgtaagctgagcgactaccgcttccttttcgggcctcttcatggcgttccttcctaagtcggccgttgacttggagttcggaactttcggccgggcaacaaaaaagccctgcgcacaggcagagcaatataatctcgcgaagcgaccttcgccggcccttgacgggcttatatctctcaacctgcgctggcttggcgaaccaaacttcggaaatgcactcgcgcgcacttcaaccaacggtctgtggtttacggatgattagattacggatggtcagcgacattgcagaattcgggcgtgtcgcaaggcattacaacgtggcggcgtactgggctacggacgcggtgacttccttcagatagtcgagcgagcgacgccagtggccgggcacctcgatcgaatggttggcatccgggtattcgtgcacgtgcggggtgagcgcgttggcgcgggctcgatcgtagaacgggtcggcggtgccggcgcagatcagcggtgccgggccggagtatcgggagctggcggcgtgcgactggtcggccagttctgcgcggatgatcgcccttgcttcggccacgctcggagcctcggattcggcgacgatatcatcgccgacagccggcaccggaatcacccgggcggatggatcgaagtcggcgtgatgcagcaccggggtcagcagcacgaacggcagaccgtagtgtgaggccacatgtgggtaggtcatcgtcgtcagcgacttgccgatcagcaacaggcgagggccggacggggtgtcggaatcacggttcggcgagccagctgcgccatcggccagcacggtagcagaatcatcggcggcaacgccatccccggaatcaccggctttacccgcgccggactcgcgcgcggcggccatccagccgtcaatcgcctgattgaggaccggaatcaccgtggacaggtcgtcggaagcgttgcgtacgttcatgcggtcgattcgccagccggcctcgaccagagcctgggccgaccagtagagcagcggacggtcgcagttgtagccggtgccaggcatcagcagtacgcggccgtactcctgaccgggcttgacgacattcttcttccaagaggtgatgctgacttcgacggccggtttcatcgcgcgccttccttccacgggtgtgccctgcgtgtccctgagttgttccgaattattctggcagtcagtctactcccggacccgttcacgttacctccacaagctataatcggccacggttctgattggatgcgcagcgcctgacgcgcgttgggcaggccgatcagggcgagtcgcaattctcgccggggccagccgcagcattatgcgcgcggtgcgcagccccgcataaaaccaaggaagtagagagtaaatggagaagttcttccatttgaaggaaaacggcacgaccgtctcgactgagattctggccggcctgaccacgttcttcgcgatggcctacatcatcgtcgtcaacccgcagatcctgtcgcagacgggtatgccgtggggcggcgtgttcctggccaccatcatcgcggccatcatcggcaccctggtcatgggcctgttcgccaatgtgccgtacgcccaggccgccggcatgggcctcaacgcgttcttcacctacaccgtgtgcttcggcctcggcttcagctggcagcagaccatgtgcatggtgttcctgtgcggcctgatcaacatcctcatcaccgtcaccaagatccgcaagatgatcatcatggccatcccggagtccctgcaacacgccatcggcggcggcatcggcctgttcgtggcctatgtgggcatgctgaacgtcggactgatcaagttcacccccggcgacccgaaagccgcagccaagggaggcgccgtggcggcgaccccgagtctggccgacttcaacgacaaggtgctatgggtcttcctgatcggcctcgtactggccattgtgttcaccgtgatgaaggttaagggcggcatgctgctggccatcgccatcaccaccgtgatcggcatcccgttcggcgttaccacctggtccaactcgcagtccatcagcgaaaccttctcccagctgccgcagaccttcggcgcgatcttctccgctgagggcttcccggcgctgttctccgacgtctccaagctgcctctggtcatcgtgaccatcttcgccttctccatgtccgatacgttcgacaccctgggcactttcatcggcaccggccgccgcaccggcatcttctccgccgaggatgagaaggctctggagaacggccacggcttctcctccaagatggacaaggccctgttcgccgactccatcgccacctccattggcgctatctgcggcacctcgaacaccaccacctacgtcgagtcttccgccggcatcgccgcaggcggccgcaccggcctgacctccgtggttgtggcgatctgcttcgccctgtccgcgttcctggccccggtcgtctccgccgtgccgtccgccgcaaccgccggcgtgctggtgatcgtcggctgcatgatggccgcttccctgaaggaagtcaagtgggacgacatcgccgaagccatcccggcgttcttcgcagccgtgttcatggccttctcctactccatctcctacggcatcgccggcggcttcatcatgtactgcatcgtgaagacctgcaagggcaaggccaaggaggttcacccgatcatctggattgtggccgcgctgttcattctggacttcgtgtgcatggcgattctgtaacgctgattgacaacggattagcctttaaggattaatccgccgccatacggcataaaggccgggctctcacaagggcccggcctttgttgttgccacagtgatcaacgcccatgagtaccttcgatgatcatccgccattcaatcaacggctggccatgactcggacatggcgcggcacggcaagcggattttgctgttgggcataacaacagacgagagaatagatccggtcgtgagcaacaggataggtgccatgcggtgccgtgtacaaactgttgtcagttgtcaacgctttttagcgtggctccaatcatcttaatggctgttttccgccattcttgatgcatgagaatagttgtcaactgacaactgaatgtacatggcagcagcacgagtgccctattcaacatcgaaatatgtagcgcgaagaagccgaaaaaccaaaaggcttctataccgaatgaaacggtatagaagccttttggtttgcgattaagctcttctcacccgagagaagctaaagaacgatcagtcctcgaatgccgaaccgttaagcgggaagccctgcgggcttcccgtaggtgagggggcggctatgccgcgaccgatccgtgagagggctttagtcctcgaacggatcaaagtcgcgacggacgcggcgacgcgggcgctcagtgcgctcttcgcggtcggcgcggtagtcgtcgtagttgtcgtcggtggcgtagcgcgggttgcggtccgagccacggccacggccgccacggaaaccgccacggcggtcatcacgatcgccacggtcatcgcgatcggaagagcgacggcgacgcggacgatcatcatctcgggagtcgcgagcatcacggtcatcgcgatcgtcgaagtcacggtcggcagaacgacggcgacgcggacgatcatcatcgcgatcatcgcgatcgaagtcacggtcatcggagcgacggcgacgcggacggtcgtcgtaatcatcctcgaagtcatcggagcgacggcgacgcggacggtcgtcacgatcgtcgaagtcacggtcatcgcgatcggagcgacggccacggctgccacggcgatcgtcacggtcaccacggccacggccgccacggcggtcatcgcgatcgccacggctcgggcgggcgttgttctcctgatcctcgaaaccagggatggccagggagatcttgccgcgatcatcgacaccctgaacgatcacctcaacggtgtcgccttccttgagcacgtcttcgacggcgtcaatacgctcgccgttggccaggttgcggatctgggagatgtgcagcaggccgtcagtgccgggggtgaggttcacgaaagcgccgaacgacgtggtcttgacgac

SEQ ID NO: 3525 - DNA, 5323 bp, Unknown
  R85_18m  MAG No. k141_13580
ccttgaagcaaatatgcgagaggcaattacatacgagattccatatgccacaaccgtcgttgccaataccgcaataaccagccacaatcgttgcgcgatgatggcattcgcggcatgggccaatcctttggtcaccgaagcaggcaaaatagatagcagtatgaatccagccaatacaacgacataaatcaccatcatcgtgacttgaagaccgcctagtttggtccacagataacccgtgggcacgataagcgcgaccatcagcgcggtgcagaaacctcccaacggagccgcccacagattgcccgcgaatgaccaatccggattgaccagcacttgcaacccgtcaatcagaacaatcatcgctatcgacaatacggaaatcaccaatccaaccacatatcgcgcggccacctgactcttcctcgaagccggaataatgccacgaagtcgatatccgttctgtaagtcagcaaccgccatggtcagcacccacatggcgcaggtgaataccgtcatgatgacacccatgcgatagccgaagccatccccataagcttcaccttgaaagatgacggagaacaacggtgccaacaacaacgagaacacagtccgttcgccgacgcacaggtaggccatatcgacgcgcaatgcagtggtcaatgcatgttgccgagaccgcgacaccctcagtattgcctccatggccgctcacctcccgctcaagtcacgattggaatcatgggcattggtcagtcgaatgatgtcatcaatggaagccgattcaacgacaagccccgaaaccaccgatgcaacagcatcaagcctgtctgaccggaccagcgcatcgaatccggtggcatacgtatgtgagcccagcactacgtccgcaggcagttgtgccagttcgtctggaccgcccttaatcaggcggaacgattcctcaaactcgtctttcggaccggtgtagtagagacggccatcggtgatgtaggtaatgaagtcagcagcacgttcgaggtcggcagtgatatgggtgctgaacagtaccgaatgttcgccatcctcaatgtaggcatgcaggatatccatgagttcgtcgcgggcaagcacatcgagtccgctggtcggctcgtcgagaatcagcagcttggcatcatgactcaatgcgatggccagcatcagcttcatctgcatgccgcgggaaagatccttgatatgtttcttgccgttctgtgcgtcaccaaggccaaaagtatccagatacttgtgatagcatccaccgtcccatgatggatacagtggcgcgacaatacgttcaatgttcttgacttgccactgttcatgcatgtagctgaagtcgaacaccacgccgagttgttctttgacgggctcctcgttggcgatgttgtcgaggccgagcacgtgaatcgaaccggcgtcgcggtggatcatgttgaggatgagtttgatgagggtggatttgccggcgccgttcgggccgatcagtcccatgatgtagcccttgggcaggtcgaaggtcacgtcgtccagcgtgaagccggaatcatagtgtttggtgacgtcggtgacctgcaacgccatcgcgtcggattcggatatggcggtcatgtccatggtcctttcttgaggttattccttgcggtattcctcttcgagcatgcggtccaatgcgttcagcggaatgccggcggctttggcgccccggcttgcctcggccaggctttcacgaatccgggtttcgagctgacgttgcatcagttcgttgcccttgtccatcacgaaagtgcctttgccttggatgttctgcaccacgccctcatcggccagttcgttgtacgccctggtgacggtgagtacggagatgcgcagctccttggcgagtttcctcaaggaaggcagggcctcgcccgccttcaactcgccgctgagcaccgccgaacggatttgggttttgatttgctcgtagatgggttcaccggacacggatgagatgatcagtttcacctatgcccctttcgattgtggttgactagcaccccagctgtttagctgttatacaacacagtataactgttctgcttaactgtcaaggtgtgttacataacagttgaacagtgaacaaacacctcgccaacatacagtgtcgaaacatgggccgtgcctacaatggcctcggaaaggggcacccatgcccaacaacgcccccgccgacagcccgccagcgggggtgtaacttttttatcacagcacgcgcggagcgtcgtggaagtcgaagaggacgccgtcggccaggtggcagatttcgggccaatcggaggcggaggagtcgtcgtgcatggcccagaccttcatgccgaccgatttggccgacttcatgccgaccagcaggtcttcgaacaccgtgcagtcgaccggcgcggcgcctaggcgcttggcggcgagcaggtagacgtcgggctggtccttgccgacgtcgttcgcgtcatcgacggagacgatatcgttgaacagatcgaacatgccgacgtggcgtagcgccggctcacgcagatgcgggggcagcgaggtggcgacacccagtttgacaccggaggctttcagatcgcgcagatagtcaagcgcgccgggtttggcttcgaccgtggtggaataggcgacgctggccatgtcgtcccattcctgcatgagctcttcgggcgtgtctttcagatcgaagcgcgcgatggtgtattcggcgatctggcggaattgcatggcggaaactttggtcatgtagtcgggcggcacttcgattccgcgcttgttcaggaagtcgatgtcgacttggtcccagactcccatggagtctaggagggtgccgtcgaggtcgaatatggcggctttggtcataggacactttccttcaacagttctcgggcgtggtctagggaggcttcggattcgctgccggagagcatgcgggcgatttcgtggacgcgggtttcgccgttgacttcggcgatggtggtgaccacgcccaaatcgtcgtcatcggcatccggcggctccttggtgaccacgaactgcgcgtccgcccacgaggcgacctgcgccaagtgggtgacgacgatgacctgcgcgctgcgggccagccgtgccagacgtttgcccagttcgaccgcggccttgccacccacgccggcgtcaacctcgtcgaagatgaaggtctggtcggcaccgccgcgcgtgtcggcggccaccagctccaaggccaacatcagtcggctcagttcaccgcccgaagcgcttttgcccatcggcaactgcggcgacccctcgaacggcgtaaacaggaacgcgatatcgtcgcgaccatacgggccgagcggatcatcggccttgtctcgcggcgtgacgcgcacttccaaggaggcgcccagcatggcgagcgagccgagttcttcagtgacgcgcgcgcccaagtcggcagcggcagccacgcgcgcggcgctcagcacgtcggcggcggcgagggccgcatcgtacagcgcctgccgttcggattcgagttcggcgaccttttccggcgaggcgtccagatcctccaaatcgaacgccgccttgtcccgccaagcgagcacgtcggccaaggtggggccccaccgacgggtgaggtcgccaagctcgtggatacggccgttgatctggtccagatcctccacgctgccttcgtcgcccagctcctggctcagggcgaacaccacgtcgcccaaatcggcattgatggattcaagccgatcggcctgctcggcgaacgtgccgccgacgcgaatcgcgcgcaacgaggtcaccgcatgattgatgagttccacggccgaagcgccgtcggcggcgtccacatccacctgcgaggcatccagcgcgcccagcgccgaacccacgccttgggcgatgtcggccgcgttttcgatgcgttcgcggcgcgccttcagctcctcgtcctcccccggctgcgggtcggttcggttgatgcggtcgatggattcgcgcaggtagtcggcctgttggcgggcagaggattcctgcgagcgcaggcgttccagccgctcatccatggcggccagcgcatcccacgccttgcggtaggcggccagttcggcttcgtctccggccacccggtccagaaactcgcgttgccgtgcggcggccgcgattttcagctgatcggtctggccatgaatgatgaccagttcgccggcgatggcccccagcaccgaacgcggtacggacttgccgccgagcacggcccgcgaacgtccggaagcgcgtacggtgcgggaaaggaacagttcgccgtcttcggggtcgacgcccgcgtcgtgggctttggccacggccgcggcagcaccggtgagcccgctgtcagaatcgtcagaaccggcatcgtcaccggcatcgttggtgtcgccggaatgttcagatgcgacggcatcatccgcgagcgcgaaaatcgcctgggcccaagcctcgtccgccccggccgagacgcgcgaggattcggcggccccaccggagaccagtcggatcgcggagagcagcatggatttgccggcgccggtctcaccggtgatggcggtcatgcctgcggccggcgcaatggcggcttctcgaatcggccccagattgcggatatcgagttcttcgagcatcaggctcctgccttgccgtcacgttcgcccggcttgtcgggatcggtaccagcgacgccagcgtcaccggcaacgccagccgcatacgcggccgccgggagcgtgtgcccgtgatgcagcggctggctcgaggcctcattgcgcgcgtgctcgcgccagccgaccacgggcagatcgaacttggagaccagacggttggtgaacggcacgccggagagtcgggcgaggcgcaaggtatcgcgcgattcgcgcaccatgacgcgcgtaccctgcggcagggcgcgctggcggcggccatcgcagcaaatccagccttcggacatggaatcgtccagaatatcgatggtgaaggtcgaaccggagccgatgatcagcggcctggcgaacagggcgtgcgcggccagcggaatcaactgcagggccttgacgttcggccacatgaccggacctcccgcggagaaggcgtaggcggtggaaccggtgggcgtggagacgatgacgccgtccgcgccgaacgagttcatctccacatcgtccacgcggatggacagttcgaccatcttgccccggtcggcgcgttccagcgtgatgtcgttcagcgcccaatcctc

SEQ ID NO: 3526 - DNA, 7142 bp, Unknown
  R85_18m  MAG No. k141_13831
aggcctgctcgggctccatgcctcccagcagacgacgcagacggtagatgaccggcagttcctgcggattggtgatgagctcctcgcggcgggtgccggaagcgttgatgtcgatggccgggaacagtcgcttgtccgccagctcgcgggacaggcgcagttccatgttgccggtgcccttgaactcctcgaagatcacctcgtccatcttggagccggtttccaccagcgccgaggagatgatggtcagggagccgccgttttcgatgttgcgggccgcgccgaagaacttcttcggcgggtagagggcctgcgcgtccacaccaccggacaggatgcggccggaggcgggggcggcgatgttgtaagcgcgagccagtcgggtcatggaatcgagcagtacgaccacgtcctggccgagctccacaagacgcttggcgcgttcgatggccagttcggcaaccgtggtgtgatcggaggccggacggtcgaaggtggaggagatgacctcgccctggaccgtgcgctccatatcggtgacctcttcggggcgctcgtccacgagcaccaccataaggtggacctcggggttgttggcggcgatggagttggcgatgttctgcagggtgatggtcttaccggccttcggcggggagacaatcagaccacgctggcccttgccgatcggggaaacgatgtccatgatacggccggtgagcttgttcggggcggtttcctgcttcaaacgctcctgcgggtacagcggcgtgagcttggagaactgcggacggttgagcgcttcttcaacgctttggccgttgatggaatcgatggcctgcagtggcacgaacttctggcgttggttgcgacgatcgccttcgcgcggggcgcgaatcgaaccatggacggcatcgcccttgcgcaggccgtacttcttgacctggcccatggaaacgtacacgtcgttcgggccgggcaggtagccggaagtgcgcacaaaagcgtaggagtcgagcacatcgacgatgccggccaccggcaccagatcctcctgcggctcttcgcggcggctatcacggtcattgcgatcgctacgattatcgcgatcatcatagcgacgatcatcatcggcgttgtcgcgatcacggccacgcatgcggcggttacggcgatcgttgcgatcattacggttatcgcgatcgttgcgatcgctacggtcgcggcggttacgacgcacaaactcgtgatcgtcgttctgctcgccgtcttcggacgtttcctcgtgcttctgcgtgggcagcgtggccaggatatcgtcgaggtcacgcacggtttcttcgctgttttccgcagtgcgacgacggcggcgaggctgctcgtcctcatcatcacggactcggcgaatcagcggaacttccacgtcctcatggcgctcgcggcgacgctcggtaggcgctgcatctcccaaatcgagcgtggccagcagatcgccggcctcatcggccttcttgcgcggcttgcggcgagcgaaatcggactggtcgtcatcgcgacgatggcgggccgcacgcggttcggatgcggcatcatcggcggccttacgacgggtgcgtcgcggttcggtctcgtccttcttggcatcgtcggccacgggaagcggcaaatcgagctgcggttccgtggcggccggagccggagccggcgactgggtggccacgtcagcattgtctgtggtattggcctcagcggcatcggactgcggagccttgacgaccttggcggttttggcggccttgggagcgcgcacggtcacaccggccggcggctctccaccattgcgcgccgcctgcagggtggcgagcagctcgggcttgcgcatggtcgacgtgccgcgcaggcccatctgtttagcgagctctttgagctcaggcagcttcatatcctcaagattctggctatttgccactggttgccctttccataccgaacagacccatgcctatccaggcgttaagagtgattattgcggttgcaccgctcatgaatgttcgctgcgtctctgagttttcacgaacttcgtttactgtacaacgccaactcgaccaacgcaaaacggcccgccgaaaaccaaaaaagctccctctgtgacgagggagctcaacaaggtttattcacttttcttcgtggtaggacttttcggtgttgacggaccacacgttcttcttggacgtcttgccggtcttgatgttgccgacggcctccatggcggtggccatggagtggtccatgttgttgtagcggtgctggccgttgcggcccacgcagtagaggttgccgaagccgtcgaggtactcgatgagctcgtccatgtgctcgtaggtgtcgaagtaggcggggtacgccttcttgacgcgctcacgatgggagtcgatgacctcgtccgggccgttgatcacacgcatgcgggtgagctcggagatcgcgaacttggtgacgtcctcctcgctcatgttccagaacgagtcgccctcctcgcagaagtactcgaggccgacccacacggtgtcgtccacgttcttgaccaggtacgggctccagttgttgaagatctgcagacggccgaccttgtagcccgggtcctgcacgtagatccagcagtccggcacgatcggcggattgccgagggtggggatgttggtggtgttcttgagcttcaggtgcttgaccagcaggcccacggtcacgaagtcgcggtacggcaggccgttggccacctcggtcatatcggccggggcgggcttggaatcagcggcctcgggatcgtcgccggccgcgtcgatggcgttgaccaggtccttgaccggcatcgaggagatgaactggtcgccggaaagctcggtgcggttgccctcggaatcctcgtacaccacggaagacacggcgccatcggtctggcggacctcgaccaccctggcgtcggtcagcaccttgacgccggcggcctcgcaattggactcgacggtctcccacagctggccgggaccgtacttcggataccagaactcctcgatcagcgaggtctcgacctccgcgttggagcgcttcctggggctaagcttctggaaggcgttcttgagcacgcccatgatggacaggcccttgacgcgctgggcgccccagtcggcggagatctgggaggggtggcggccccacagcttctccgtgtagccctcgaagaacatcgaatacagcttgcggccgaaacgattgatgtagaagttctccaggttgtcttccggcagcttgtggaacatggacttcaggtagctgaagccggccaccatggtgagcttgaagcccatggccttcaacgtgttggggctcagcgaaatcgggtaatcgaagaagtggcggttccagaagatacgggacacgcggtggcgcttgagcatcaccttgtcctccgtctccggatcggggccgcccggctccatgtcgtggtcgcggccgagcttcttgtcatcataggagggtgcgccctgcaacggcagaacggtcttccaccaatccatgatgcgttcgtctttggagaagaaacggtggccgccgatatccatgcggttgccgttgtgcttcacggtgcgcgagataccgccgaattcgcgggtcccctccagcacggtcacgtcatagttttccgcgccgccatccttgacgagttcccatgcggcggtaagtccagccggaccgccgccgataatcactacggattgcttgtcggtcattatgctccttataaacgcaaaatcagagacagtttactagaagccccggaatcgcacaccgaaagatgagcgaatgcttacagaattctcccgatatacgaccgatgcgccgtcttccatcagcagaaaggcgacgcatccaatcgtgaggtaggggtattcggcaacgctgcgtcacgcacagcgcggcgaatcggtttggtcttgggctaattcgtcagcgacgaaccttccatagattcagcgagattcctgcaagtgcaagcagcagcattttctatcagccgcaagcaaacaagacacacgatggcaaggttacgaatctgaacttttgctatgcgttgtatgaacaatgcgcgacgccccgccgtaagatgacggaatgccgcgcattgtcaatacaggctgtatcagacgattgcctgtcagtgaatatcgtcgggaatgtcgatatcggttttctggacttcttcgacgttcacgtccttgaaggtcacgatgcgcacggacttgacgaaacggctggaacggtagacatcccatacccatgcgtcagtcagctgcacatcgaaatacacgtcctgaccagcggaacgcacgttgaaatcgaccttattcgccaagtagaagcgacgctcagtctccaccacataggtgaacagcttgatgacgtcacgatattccctatacagcgcgagttcggcgtcggtttcgtaattgtcgagatcctcggcactcatgcttgtttactcactcactttccgtatcgcgtttgcggccgcggcccagcgtacgccaccatgcttcctttgagggcttgcgttccgcctggccgtacggccagttgctttcctcttcgagactgtggcgcgtgttcttctgcgtatcgtcgtggtgcccggcctgtggctcgactggctgtgcggccgccggcgtctgggcctgggactgcacgtcactcgtcgtgacggcggctgcctcaccacgctgtgccggctcgggttccggcttgttctgctggatggcgatggaatgctcacgcgcggacagcgcttccttgacacccgggttgtcctcaatcaagtgcataccaaaagcgtcaagcgaacgaatcgggtcgtactcgtcgaccaacgtgtccatgacgataaggtcctggtatttgttgttttcgacatcccacaacgcgtcgcgcgaggtgccggacggcacgaagccgagcgactggtagaccgaaatcgaacggctgttcttttccggtacgctcacccagatgcggtgcatgcccaggccggccggttcgggcgcaaagccgtaagtcatcacacgcggcatggcgtcacgggagtagccgcggccacggtactcacggcccaagatgatctggatgcgggcggacttggaccagccgtcgatgtcgatgaggaaaatcatgccgatgacattatcggtgctggccgcatcgagctgaccgtcatcgtcatggtcggcgtcagtcaatacggcccatgcgatggtgcggcgggattccgggtcgcccacgccggattcggcgggtgcctgaccggcttcccaggcttgggagcggcggacccatgtgtgtacgatggcgcgttcggtgaccgcatccttgccggtgatcttggatgcgccatagaaggcatcaagttcatccaaacgagccaggtcctcgacggtggcggggcgcaggtgcaccatttcgccacggattggcggaatgacgatgctctgtggcagatcgcgcttcagttgcgcttcggtagccatgctcagcgtctcgttggttgcggtcatcggtatacatcccccggttcggcttgtttcggctcacggtccagtgccgaacatatcttactcgactgggtgaacgctggaaatgctctgagacgactttcttacagaatcaataaaggctcccgctggcgggagctgtccaacgaatttgaactggaggatttccctacaaataagtgctcccgctggcgggagctgtccgcgaagcggactgagggtggtcatccgtacatggcgaccaccctcagtctcactccgttcgacagctcccgccagcgggagccagtgaatctaatcagcccttgatcttgcccatgacgaccttggtgacggccttggcgtcggcctgaccgcgcgtggccttcatcacggcaccgatgatcacgcccatcggcttcatgttgccgctcttgagcttctcgacgacatccgggttggattcgaacgccgcgtcgacggccgcctcgatggcaccgttgtcttcgacgatcttgtagtcgtgcttcttgacgacctcatccggggtgccttcgcccttgagcacgccttcgacggtctgcttggcgagcttgtcgttgagcttgccggaggcgatgagcttctcgacctcggccacatcggccggggtgatcggcagctcttcgagggacatacccttggcgttggcttcgcgggaaagctcgcccagccaccacttgcgggcaccggcggccttggcaccggccttgacggtttcctcaatcaggtcgagggcgtcggcgttgaggatgtcgcgcatctgcagatcactcaggccccactcagacttgaggcggttgcggcgctcacgcggcatttccggcatctgggccttcatctcctcgatgtgctccttggtgatgtggagcatgacgaggtcggggtccgggaagtaacggtagtcgtcggcatcggacttcagacggccgccagcggtggtctgcgtagcctcatcccagtggcgggtctcctgcagaatctccttgccgtcgtccagacgggcggcctgacggcggatctcgtactggatggtcttctcgatgccgcggaacgagttcacgttcttggtttcggaacgggtgccgtagggggcgtccgggctcggacgcagcgagacgttcacgtcggcgcgcatgttgccctgctccatgcgggcgtgggagatgttcagcgcacgcacgatgtcgcggatggcgcgcatgtaggcaccggcgatttcgggagcgcgatcgcccgcgccctcgatcggcttggtgacgatctcgatcagcggcacaccggcgcggttgtagtcgaccagcgaatgatcggcgccctcgatacggccgtcggcgccacccacgtgggtgttcttgccggcgtcgtcctcgatgtgggcgcgctcgatcggcacgcggaacacggtgccgtcttccagttcgacgtccaggtagccgttgccgttggtgggcttgtcgtactgcgagatctggtagtcgcgcggcatgaccgggtagaagtagttcttgcgggcgaactggctcc

SEQ ID NO: 3527 - DNA, 7146 bp, Unknown
  R85_18m  MAG No. k141_14141
atcgccgtgacttccaccgcgatggtgagcgtcgtgacttccgtcgtgacaatgatcgtcgtgacttccgccgcgatgaccgaagggataacgatcgccgtgatttccatcgtgatggtgagcgtcgcaacttccgccgcgacgacgatcgccgtgatggcgatcgccgcaacttccgcagggacgaccgccgcgacaacaaccgtcgtgacggcgaattccgcgagttttcgcaggaagagaagcgccagtaccgtgaggagaagcgctctgaatacatgaggcgtccgcgccgtaactccgacggcacgatgagcttcccctcgcagaacccgtacaccgaccgtcgtcccgacgagcccaagatgcccaagggcatggaatggtcgatgctgtccaaggatgagcgcgaacgtctgcgcggcctgtccaaggagcatgcggagaatattggtctgcacatcctcgccgctttcgcgctggaggagagcgatcccgaacttgccttggagcacgccaagtgggtggcccgtcaggcctcccgcatcgactttgcccgcgagacgctcgcgttcgtggcctaccgtcagggcgactacaagctgtccctgcgtgagttccgtaccgcctaccgtatgaacggcttcctcgactacctgccgttcatcgctgactgcgagcgtggtgtcggtgaaccgaagaaggccgtggaactggcgctgtccgatgagggcaagcagctgcatggcgctcccaaggtcgagatgttcctggtgtatgccggtgcccttggcgatttggagatgtgggacaaggccattgaagtggttcataccgtcggccgctctcagggtcttccgggtgagtaccgtatgcgtgccgtgcaggccgagcagtacttccttgaagaggccggccgcagcaaggaagccgagcagcttaatgacctgctggaccgtcttgaggatcagtatgccgacgaggagattgacgaaaacagcgacgacgtggtgattgaccacgatctcgaagacatcaccgacgactccgacgtgctcgagaagctcggcatcgatccggacgaagcgcagtacgccccggatccggagcaggaatacggcgatgaggacgacgaggctgaagacggcgatgccgagtctgatgaggccgatgtcgaaaatgctgagtccgaggatgcatcggaagaatctgaggaatctgaagccgaggagtcttccgagtccgctgacgatgccgttgaaccggctgagtccgacgagaccgagaccgaaaccgaggagtgagcggcgtaatgacccgtttcctcaaaggcaccgatcgcccgctcgccgaggcctatcagcttgcgctgctggacctcgacggcgtggtgtatcgcggcaagaatccggtcgaatacgcagccgattccattcgtgcggccgaagccgccggcatgaccatcgaatacaccacgaacaactcctcgcgcttccagcacgtggtggccgaccagctcaagggcttcggcttggacgtggagccgtggcaggtcatcacctcttcggtggtggccgcccgtgtggtggccaaggcgttgcccgccggcgcgcgcgtacaggtattgggcgccgagcatttgcgcgatgaggtcacccgcaacggcctgaccatcgtggacggtcctcaggaccgcccgcaggccgttattcagggctggtatccggatatgacttggcagatgatggccgatgccgcgttcgcggtcgaggccggagccacgtatttcgtgaccaaccgcgacctgacgattcctcgtgaactgggcatcgcccccggttgcggatcgatgattcgcgccgtgatcacggccactggcgtcgaaccggtcgcctccgctggcaaaccggaagcgtacatgtacgatgaggcccgcgaactgaacgccgccgaaggccacgatctggtgcccaaggaggcgtccatcgccattggcgaccgactcgacactgatatcgaggccggtaaccgcggtgactatgattcgctggcggtgctgaccggtgtcaccaacccgaccgaactgatgctggctccggcacacctgaggcccacattcatcgcccttgatctgcgtgaactcggcgaagcccaaccggagccggtccgcgacgagagcggtacttgggaatgccgcaaggctagcgcttggtttgaaaacggccaggtacacgtcagcgaccccaccagtatggacggcctgcgtgccgccgtatgcgccgcatgggaagccgccgaccaaggcgcacagctcagcgaggccacggtaccggtgttcgccatcgaggcatagtcctatgcctacggatagcgaacacgcgccggtcaccgagcgataccccgaacttgcggatattgatgaacaagacaacgaccgcaagcttgagacctatcgcaacgtgctggaatcgttacaacacgagcttgataacagccgcagctagcagaggagattcattctcccgccagcggaagatgacgtgaagtgctggatggtgggtccatgccgagccaccccgttggtggatggtgggtcgaaaggaaggtatatgaccgagcaacatatcgatcccgcgaccccacttgatcgcctcgacatgatgctcgtggcttcgggactggtcgaatcgcgggccaaagcgcagcgactcatcaaagccgggcatgtgcgcgtggacggcgagaccatcaccaagccatcgttcatggtcaaagccgggcacagcgaactcgccgtggataagggcgacgactacgtctcccgaggcgcttacaaactcttgggcgcgttcgagacctttgccggcaatggccttaccgggccggaaagcttggaatgtctggatatcggtgcctccaccggtggcttcaccgatgtactgttgcgcgggggagcggccaaagtcgtggcgctcgacgtcggccacggccagctcgacccgcgcatcgccaatgacgagcacgtcatcgaaatgagcggcgtcaacattcgcgaagtagaggccgacgacctgccttaccggccggcgatgatcgtctccgacgtctcctttatttccctgacctatgtgattccggtaatcgcgcgcatcgcggctcccggtgcgcagattgtgttactggtcaaaccgcagttcgaggtcgggcgggcaggactcggcaaaaacggcatcgtggaagatccggcattgcgggagcgggcattgcacgacgtggtcgcctgtgctgaacagcacggacttgacgtggtggccactgccgatagtcccatcatcggcacccacggtaatgaggaatacctgctttacgctgtcttgagatgaatgcgttggcagtctccgttcaccagcagcacgctggaggtacggtcgatgcctattgcggtggcacacgtggcgctttccaccgcactgccgttgcgtagcatggcggagtccgccgtcaaagtccggcattgcagatggttggcttcaaccgtgacggctgtgatatggcgaaccatgctgccatcctcatacccatccatatcaaaacgagaaaacatcgtactgcgcagtggatgaacttccagagccctgctgttgacgtcatgacccttcaacacgccgttcaagcggactgtctgaccgctaatatgacgggtgcctagggagccattgacggacagatttccggaacaaacgatatcgctgttgcatcgcagtttgccggtaaaggttatttcatcgcaaataatgtcgccgccgacttcgatgtcgccgctgccgttgatgctggatacgcgaatatcaccatcacaccgcacaatgccactcttgatgaccagtttgtccccttctataactgaggcctcgagggtgctggtcacaatcatggtgtgaaaatgcgcgccatcggcaagacgggaacgttggtccactcctatggtgccgtagactcctttgcctatcaacgtgcaattctgcgtatgcttgcccatgatgataaagccccctcaatatggacgtacagctttatggcttattgccccaataatgagcgcatccatgttgaggggggttatatcggtcacgatgtgagcagatagggggtatagcgagcgcagttaggggggttagccttggatgaagtggtcgatctgatcctgcttgcccatgaggatgagttcgtcgttgcgatgcatgaccagttccttggagccgtactggaactccttgcctggggccttgaggcccaccacggtcacgccgtatttgtcgtgcacctgcacgtcctcgatgctgcgacccaccgcgtataggggcgtgtggatcttgacgacggtgtacgggccgtcgatttcgatgtaatccagataattgccggccaccagatgacccacgcgcttgccggcatcggtctccgcattgatgatgtgacgggcgccgatgcgctgcagaatgcgcgcatgctcctgggacacggacttggcccacagatcggaaacgccggcatccagcaggttgccggtgatgatcaccgaagcctcgatgctgtcgccgatggccacgacggccgtgtcgaactgggaggcgtcgatctgctcgatggccagcacatcggtcatgtcggcctgaatggtgggcagatgcgcggaccaacgggccacaagctccgggttcttatccacggcgagcacatcctgacccatctggtcgagggtggcggccacggacccgccgaaacggcccaggccgatgaccagcacgcttttgttgccgctcggttttgctgccatgatgatggtcctctctatgccggatttctgtgtgccgattgaatggccgatcagccaacgataatgttttcctgcggataacgaataggttcgggagccatcggtctgctgatggagtaggcgatggtcaacgggccaagtcgtccgacaatcatctcggcggacagaataaacaggctggccggattgccggcgcttgccacgcccaccgaataaccgcccaacgagaaggccgagcaggcctcgaacacggcgtccacgaacgcgcagccggtggtgaacatcagcatcatcgcaccgaccataaccagcgcaaagcaggccgtggtcacggacacggcggtcatctggacgcggcgggggatacggcggcggaacacggtgacatcgcgatggccggtgaatgcggcgcggcaaatcaagagaatcaccgcgaacgtggtgacacggatgccgccggcggtggatgaggagcctgcgccgatgaacatgagtatgctcatgaacaccttggtctcattcgtgacttcgggcacccaggaaatatcgaaaccggcggagcggggcatgacggcggcgctcatcgcacggcgcatcttcatgccgggaccatctgcggggaacaggccggtattgccccactcgaccagcaggaaccaagccagtgaggtggccaccagcacagcggtggtcaccaaagtgagtttggtgtgcaacgtccaacgtttcgggctgagatgtcggcgtgcgcactgcaccagattcagcaccacggggaagccgagcgttcctatgaatgcgctgatgagaatcggcagtcccacgccccaacggttcacatgcaggccggtggcgtcaggcgtgaaaccggtgttgttgtaggccgataccgcgtagaacagcgcctgccacaatgtacgtcccatattgccgtggttcacgcggaacaggtcgggcagcagcagcacgaaggtaagcacctcggcgatgatggaggtgcccaataccacggtgagtacgcctttgacctcggaaagcttcgtggtgcccagttcgttcgcggtaagcatgcgctgggagaccttgagtctgcgggaagcgccaagagccaccatcgaggcgaaggtcatgacgcccaggccgccgaactggatggagaataggatgacaacttggccgaacgtcgaccagtattcgccggtgttcaccaccggaatgccgcaggtggacagggccgagacggcggtgaagaacgcgaccgggaagttggtgaagatgatgtccgatgtggagatcggcagcagcagcaagccggtgacgatgatgatcagtgcgccgaaatacaccatggacagacggcccgggtgcctgagcagacggtcggtgatgctgatgcggcgaatgcgcttggcggttttatcgcttttgtctcggctcagtacatcggccgaataccaccatgacaggcccttcgaggcctcctcattggcggaggattcgtcgaagtcattggccatgggtcctcaagctcctcaactgatactgctgtatggtcatacggcatgccatcgcgctgcgcacggcacgcgtacggtgatcgcgcggctgtatgccattgtatgccgaagccttacgttaatcgactctgcggaacgttgtcggcgacgcgccacgaagcggcatttttcgaacacctgtacgagtgatgacggtgtctgcggctagaataatgagcagtgcgaccgaatcgacaggaggatgccatggccaagcgcaacgcggtggtggtgacgcataccaggctcaggcagaccggaaccgtagtggccgaggcggtgagccagctgcgagtggccggtttcgaagtcaccatcatcgacaacaccgaggcccccgatttcggtgtgcagccgccgtgcgtgtcggacgacaccgaaatcgtcgtggtcctgggcggcgacggcacgatactgcgcgccgccgaactcgtccactgcacccaggtgccgattctcggcgtgaacatggggcatgtcggcttcctggccgaattcgaaagcttccagatcgacgaggcgatccgccgggtcgccacccacgactattctatcgacgaacgcatgatcgcccatgtggatgtttggctgcccggtgccaccaagcccatcgaggattgggcgctgaacgacatcacgctggaacgcgccgaccggggcaagatggtcgaactgtccatccgcgtggacgatgtggagatgaactcgttcggcgcggacggcgtcatcgtctccacgcccaccggttccacc

SEQ ID NO: 3528 - DNA, 4198 bp, Unknown
  R85_18m  MAG No. k141_14918
agtgatcgagggcatcatcagcgggattgtgacttggaacagggtctggcgcggattggcgccgtccacggctgcggcctccatcacgtcggtgggtagggcctgcaggccggcgatgtagatgatcatcatgtagccgatttgctgccagcacaccaagatcgtgatgccccagaatccgtaggttcccgagtaggtgatcgacctaccccagtgagccaggatgccgttgaggagtagctgccagatgtagcccaggatgatgccgccgatgaggttcggcatgaagaacaccgagcggaacaggttcgcgcccttcatcttcttggtgaacatgtaggcgatgaagaacgccgcgatgttgatgatgagggtggtcacgatggtgaacgccacggtgaaccacagcgagtggaggaagaccttgtccgtgaagacaccggagtagttcttcaggcccacccattcggcgtcggtcacggtggtgaagtccgtgaagctcagatagatgccgatgatgaacggcacaacgaagccgatggcgaatgccgcgcaggtaggcaacgcaaacagcgcccaccatttgcggatcgatttaccaaccatcgaaatcatgatgaccctttcttaggatggaatattgctggggatgcacggcgacgatgccgtgcatgtgtggccggtaggttcccgctgacggggccggcccctgtgattagtccgtgagtcgcagccagacggtgacgtcctgcggtagcctgccgtcctcggtgagcgaggcggaagccagaacgatgtcgccggccggcagcgcaaccgggtcctcgccgaagttggtgatgctggcccagccattggaacggcggtaggcgatcacgccgccaggctgcccgtcggcaccatccttgcgggtggaggcggtgtcctcgtcgagccaggtcagttcggtgtcgaccggcattagcttgtggcgcagggcgagcgcagtgcggtacaagctgagcatggaagcggggtccgtggcctcgctatcggccgcgaaatccttgtaccatgcgggttgcggcagatgcggtcgttcggatggggtgccggactgtgcgtcttcgactcctgctccagcggttttgacggccggtgagaatccgaatgccgtgctaccggtgtcgtccgcggtccatggcagcggcacgcggcatccgtcgcggcccttctccagtcgggtgcgaacggtgtggaaggcggtcgggtcctcgagctgatcccacgggatgtccgccacctcgaacaggccgagctcctcgccttgatagatgtaggcggagccgggcagcgcgagctccatcatgatggcggcgcgggcacggcgggtgccgagttcgcggttctcgatatagctggcgccatcgcgcagaatccagtccttggccacctgatgatggccggtggccggcatctgcgggagggcgtaacgcgaggcatgacgtgggatgtcgtggttgctcatcacccatgtggaggtggagccggactgttcggcagcctccagaccctcttcgatggccagatggaattcgtcgcgaatccagttcttcttggcgaattcgaagttgaacacctgaccgagctcgtcggggctggcgtacaggtactggcgggccgggttgacccaggcttcggccacggcaaaggcgggcgggtcgtattcgttgaacaccttgcgccattcgcggtagatttcatgcacgtcatcgcggtcgtacaacgggtggctgccatcggcgggcaaggaggggcaggtgatggcccattcgtcgaggtcggtgcggtcgaggtccttggccaggccatgggccacgtccacgcggaaaccatcggcaccatgatcgagccagaagcgcagcgtagtgatgaattcctcgcgcacttcggggttgttccagttccaatcgggctgttccacggtaaacatgtgcaggtaccactggccgtcaggcacgcgggtccatgcggagccgccgaagctggcgatccagtcggtcggcggcagttcgccgttctcgccgcggccgtcacggaagatgtagcgatcgcgctcgggtgagccgggttccgcggccagcgcggccttgaaccaggcgtgcaggttggaggagtggttgggcacgatgtccacgacgattttcaggccggctgcatgtgcggtggcggcgagctcgtcgaagtcgtccatggtgccgagtttcgggtcgacgttgcggtagtcatccacgtcatagccgccgtccgccagctggctggggtagaacgggctgagccagatggcgtccacgccgaggtccttgaggtagccgatcttttcggtgacgcccttgatatcgcccaggccggaaccggtggtgtctttgaacgatcgcgggtatacctgatacaccacggcttgcttccaccacagtgccgggtcggatgccgtgaaggcggagcgagtctcgtcgctgtgcatgcaatctccttttctacttccttgtcgtaccaattaagacagcgctttcatttgtgtccgttggctgcaaatacggcaagacatggcgatatgttgcatttacttgtgggtttattggtgtctcgtcggttttgcgaggaggttcggataacttcttcgttgtcgtttggtaggaaaaatgataacgcttacattttgatggcgcaaatatgctgatttcacggcgtgttcgttgatattccgccctcgtggccatacgttaacacggtgttgaaaagttataaaacagcagttattgtaagagcaatgcaagttgtatggcagtagtgtaagcgttaacattattgctggaatcgtggtctgctcgtcatcggcggtgctgatgatggcggggctgaccaaaaccgtgttatcgttgagcggcggggcggaaatggagggggtgcactatgggtcgatctacgatcagcgacgtggcgcttatggcgggtgtctcggaggcgacggtgtcccgtgcgttgcgtggggtggacaaggtctcggaccgtacgcgccaaaaagtggtaaaggcggcggaaaacctgaacttcaccctgtccaaaagcgcgtcggcattggcgtcgggcaagactaagcgcgtgcagctggtggtgtcgggggagctcaaggcatggttcaacgcctcggtattgcagggcatatacgaggtgctatctcctgcgggctatgacgtgattcccgcgttcatcatggacaagtcggagctcgacagcctgttcgccaagctgcccgccaatcgcaatatggacgcgctgatcgtcgcgtcattccggttcgatgtgcagttgcatgaccacatgcagaagatgggaatccctaccatcggcctgaattcgccctccttggacggcttcgatgcctcagtgggcattgatgacgccgccggcatgaagctgggcgtgcagctgctcaagtcgcttggccatcagcgcatcgccttcgtgtgcgattacgtgccgcatgacctgttctacagcaccaccttgcgttccgatctgttctgccgggcggcgttagacgccggatacgacgaacacagcatgatggtcgtgcgtgcttccgagcatggccgtggcgtctcttatgagcaccttgccgcggaggtggcggccaaaatactggcttcgccgctgcggcccacgggcgtatgcgtggagaccgacgagttcgcggtcccgctgctcaaggaactgcgtcggcagcatatccagattccgggggatctgtcggtcgtcggatttgatgatgcctacatcgcgcaggtatctgacctgaccaccgttcgccaggatccggttgggctgggccataaggcggcgattaaggcgctgggccttatgcgtggcgagacgctggggcatccgcatgagagcatcgcccctgaattggtgttgcgcgagaccaccggtcgccccagatagagcattcgctgcgcacggctgtccatactccaatagtgacctagctcacgttgtggactccaacggggctgcggcggcgttctcggtaggattgatttcggtttgaaggacacaatcctcgcaaaacaggacttatctgcacaccgtagatacccccggcgcccagcggcgccacaccccactactgaaaaggagtgccaataatggcagcaca

SEQ ID NO: 3529 - DNA, 15876 bp, Unknown
  R85_18m  MAG No. k141_15193
aacgaccggccacgcaagaccctcggctacatgaaaccaagcgagaaaatcctcgaactcctcgacaccgcaagctaacctagaaaaccaagacaacaacaccaaaaacaccaggtgttgcaaccaccactagaatccgcccttcggactggttatctgggcaatctccaatctaacgggtgtcgcattttcatttagacaacgggccacttgcttctgtgcgccggttgatatatcgtttatgtcaacagtagcctccaagcctcctaacagtgctcaaatccgggggctcttgttttatccttgggaggtggagaggtgtgcaagcaggctaagtcggtgtccgagatgatcgaactgctcaagcagcgtggcctgtccatcgatgtgcccgacatgccaaggatcctgttggacaataactactatcgcctgtccgcgtatttccgcctgttccagaaggatccggcgaacggtgacaatgatttccggccaggtgcgaaggtatccgatttccttactccctttatgctggacgaccagttccgccgtcttatccttgagggcacctcgcgtctggaactgacgctccgtgcgcgcctcgcctacaacctggcgctgaacggcaacgcctacaactatgacgagccggattcctatcgcgacatcgcgtatccgaacggcatgttgaagcgagactccctgatctcgaacatcaagggctgggtgtcccgttcccacgaggtatgcatccgccactaccgtcaccagcacgagcatccaccggtgtgggccgtggtggaggtgctgccgttcgataccttgtccaagatgttccagttgcatctggacatggatgccgtggccaagacggtgctttcgctgggattgtgcaagaaccgtcgccgtgcctcggaaatcgtgcatgcgatggtttacctgcgcaacctgtgctcgcatcactctcgcctgtggaaccgtgagatggtgatcactccggcggtgctcaaggatatgagggcggcgttcccggaatttgcatacgaagacaaatcggttggcaactcgctgattgtgctcatgtatctcgttgaccgcatcaacggcgaccgggagtactcgcacaggatccttgatttcctggcgcaggatgactcataccgacatggcatcctccatccgctgcattgggactaaagctgaggcaacagcaaagctgtgggatcggccgactggccatccagattcttgactccggatcgcagcatgaacgaaagaataaggttcccgcaagcaacggccttcatcagctcggctagcccgcatacgttgcgtgcgatctcaagttggcctggttcgtagttgggcgtatgcagcaacgccaccaaggctcccctgatgacgctgttcgcaagagcgtggcctaattcatgatctaagtgttccatctcccagtgatggcagaaaagagacaagccgactgtgccgtcagccgtcttgcgcacgaatcctacgagttgttccctcgtggcgaaaacagctaactagcgaatgatgcagttagcgattgaaccatagtcaacaacggagaatgccgtacacaatacagacgcgcctaggaacatatatccatacttaatccaacgtatacgtttgtcctcgtcggcgcgggccttcgcctcattctcaatcttgttgtcaatctggtacagaagaacagagcgcttgctcttggcacaggcgtcgacacgtagcttgcccaatggtagctcgtcttcaccacgaactggattgaatatatcaatcaaaccgaacgccacggcaacggctagaaggatcagcgcgacgcacctcagccattgcacttgcacagttgccagagcggtgaacggagacgtgagggagacgaatcctatcagttgcctgctgagttgcacggacgtatcgacctgatgacggcgatagtcttgctgtcggttgacttcgttcagcacgcattccaaggatgcgatgatttcctcctcatttctaggacgatcagaatcctctggattcgcttccttggagtcggttgccttgttactgggcatgatcatagcgcctacaaagagcatagcgcctacaagatgtggaagtggcttggatctgcggaatgctgcaggatgtgtgtctggttctcggggtcggcatagctgggcggcaccgtgggcttccaagtttgctcttgctgctgatttggcatgtcttatcctttctttgtgctggtatcgatgatacttctatgaagcgtcgatgcgatagtccatcacgacaacttacttttaacggctcatcggctagtcggtatattcaggcggaggacaacctgcaggggtgcttcgacacgccgaacgttaccggctccataacggtcaattccagtaaaaagccagtaacaatgaccgtcacgatgagccaattccagtcgtctcaaccaagataaccagaaatcagaaaccgccattcccaaggatattgataccatcaaagcttagtaagataaacaaagaaaagtccggctaaaacagaatgtcgcaggttcaaatcctgtcaacccgaccggcagctttactcccgctggggagtgggggagtgggggagtaaggcttcttgtttgcctgaagggcgttgcgttttttttgggggcttgaaatcgtgttgatggacgttgtcgagtagtgggcatggcgcagaccgtgtgcacgctcgtcaaccaagcgttcgacgggaacctcagcaaagacctcggggttgtttaaatgaaagggttgccaggttgctcgtgcgctatccggcaacccttcatctcatatgatggattccaccgtttgatctatgtattgcttccatgcaggcgcctccagaagatctctcttggcttcgcatgcttcgatcagttctttgattttctcgtgtttggcgccctcgttgctctggaatagtgcgatgaagcacttttggaattgcgcaagcgtcaaaggcagtatgtccagtcgttgcttgacgtctccctttgcgtaccatacgccgtggcggaaggtttcagcggtgttggtgtcgatcttgaccgcgatgaacagtccgtacactggaatgtcgtttttcccatacttcagcaccgcgtcggatacgtgacgtctgacgggttcgccttccatggattcctggcgggagcctgcggacattgtgacttcggtcaaaatggtgaatttgtcgtattcgcagtacaggtctccttgtccgccgcccgccgccgacacgggaaggaagtccgagtccaatcggaaacctcgcatatcgatgggatggttgacgaggtttccgagggcgagcgcggcacgccataatacccattcgaggtatgccggagtttcatccttcggtacttcgatgccgttgtcctcatcggcggcatcgatcttcttgccgccgcctttgatcaacagtgtcatgtagtcagagatttcccgccactgttctgactgtttggcggcgtagttgatttcgtcggttttctgccagagttcttcgagatgaaggcgcgcagcattgatctcaggtatcgtcgataccgggcgattcccaagatcgtaatacacatggttcttcttcagctgtgcttccatgttgagaagcaaagccttggcggtctcaagatcatccatcggcaaggacgcgccatgacaaagctccctgtatacgtccatgatcgggcggcggctcgatgttgttttggccagcttttccgctaggaagtgcttggccggaacgatgacaagacctcgccctttcctttggacgattccactgatgcgaaggtagcgcatgttcatatcgctgtaatcagtgaaattatcgctcttcttgttgtaatcctgaccgcgcttcttgatttcgtcggcgtcgaacctacgcttggccgttgtgttcttgcgtcgctctcgcagatcgatgatatggttcacgacatcgttgatgtcatagctgggatcggtggtatggccccacagtgagaattcgattcggctgatttcgctggtgcctgtacgcttttcgagttccagcatcaccgccagtatccatcttagcggggagaagaagccgagatcttctggaactttggtctgctcaagactcagcgaacgcaggaagcattcctgctgtgcgggataggtgtcggctttgaggaaggtctcgccgaatggcgtcacctggtcttgggggccgagatcttcctgtttgccgtccttctttttgacttgcgggtagatgaatccgaagcgggcgaacatcaaccgccattttcttgcatagctgctggtgtcttccgcctcgccggtcgaattgaccaagccggcatgattaagcagtgtctggaatcgttcttcgttgcttcctcgcagattcccattgaatggggactcggcgaacagcttcaggccttcccagatgcgcatcggattgcgcaacccggtgttgcccagttgccagatcgttatcggtttgcccatgacttcagtttacagtcaactcagcatcatgggcattagccttatgattaccagccaaggaagaagtactcttcgaccttgttcctgtttgccgcgcctttatgctgggtgccaatggagtatcggtagtcaacgggaacgacttcgacgttcttcttatgccggccaaggatcctcagcatatcttcttttgtcggctgactgttggaagaataggagatgatgaggatgctgtccttgaaccgctcgatcagttgggcgaatgcgtctgcggccccggttcgggaagaaaatggggtcgggtaggacttgaacttcttggtcttggtgtgttcctgcatcgtgacgccctgccaatcgcaggcaagcccctcgacgaaatggtagcgccgtacgtattcgttatccgacaatggtgagtagtacggaggatccatgtatacgagatcaggatggtttgcctcgagcagcaaagcatcgccgcgaatggacttattcggtcgacggttatcgaagacggcgttgttcaccgcttcaacggcttcgaggaactgctcggcaagtgtcttcttcaaatccttgcgaccatcgtcgtaccggtgtccggtgtaggtgaagatgccacgcgggcgttttttcgtgcaggcgcgaatcaatgcggtcatagctatggcctgttgatagggatcttcgatgtttttgatacgtgtgcgaagaacgtcgatcaggtgattctcttcgtctgtgtaatacagttccctgaaggtattcgacacgaaatcgtcggtcgggcagtccttcagcaaggcctctgcctcttgcgaaggcagagtcgtgcgctggttttccaccatcgccttggtgaacgtggcgctcatggccatgtagtcgttacttatgacttgtttgccttgcgctttgaacatgtagctgacgatgcccgatccggagaacaggtccacgaccgagttgaagtcgaatctggatgccacgttccacagttcagtgagcagtttctgcttggagcccatgaaacgtgtcggcggatacagctcaacttgtttggacaagcctcgctctttcgacagagccgctggcagagaccggggatccggctcggcaatgaccagtgtgtcttctccggtgcggctgcttgccctgcaggctacggaacgttttgttggaatgacctgaatctcgtattgcccatacagatcatggaccagcggatgattcgagttggtcaacagaagatggcatcccaacgaatgcaggcgggagaactcgaccgcaagccgcgaatggtcggagatctcgaactgttccttcgtatagcgcttgaaatccgaatattcggaaaccggaatgtacggcgggtcaagaaacacgaagtcgcctggttcagcgtgttcggcgagcacggcggcatagtcgtcgcagacgatcgtggcgttccggagcgctttggaagcttcacgcagggcctgagcgtcacagatcttcggattcttgtattttccgaatggagtattgaactgtcccttgcgattgacccgatacaggccgttgaaacaggtcttgttcaggtagatcgttcgcgccgcggcttctaccggcgacagtttcgtccaatccagagagcgaaccttgagaaactgctctcgctcgttcttgtatccagcgagaatagcgatcacttcttcgacatgatccctcacttgtgtatatagattcacaagttcgggattgctgtccgcaaccacggcattctcaggacgaagcgcgaagaacagcgcaccgccaccgaagaatggttcgatatatttgccatagtgcaccggaactttcggaagaagcacatcaagcatctgggatttgccgccagcccacttcaggataggcttcactcggccattggacaccccagctgatgcgtgagcgccatttgttttcacacgtggacggccggccttcctaggagaaagcatgcgctccagcacgtcggagaggaacggattgccattattggaacgcaacgtgccgcgtcgaaccagagtggcgactgtggcgttcttcacacctagtatttttgcggcctctgccttggtgatggttttgtcctcgaccggcatgttttgagccgcataattcccaagcggagtgcgccaccaagaagggtccttctcactttttttgatcaagagagtgtagatctgccgccattccggttcgttgcgcagttcagggagggaagcgttgtttgatttgacctgaagaatgaggtctcccgcgtccacgccaaacatcggcaagttgtcaaagagccctttggattcttgaaggaactgaagcgtggcttcctcaaccagggtattcatcatcgtccccaccatcctatggatctctactgtttaatgtctaaaacaagtttgacattttcattggacagatccatctattgcttgatgtctgaggcatggcgtatgctcgcgtaaacgagcgcatatgggatgctcgggtagagccgtgacttggcgactgcaagcccacccgaagttggagggcgcaagacggcaaagaaagtacgcttctgctcaggtattgaggtcgacaaagatggagccggacacgcttggagcgctgatgcttggcaacagttcatggattccgtcaaccttgttctcgctttgtatgacgcgaacgatgtcaaagttaaggaaacatgtgcttccgccagtagttggaataaagacgagaggtaaaacttgaagcattctccaacacggatgccgcaactgccaaggcgagcgtggactcctacgatgaggcgatatggattcgtcagtgtgtggcgatttcgtcgatcttggtgacgtggccgccgaaccgcgcgcatggtggacacgacgcgcaggatgtcatcggcgccgccgcgcgaggtctgacgtgcgtacagtgcggccgcggtggctggggtcggtacgccgagttcgagcgccgcctcgatcatccacttcgcctctccggattcgttggccaccggtggcatggacctgagcgtcggatcggacttgaacgcgatggacagcaggtcaagcagccaggactgcaccacggagccgtcccttcaggagctcatcacggccgccggatcctcgacgaggtcggacttcaccatggtggcgaagccttcgccgaaagcctgcatcatgccgtattcgataccgttgtgcaccatcttggcgaagtgtccgccgcccaccgagccggccagcaccaatccggaatcgccttccggcttaagcgcctcgaaaatcggacgtgcggtttcgaaatcatccttgttgccgccgaccatgagcgcgtagccgcgatcgaggccccacacgccgccggaaacgccgcagtccatgagatggatgcccttcggtttcagctcggcagcatgacgtgtgtcatcggtgtaacgggagttgcctccgtcgatgatcatgtcgctcggctctagaagctcggcaagcccgtcgatggtattgtcggtcggttcacctgccggcaccatgacccacaccagacgcggagtctgcagtgcggccgccagttcctccaagctcgtcacggtgcggtccgactcgggggagcggtcgtaaccgaccacttcatgtccggccgccgcgatgcgcttcgccatgttgccgcccatgcgccccagaccgatcattcccaactgcatgatgtgcttctttctttaaaagtgattgagtggtttttgcgtttttatgatttcgagattgttgcgttcagtgcgtcaaagcgccagcgagagcagcatcacgcaacccaggccgaccaccgacaggatggtctccatcagcgaccaggtctttagcgtctgacccacgctcataccgaagtattccctgaccagccagaagccggcgtcgttgaggtgggagaagaacacggagcctgcgccgatggcggtcagcggaccggggtgcggcggcacgaaggcgtgaagcgtggagaggccggcgagggccgggatgccgagcagcaccaccggggatttggaacgacgggcgacgaacagcaccaccgggatgaggatgaccacaccgacctcgaagaacatcgggatgccacgatgaacgcgatcagcgccatagcccacggcaggcggtgcaacggcgtcttggtcatgatggtgtcgacgatggcgtccgcgccgcccgatctgaacagggtggtaccgatgatcgagccgaatgcgatgagcaggccaacattggagatcgtgccgcccacgccggaagtgaagctatcgaatgccttgtcgtattccacgcccgcgcacacggccatcgtgaacgagccggcaagcaaggagaggaacggatgcactttgcataccgcgatgagaagaacgatgacgacgatgccgatgatcgccgctgcgatgagattcatgaatcctccttgactcgttggatttctcttgtatttttcacttatcttgcgcgaccgagaggaattgtggatgtcggacaacgaaaacggcggtgagttgctgcaggacgccgtatgtcgcacgttggccatcgaaatgctggacggcaagtggccggccggcgagagcctgacgttggaaaatgtgcagaaccgtttccgtatctctcgtaccgtggcgcgcgaagtagcgaaaacgttggaatccatgggtgcggtgacggttcgtcgacgcgtcggattggtggcgcgaccgttttccgattggcaggcgctcagccggcaggtcatcgagtggcgccttcgttccacgcaacgtgaaaggcagctatcgtcgctgaccgaattgcgattggcggtcgagccggcggccgccgcctccaccgcgcgtcttgcccccatcgacgtcaaggtgaaatttcccgtctatgcggcgcagatgcgtagaatcgtcgaggtgaacgaggagggcggcgccggtttgaccgaattccacgatttggacgtgaattccatactctgatcctgcgtgggagtggcaacgagttgttcgccgcactcgccgataccatcgtcaccgtgttgcgcggccgcgtggaactcggcaaatacccgatgaagccaaagccagccgcgctcgacgcgcacgacgccgtcgccgacgcgatagcgaagggcgatccggaacgcgcgcgcaaagccatgttcggcatcgtcgacgaagtggcccgcgcgcttaacttcttataaaaacgcaattcgatgggtaactggcgttaaccgatttcatgctccgatcaccgatctccggttttcgaacactggtaacgtgcgggcagattgttgtcagtcgttgccggtacgttcctcctgtagctctgcccattccgcccctgacggcagcccgtcattatccggtgggattgatatcgggccccacttgtagaaggggtacgtcgcattacgatattttcgattgaatttggcattggagaagttggctccgtccttgaatgtggcattggagaagtcggctccgtccttgaatttggcattgaagaagacggccatgccctcgaatttggtattgaagaagacggctatgcccttgaatttggtattgaagaagacggctccgtccttgaatttggcatcggagaagacggctatgcccttgaatttggcatcggagaagacggctatgccctcgaatgtggcatcggagaagtcggtcgtgccctcgaatgtgacgtcggagaagccagtttcattctcaaacatgaaatacgcaaatgagacaactccgtggaaggccgttccatgaaaatcgaaacggcagtcgcaccagagctggtcatcctcgacctgctgccgcaccgtcacttcattctccctggaccgccgccgttccttccgcaaatgaacggcgaacatgtcgaggatggtggattccacggcctcgtctgagcttccggatttgacaagacggccgaattcgtccttgacggtattgccgaattcatccagcgcgtatgatgtccggtcggaacgcagatagccgcacaggatgtccaccacgcgctgtcgatacccgcccctgtaggtgtccgcgatgtccgtcagcgcgtagacgccggctatgcgggtggataccttgtcggagcccagctggttaacggcatcctgcatcttcgtgttgatgaagcgatctttctcgcgagtttcctctcgactcgcgcgttcctcgtcccgtttggcctgctgtcgttcctggtatttgattaccagataggccaccgctccaacgccgccgacaagggtcagggccgtcttgacgatgctttcctgatctgtcaatttaagattccagatcggcgtatgtcccaacaaagacgcgacaagaaggaatgcgaagatggcgaggccgacccagatggttatcgtgatgaacaacgagttttctcccatccagtccttcaaccgctgacgccatccctgttctcgttttccccgtgatggtggcgttgtgtttgacggcgctcctgcttctcctgacatagggtttcctcctgggttccctcccatatgacttccatgatagtatttcaggcaagttcaatgtacgaaccgtcgccgcttgaccgattctcactcgtgccaaaccgtaaacaaccggaaatacttaggtaatctcaggggtttattttgcctctgacaattattgtcatcagttgtctaaagagagaggtctatagatgaatcgttcaccgatatcattactacggggattgtcggctgtcgccattgccgccgcaatggcgcttgctccgaccgccgcagccgctgataacacaatcgccgggcatgccgatgatcccgttacggtgaaacctgaagtgacacgtcccacaagccgcagttgcaccgttacactggctgaccacttcaagtcgaataccgagtccggtgccgctcagttttactccggcacgattacgcctccatccgaatgccccggaccatgggcaaaggtcgttcttgactccagcaccgtggtttccggccgccagtatgaccgtacgggatcgttgaccattggcggtgtcactatatggaccggcaccacgcaggaacctgatgggcaaacgccgaccactttctctttcgcgaaggacatcacccgttactcggctttgttccagaagccgcaggcattctccggtggttatacgaattacaccagtgacgtatacaccggtgtgtatgaccagacggtgaagatcacgttctatgaggccgatgagaagaatccggcaccggctgtcccgaatcaggtcgtgggtgttacgatccctgatcttaatccgaaatccgcatccgctgatttgacgttgccgatgttgccgcgcaacctgacccaggcgcagttggaagtgaccctcaaaggcaatgggtgcgacgaacagtggtttgatgcgactcccgatgatctgaattcccatttctctgatgccgtgagcacgcagatgctttgcggtgctggtccataccgtgaagctgccgtgtcggtggacggcacggcagcgggtgccgtgaacaccttcccgcacatctattcgggaggcatcgtgcctacgttatggcggccggtgctggcattggacaccttcgatctgagatccgaaagtcttgatctgacgccattcgtcggtacgctagtggacggcggcaagcaccgtctgggcttgtcgatcaacccgatcaatgatacatggaacgtgactgccacattgttccttaccacggacgacaagcttgatcagacttccggcaatctgctgcaggctaatgcgcctgcggccagcatcacttccacgaaccaagctacaggaaacggtaacgagcggtcatacatcgtgaatggatcacgcaacgatacgattagcgggtatgtggacacttcggctggccgcattaccacaaccacgacatacacgcgtgcgttccagcagaacggtacgatatcggtgtctgacggcaacgatttcaagcagtcgatgaagcagaccgacacggtgaaataccagtcgaaatcagttaacgacaagggcgatgtcgtgcgttctgtcaatctgggcgaagaatatccgattgccgtggatctgacggcgtatgacttcatgagtgacagcggttacgatttcgatggccatgtgaacatgtcacagaatgtgaagcgtgagattgccggtggaacgaccgcatccctgtatccggctgccgattaccgttggaatttggatacgtatggcgttatggcacgagctaatggcgcgctcaccaaatccgatgggcattccatcgccacttatgatggcaccgatgatgctggcgccacgtggagcaatcgtgtggagacgcaaagcgggaaggtgattaagcatacttcagctcagacatcgcctgccccttcgcctcatccgcaaccttccacgccgcagcccacccctcaacctcaacccggtaatgggaataatgctggctccggtacgcagactggcggcaattcggctgacacctccggcccgcatggagacggtcattcatctggcgtttccaacgctgccggttccggtaagaccgagcgtctcagcgccactggtgtggacgtcatgatgatcggcggagccgtagtggtcttcttgacggttgctgtggcgattctaatcatcaccagacggcgtcggaccatctaacgcctttcaccgacggtaggcgggtgccctgtcaacgaatcgtccatggattgactgttcgttgacggggctacgttaatgggctgcggatgttttcttggagacggtcacgcagccattctctggctttgtctgtgttgtgccggactcattatccgtatcggctcttggaggcggcgaacgcctcggcccacccggatgcgcagacgatcgaccggcagcgtcttctcccgagtgttcaggcatctcggatcggtgcctaggccttttccgcgagccttcgccatctcccgcatcaatgtattccccagttccaattcggcgactccgcggcgcaatgcctccacgtcatcgccatcggaatcaacactccggacgaacggcgcgaaggcgggtctgccattttctgcgcggcgttcccgtttcgcggccgcaacgtggccatgccgccctcacggcacgccttgacccggtcgttcaccgcgtcgacactcgcgccaggctatctggcggcttgcctctgctgcatgccgccaagcacaagctcgatggctttgcgccgtgttctcggcgggatgacgggcttcctcatacgctcagcataacgggagtcggacaccggccagtgttccagacactgtctggtcggatagccgaggcgctcgaccacttcagcggtcatcatcgaggtcgtgaaatatggttccaccgcccgttttcgttcctcgggactgaacacaattagatccttccattcagtctccaacaaacgtccgcagccccatccaagaaaacgtcaccagcctgaaaaaaatctgaaccgcaccccgattgttggactgaagaaattcagattcgatgatcggaggtgcggttctttcgtatgcgtgaggatcgaaggagacgttacgacgacgggttccggcgcgaggcgctggaacccgtcaaggcaggagccggcgggaacacgctcgccagacggcttgccatgcccaggcggaccgcggaaaaatggatcaggctgtacaggtccggcggtgaggaggcggtcatgggaggcaacggcagcagacgctacgattgggagacgaaggtcgccgcggcgcgcgaccacgtcgagaacggcatgaccaagacggaggtcatagcgaagtacgcgatcgcgagcatcgcgccgttggaacgatggtgccgcgagtaccgggcgggaggcccggaggcgctcagaccgaggcccaagggcaggccgaaacccgaaccgacgcgcgagcaggagctcgccgaacaggtcgcctatctgaaggcgaaggtcgcgtacctggaaaaactccgggccctgcgggcggacaagtcacgcggcgcgagagaagcgccgtcgtccgactgctcgcagggcgggggcaccggctcgaccagctcctgaggatagcgggactggccagatccacgtacttctatcacctgtcgcatccggagcgtgtgacgcgggccgatctcgagccgttggtcggcgagatctggggacgcacgccgaacgggtgcggccaccggcaggtgcgcatgtgcctggtccacgagttcgggcaacgagtgtcggccaagagcgtgctcagggtcatgcggcgcatgggactgagatgcgccatccgctccaggaacccatggaaacgctacgactcgtacaggggcgagacgggcgatcacgtgcataacctgctcaaacgcgacttcggcgcggcccgtccgttctccaagctcggcaccgacgtcaccgagttcaaggtcgccggctccaaggcgtacctcgctcccgtgtacgacatggccagcaaggagatcgtcgcctgggacgtgagccgcagtccggacctcgggcagcagaagcgcctgctcgccatgctcgcggagcgcctgcccgccggcgcggagccgatcctgcactcggacatgggatggcagtaccagcaccaatggtggcgggacgagctcgaacgcctcggcatccgccagtccatgagccgcaagggcaactgcctggacaacgcggcgaccgagcaggtgttcggccacctgaaggacgagttctaccgaggccgggagttcgactcgtacgagcggttcaagcacgagccggacgcgtacatcgtgcactggaacaccagacggcgccagatacgactcgagggacgcaccccggaggagttccggagagcgtccaccgtggtctgagcctgtatcctaataaacagcgtccaacaatcggggcgcagttcatgacgggttgagccgtgaagtaacagcggggctggttataggtgaagagcgaacgacagattgcacgtgcccccgccagtgggggctgtcgcgaagcgactgggggcggtcgtaaagagcggctgtatcgcgcggagaccgctaaaacacccgcgtcactgggcctcgatggcggtcagtgcgatggtgttgatgatgtcctgcaccgtcgcaccgcgtgagaggtcgttgacgggcttgttgaggccctgcagcacggggccgatggcgagcgccccggaggaacg

SEQ ID NO: 3530 - DNA, 15767 bp, Unknown
  R85_18m  MAG No. k141_15208
ctcgccagcctcgagctcggcattcatgatgtccttaagcaggttgccaccggtcttctcgtggtaggcctcggtgtgctggagttccttctccatcttcggggcgatgaacgggtagcagtagacctggccgtgcgggtgagcgagggagacgccgatttcctggccgtggttctcgaacgggaagatctgctcgatgccttccatcttggagatttcggcggtacggaaggcccaagcttcaaccacggtgcgcaggcgggagaccggcagatcggccggcaggccgtcctcgttcgggtcgaagcagatgacctcgcagcggccggcggcgagcttcttctcccacagcgggttgccgtcaacgtaggtcacgtcctcggagacgccgggcacgcgcaccatggaggggaagcggttctcgaacacgacgacgttgtagtcggtgtccggcacttcgccgtcctggtacgggtcaccgggcttgcgggcggccagcgggttgcccttggcggtggcgccggggccggcggtgatcgggcggttcatacgggcggtggccatcgggatccagtcgccggtcagcgggtcgcggcgcatctgcggggcggcgtacggcacttcgttgccgtcggcgtccaggtgcggggcgaaacggtagtccagcgggcgcgggtccttgagctcgcgggtcttggcaccggagacgaactcggggtcgtcgtccaggtagaagaagtcacgaccgtcggcaagcgtcgtcggcgtgatgcggatgtgctccttcgcatactccccgggggtgtagttggcgaaatcagccatgggtttactcactttcctcaatgatctcgctctggtgggccagcacgagttcctttaccaaatccttggttttggcggcggagtcgggatcgagcccgtcgtcagtaatgaccgtgtccacctggtcgaagcgcgcaaacagcgacagcgatgtgcagctccacttggtgtgatcggtcaaaactatggtacgatcggcgatgtccatcatcgccatatcggttgcggcttccagcgaattcggcatcaggaagccacggggaatcgacaccgagtgggtgccgaggaatacggtgttgacacgcagcgaggcgacgaccttgtccgcgatcggaccgacaagcgagttcgatcgggtgatcacgccgccggtgacgatcacctccacgtccttggattcgagggcctggaccagttcggccacgggaatcgaattggtgaggatggtgatgccgctggactgctgcgattcgagcagatgctgggcgaagacataggccgtggtgccgccgccgatggcgatcacatcgccgggagccacatatttgatggcttcctgggcgatggcgtccttcaggccgagatccatctgggacttgacagagaacaggggttcgctgagcaaggtactggtagtcaccgcgccgccatggacgcgtttcagcagtcccttgtcggcaagttcggcgatatcgcggcggatggtcatcgctgacacacccagttccttcgatagcgccgtaatgcgcactgccccgcgcgtgcgcaacctgctcaagatgaggtgctgacgttgtgacgaaatcatgtgaacattatcgcacacaaaagctcacaaaccaaaccggcttgagcgttttggggacaatctctcgaaaattccgggcaattcaggtgttcatttccacaaaaccgcgcaaaatcgcacattgtgcgaaccgatattctcgcagcgaccactagcgcgatgactcacgaccgacgactctcccgagcgcgttgctcagcggcgagtcacgcctgatacctggtgcatcccgattcatgtatcttctgccgagccgacgcctgcgtgcgcctcgacacgcggtagccccttccccaattcgcctaggcaggaatcgcctagccgcaccagcccaagcgtgagacaataggcggtatgacttacgtttctgaaagcttctggcacgacgccgtcaacaaagccaccaccgatctgttcaccttcggctacaagcacatcatcaaaccgaacttcgtgttcaaccaccgccccgatgaggcacacgatcagatgatcgagttctgccacgtcgtcaagaacgtcccgccgctgctgctcgccgagcagctgatgctcgactacaccgaccccattctggaaacgaatgtgatgggcgtcgatttcaccaacccgttcggcctgtccgccggcctcgacaagaactgcgacatgcccgtggtgctggaccatgccggcttcggttttgaaaccgtaggatccaccacctcgcgtccctgcccgggcaacgccaagccgtggttccaccgtctgcctgaatacgattcgatgatggtgcacgtcggcctcgccaacatcggttcggacaaggtcatcgagcgcgccgagaaggcttggactcaggcccgccagatgcagctgtccgtgtcgatcgcccgcaccaacgacgaccagtgcggcgatttggacgaaggcattgaggattactgcatttcgatgcgccgcgccgccggccgcaccgcgatggtggaggtcaacgtctcctgcccgaacacgcgcgtcggcgaaccgttcaccgcgactccggaagcgctcgaccgtctgtttacggcgctcgacaagatcgaccgcccgcagcccacgctggtcaagatgccgttgaacaagccgtggggcgagtacaaggagctgctcgatgtgctggccgagcacaatgtgcaggggctgtccatcgccaatctgcagaaggaccgcaccggcctcgagattccgcgcgattgggagggcggcctgtccggcggcccgtgcaccaacgccagcaccgagctgattcgcaaggtgtataaggagtatggcgaccggttcgccatcgccggcatcggtggcgtctttacccccgagcaagcctatgcgaagattcgttccggctccagcctggtcatgttcatcagctcgctgatgtaccgaggcccgcagcagatcaccgtgttgaagcgcggtctggcccagctgctgcgccgcgacggattcgagcacgtctccgacgccgtcggcgtggacgtggagtgaactcacatattgccctattacccatggggcggttagccaaatttcacattccgcagaataccgccgttttgggttaccgccccatgagggttttaccgccccatgggaaagtcaccgccccatgaggattcagtacgcaccggccacgtattgcggggcgtaggggacctctgtggacggtatgcccagcttgttggccgcacgcaacggccagtacggatcgcgcaatgcggcgcggccaatttccacggcatcggcttcgccacgggccaaaatcttggccgcctgcttcggcttggtgataagacccaccgcggtcaccggaatatcggccttggacttgacctgctcggcgaacggcacctgatagttcggcttgaccggaatcgacactcccgacatgatgccgccagtggacacgtccatcacatcgacgccatgctccttcagcaccttggatagtgcaatggtctgatccaaatcccaaccgccagcggcccaatccgtggccgaaatgcgcaccagaaccggcacgccctcggggacggccccgcgcacggcatccacaacctcgaccaggaaacgagagcgaccggtcaaatcgccaccatattcgtcatcacgctcattgctcagcgggtcaaggaactgagaaatcagatagccatgcgcagcatgaatctgaatagcctggaagccggcggccaccgcacggcccgccgccgcggcgaacgcaccgaccagaccatgaatctcatccacggacagcgcgcgcggcgtacgcagcccgccgaacgcgatttcagacggtgccatggtgggccagccgcccgcctcctccggcacactctgaccgtcgtaaccaacggcgaagcaaccggtcgaagccttacgccccgcatggttgagctggatggcaggcaccgcacccgcctcgcgaataccgtccacgatccagcgccaagcatcaatctgcccgtcttcccacaggcccagatcgcacggcgtgatacgcccttcaggagccacggcggtggattcgacgatcaccatgccgaatccgccgaacgcacgagacacgtaatgctggtagtggaacggcgtgggcctaccatcgcaggcgaacgacgaatacgtgcacatcggcggcaaccaaatacgattacgcacggtcacttcgcgcagcgtcattggcgcaaacagtcccggacggtccttgctggctttcttatctgccttgctcacagcttccctttcctcataatcctcataatcatcgaacgattcgctcgtcttgcccgcgccggcccgcttcttggaccgtgcgtcggattttgacttcttcttaccgtgcctacggttcctcgatgcatcctcgtgcttggtcttcggctgcttggactgttcgccgtccgaagacgaagccagcgtcaccgctttgagatccggcacgtcgaatccacgaaaatcaaaattctcatgcgtcagatcgtcgtcgctcatcgttcccctttccaatgcgcgttcatggcgaatattcgatgaacgcgctggcgttgtcattaagtattgtaaaacgggcgtcacctgaaacaggtaacgcccgcaaactacgtaatttgggtatcgcagtcgactatgttacgtagactcagccggcctgcaatcaccaaatgtcaaacgccaatcaccaatcactggccatcattcgaccgctctgaattggtgccctgggtttgggtgttgttttgcccagtgttctgcgactgagactgcgactgggattgaccattggtggtcgtctgcgattggctgttgccattcgtagtggtctgcggcacgctgaacgttcgtccgccaatgcccaggtacttgccagtcgtggtgtacttcgagacgggctggccgtaatcgttgtcaatcggtattttcttcttggaaatgtagctattgaagaagttggtaacggccggagctgcgattgtcgaaccatcccaatagctgttgtaccggccgttgatggcaatgttggaaatacggttggtgtacgggttctgtgcatcgccgaccacagcgaacgccgcaatctgattaggaatgaacgatccaccggacaccgcaagatcctcactggtaccggtcttaccaaacgacttacgcccgtcagccaatctgaatgaccaaccggcaccatccggccgcaccgtaccttggttcagggtataagcgagtgtttggatgatgtccttatccaccgcctgatggcagttcgcggatggaaccttgagatcgttgccgtccttatcggtcaccttgctgatggcaatcgggttgcattgcacaccattcgaggcgtatacggcgaagatgctcgccatggtcagcggggacacattcaccgagccgatcatcatggatggtgtatacacctgggttttgtcgatggtctcacccgtggcggcgtcatggtatcccagtttggtcgcggtgtccgccaccttgcacagtttgaggatggcgcccatggaggcctgggtggtgttgtgcgatcgcaccagaccgaggaacgggctttccgggttcaccgtgccggcgcccatggcgttcgacacgttccacgaatcggcaccgcccttgtagttgttgcaggcgaagtcggtcgtggggtacgtcgtggtggtctgtaggttgtcgttgatcgaatgacccgcctccatccacgcaatcaggttgatcggcttccaagacgaaccaatggtccaaccggagccgccgccgtccaccagatcgacggcatagttctggcccgacttggtcggatcgttcgcggctgccggagtggcgtcatagtaacgattcaggccaaagctcagcacctcgccggttcccggtttgactgcggccatggctatttccatgccgctgggatcgtccggtggaatggtattacgcgcggtctccatcatcgtggaattcgcttccacatccaacgtggtgacgatcttcaggccaccctcctgcagcagcttgttacgctccgcacgagtcttgccgaattcttcggagttctggatgcgatgcaccacgaaatcacagaagtatgcgtagtcgccggtgtcctggcagccgacgttcacggcctgcaccttcagcgtgtccttcagcggcgtgttcacggcttcggtgtactgcttctgggtgatgtacccctcctgcagcatcagcttgagcacgatgttgcgctggttctcgctttccttctggttctcctcgaccagcggatcgtactggctcgggttcttggtgatagccgcgatggtggcggactgcaccacgttcaaatcggcggcggacacgctgaagtagcgctgggctgcggtttccacgccatacaggttgttgccgaactgggcgatgttcagatagccctgcagaatctcggccttggaatacttcttctccatctgcacggagatcagcatctcgcgaatcttacgggcgacggtgtcttcggtggcatggtactgggcgatcgggtcgtcgtcctcgatcgcctgcatgagcagcacgttcttgacgtactgctgggtcagcgacgaaccaccctgctgggagcctttgacgaggtaggtctgcacgaacgcacgcatcacgccttgcacgtcgacgccggcgtgagtccagaatcgacggtcctcgcgcgccaccactgcctgctgcatggttttggaaatcttcttcagcggcacgacgatacggttttggttgtagaacgtcgcgataacggtggaaccgtctcgcgcgtacatcgtcgacttctggggcagaccggtcacgtcgaagtccacgttttctaccttgagcgacggaatcaccgctttggcggctttattggcaccgaccacacccggtacaaacaacacgctggccgccacgccaccgcagacggcaagcatgatataggccaagaggagaacaagcacacgttggagagtgagggacttctttttgggcatgggccccattctaaatggggtgccctaccaaccgggctcgcggtcagcttccgtgaacatatcatcacaagaaccgcactagcgtaacattggctggaagtcagccgaacggtcagcgccgcgagcgtcgaatcagcatgcctggctggaagatgatgatcgatcgaccgtcacgtgcgatccatccgcggttggaaaagtccatcaacgccttgttcacggtctcacgactggagcccaccagttgggccagctcttcctgagtcaggtcatgcggcactttgaggccctgttccaccggctcgccgaaacgtgagcccaagttgagcaatgtcttggccagacgcgccggcacatccatgaataccaagtcggagatgcgttcgttgttgccgcgctggcggttggccatgacctgcaacatgtcgatggccacacgcggatgctcatcaagccatgcgaacagggcatcatgctccagccagaccacgcgcgtgccatggctcatggacaccgcggacgcagtgcgcgggccaccatgagggtcgaataccggaatctcgccaagcacttcgcccggcgcgtggatggacagcagctgcacgcggtcatcggaagaagtgcgaatcagcttgacgcgcccctgctccagtagatacatgcgctgatcggtatcgccttcggagaagatatagtcgcccttatcgaaggtcgcacgcttcaaatgcggcagcagctcctcggcttcggctggcgatacctgcttgaacaatgccgtatgcagcaggatgttctcctcgtcagcaaaagcgtttggcgtttccaagctcatcgcaccatccttattgtcctacgaccgtcgtcggccatccgtcatattgtaacgcgccccacaggtttcgtcagaagcatgccatcattcgtcacttcatgtgtggcgcgatccgatagccgtacgacatgctgacgaatgtgttaccgcgaaaaaacggcactgtcgcggttaccgcgctcgcccatgacaaaaccacgcacggccaccggcaaaatcgtatacggccatcggtgaaatcacgccgcaaaccagtcaataaggtgttcgacgatgtgttcgcggctgagacccgtctggcttttcatcgggtccacgcgtttgaccgctgatttcaccgctttgtctgacatcttctcgcgactggtgttgagcacacggctcatcttggccgcatcgatgtcatatgccatggtcacatggtgcagcaccgcgccgcctgagcctacggggaagcgccgttgcgccgctcccccgatcttgccgtactgcgaggcgatatcattgaggcccgcgaaccgcacatccaagccaagttcgcgcagcgcttcgaccagccaccagtcacagagccggtaggattcttcgatgcttacgccctgaacgaaatcgagcggtgcatacagagaataggtaatggtgttgcccggttcgataaacatcgcgccaccacccgtgcaacggcgcaccacgtcgaaaccgagctgctcggcaatgtccagattcacctcatcctgggccgattggaaacggccgatgaccacagccgggcccgcccactcccagaaccgtatggtcggctgtcgtgttcctgctgcgacttcacgcgcccaggtctcgtcaatggccatttgctcgtccggagtacgcggatggtcgtggatcacggtgagttgaggtctgagggcgttccagcgctcccggtattcagagcttttgtcgggctgcttggtttgtgtattgatggatgccggggtgttcggcgcatcggggctgaccgcccccacccgctgcgcgggagcccccaccagcgggggcaagttgctgcttacgactcggctatatgcggttttgatggcaacttcatctgtgccgataatttggcaactagggtgagcgtccaatacggaccgcaatgaatcatcactaattagagcctgttccaagtcacgcaacaaagcatgagattcggcatccgaaactgattcaataaagaaatcaccgctgatatggcatgactgtgcggtgccgtcatcatcgacggatacggtcacggcgactagtttgccgccaacggttttgcattccccatgtcgcatttgcatgcaactcagtataaacttggctcccctctggaggggagccaagtgggacatcacatgcgggccagaatgtccttgccgacctggtcggtggagcgcacggtggagccgagctcctcgatgtccgcttcgacggcggtgtgaatcttcttggccgcatcatcaaagccgagatgctcgagcagcatggcggcggagaggatggcggcggtcgggttggccttgttctgaccggcgatgtccggagcggaaccgtgaatcggctcgaacatggacgggaactcgtcggaggcgttgatgcagccggaggcggagtagcccacgccgcccaccacggagccggcctcatcggtcagaatgtcgccgaagaggttgtctgtgagaatcacatcgaaacggctcgggtcggagaccaggaagatggtggccgcatcgatgtgctggtagtcgtgggtgacctcagggtattcctcgccgaccttgtcgacgatgcgttgccacatatcaccggcgttgacgagcacgttcttcttgtgcaccagggtgacgtgcttcttgcgcttcatagcgagcttgaaggcgtaacgcaccacacgctccacaccgtatgcggtgttgatggacacctcggtggccacctcctgcggggtgttgcggcgcaccgcgccgccggcgccgcagtacagaccttcggtgccttcacgcaccaccacgaagtcgatgtcgccggggttggcgagcggcgaggtgacgcccttgtacagcttggaggggcgcaggttcacgtactggtcgaggtcgaagcgcagcttcagcagcaggccgcgttccagaatgccggccttgatgcgtggatcgcccacggcgccgagcagaatcgcgtcgttggccttgatgcgctcctcttcgtcctcgggcaggatcgcaccatcgcgcagataacgctcggcacccaagtcgaagttctcatactcgaagtcagctacgccttcagcggccttttccaaagccttctgagcccacggagtgacttccttgccaataccgtcgccgggaataacggcgattttatatgtctttgccatagttcaaggagcctactcgcgcgaccacctgccggcccgaacccgctcagctagtggacacaaccaacatgcgtatcgtgtcgagacattcattaggtcattttagtgttcattaggtcggcgtgggttcatttcagggactgaaatggcggcatttcagtctcacatagaagaggacaccgacctaatgaacgacgaaatgacctaatgagcgagccccatcacatccatgcaccaagcgttctcataggaaacctcttcccattgtttgtaacgcccggatagaccgccgtgaccggcctcgacctcgatcttggccaccgcgtccacgccggcggactgcagacgggccagccatttgagcggctcgacgtacagcacgcgggtgtcgttcatcgaggtggtaatgaagattctcgggaattgcgcggcggcgagcgcgccggcggcagccccatcagcactgccgtcaccggcagcctcgtcgtcgccgccctcgagcacggtgaccggcacattctcgtatggcgtgtacgacttcatgtactgatacacctcagggtcatgcaacgggtctccccattcgtcccattcggtgacggtcaacggcaagtccgggtcaagaatggaggtcaacgcgtccacgaacggcacatccgcctcaacaccggcgtagcattcgggtgccatattggcaatcgcgcccatcagcaggccgccagcggatccgccgttggccacggtgcgccaagcatcagccaaatgcgccttctgcagcgcgcgcgtggcgtccacgaagtcctcaaaggaatgcttcttgttcagtctgcgcccctgttcataccaggcgcgtcccatttcgccgccaccgcgaatatgcggcacggcgtacagcacaccgcgatccaacatgctcagacgagagaccgagaaccccggatcggaggaaatctcgtatgcaccatatccggtaatgaacatcggcgaatcctgcgccgggcaatcgcggtgccagacgagggaaacaggaatgcgttcgccgtcgcgcgcggtaatccacacacggcgttccatgtaatcgcgtggattgaagtcgcccagcacggtggctcgcttcagcagcgcatcttcgccggtggcgggatcgatttcgtgcagctcgcccgggcgggtgtagctggcgaacgagtagcgcatgcgcggcgcctcatacgaggggttgccgccgacgccgatggtgtacaggcgccgggtctcaccgggcaggtggtcgtcgctggcaccatcggaagatgacgtgtgatccgtgggggcctcatcttcggtccacaagatttcgccatgatcgccggtgaagttttcgcgatcggcggcgaccatgtcccagtcgtcctccagggcaggcggcagcagttccgtaaaccgccacggccgtccggccaggaagtcggcggcagccgcgctcttggtcatgtatgccacgtgcggctggccgtcggcacggtagctcagggacacaaagttgcgatgcaacgcgatgccttcgatgcccagaccgtgggcaccctgcaatatcgccggattggcggcgttgaagtatgcctcggtaatcggcttatccggctcaccatgttcacagccgtacggcgacccggcggcgatgcacacgccttcgccgagtcggtacggcggctcatggccacgcatgtcaatgacgtcgatttcgaaattcggattggcggcgttgtggtagaccacggcgagcggcacatccgcaccgttctcccccgcgccttcaaaacaggcaaagctcacatcatattcaatatcgttctgacgtggaatgaaggcttggaattcgccttcaggcgtggccaccggcagcatcagcacttcggtggtggttttggaaccggtgccgatcacgatattgcgctcatcaaaactgatgccgacgcccacccagaaccgttcatcggtttctcggtacacgcacacatccgattcgaccgccgtgccaacacgatgccgccacacggcgagcggccgccaggaatcgtccaattccacccagaacacccattggccgtccggcgtgaagcatgcgctgccaatgccggtgaactgttcgggcagttcgctgaccggctccccggtctccagcccggcaaggtcgcgaatgcggaaatcatatcgttcgtctcccgcaacatccacgccgtacagcatccaacggccgtccttgctcagatccaagccgccgagccggaagaagtcatgcccctcggattccttgttcgcatcaaaaacgacctgttcaccgggcatggagccgggcgcgccttgcggatccacgaccggcgggtcccagtcatcggcatcgcgcacggggatgcggcattgcacgccatactgtttgccctgctgcgtgcgggtgaagtaccagtaatcgttgatgcgcgtgggaacagacatatcggtctcttccacatgcgatttcagctcttcaaacaacgtatgccggaaatccgccagatgcgccatgcgacgctcgcagtactggttttcggcagctacgtagctgcgcacatcatcggagtctttgtctcgcatccactcgtaatcgtcgtcgaaaacgtcaccgtggaattcgcggcgcttcggctcgcgcttggcgtaaggcggcatcgcggccgcggcgtttgtgctctcgtcagtcataccacgcgattataggcgaggcaccacaccgggacgcattcggcgttcatcacgccgcgcttatcgcaacaccgtcttcagatacggcagcatggtcttcagaatgttcgagccggtggtgccggtgaatactggtacatcggttaccggagtcggctgggtcgaggtgagtcccgtcaccgacgccaatccggttgattcgcgcgggctcaactcacgaatgacgatagccagtacacgtccgggatatctgcgggcgatggtggcgtacgtggtcgggtccttctgcccgtcatcgcccaccagaatgaacttcatgtccgggaagtcggccataagttgttcggcaaactcaagtttgtgctgggggccggtgggcacgaaggtcttgggcctcgggtcgaggtcgcgcagcagcagcgggccttcgggaaaaccatggtcagtgatgaagttgcgaatcgaactctccacattccagggcgatgtcgaaagatagaagaacggtgcgccggggaacaagtcggcgatgcgggtgaacagcacgctcatgcccggcacggaggctttcttcttggggtcgaggaacagcaggttgtacgcggccttccatggcaccggggcctgtgtgatcatgatggtgtcgtccacatcggagatgatgccgactttggcactggcggggatggtgtacaggttggcgctcacgggtttgcggttggccacgctgtaggagacgcgatggataccgggcaccagacgatgctcggccacgaggtcgaggtatccggcggaatcggagatggcgtattcgctgccgagatcgcgcgtgcggtccaccttgtcatagacctcggagacgccgatctgcacggtgttgagcggcgtgtcatcaatgctggcctgcacgtgggtgcgcggcgcgggcacggcaagcatgccgcggatgccgcggatcagttcgccggattgcgcatgcttgggggcgtataccgtgcggcagatcaggcgcgagtaatcgccggtgccataacccacatagggttccactcgcggataccagccccattggcgcaccacctgagtggagatgtgtgaccatacgccgaacacgcgggtgatggcacgacgtatgaatcgggtgatcggcggcttgacctcgatgcgctcacgcttggagggggtgtcgaacgtcgtggcagccttgcgtgcgggaatcggcacggtgggcatgtcatcggaatgttcagcattgctggcattgtcggcgccattggcggatgccttgacgtcagagactggcgcggtggcggacagcgctgcattgcgagcagcagcatcccaaggcagtcgcttgcctgccgcctcaaaatcctcgcgtgggcttctcatagacaccaatataggccatacgcctcattttcttggctcccctccataagaggcacgatgcatataggtttgatgccacatactggctcccctcagggagggaagtcacatcacttggatattcggcgatgcacgccggagagtaataagagcattaggggagcaccatggatgagaaacccatatacgaaaaatggcatatcggtgacgaatatagaaaactcatcaagagggctttggtgaatcatcatcgaaatgatcgattcatcgaatctcctatgcgtatgcgagaagtcatgcacgagttcgtggcaaaccgttccatcactgaagtcgccaacgatgccggtgtgaacgaaaccatcgtacagaagctcatcaatgatggcgtggccccatatccggacaccagacgagtgatgaaagccttaaaaattaatgcgacagctttgcctgcggaatgcgtgacggcatgaagaaaggcgacaggctcaatgtctggatgaacggccgacatgttggcgtatttacggcactcaagaacagtgtcggtttcgaatacgacccggatgcgccgcgaatcagcttcagcctgccgaaagacggtaactggaggaaagatgctccggaaaatttcctgctcaacctgcttcccgaatccggtgcggcaaaatacgccatgatgcaatccatcggagcaaaatcccaagaaccttttgatccgctcgacaatgtagattccgctggcgctctagtgttctcccgtagcgacgaacagccatccctattgtccacctccgtagcggaggcaacggattcggacatagcggcaagaataacggcagtcagacattctccggactcatggttcttcaaagacaaggatgcgcgattctctcttgctggagctcaaggcaagttcacgctctcacgcttcgatgacggctgggtatgacctaacggtgtcataccttccacgcacattctgaagccgtcgagtttccacgattccgatgatgttgagcatgcgactatgctgctctccaaaatggtcgggatcgaaacccctgagtcggatatacaggaattcaacggccagcagacctatattgtggaacggttcgaccggcgtatcgagaatggtatgccggttcgtcttccgatggaggacatggtgcaggcgttgggtttaccttcgtctgataagtacaaggttagtgccatcgatactttgattacattacggaagatggatacgtc

SEQ ID NO: 3531 - DNA, 5985 bp, Unknown
  R85_18m  MAG No. k141_15534
tcataacctaggaatagtgagttttacggcattatataacttaggaatcgtgatataatagctcataaatccttgaaaatactaggaatatgagcttaacatgtataagagaaaagtatacgaccatctacggcgatggaaagcagcgagcaagggtactactgcgttaatgattgaaggagcccgccgcgtcggcaaaagcaccgtcgccgaggaattcgcgaagaacgaataccgctcatacatccttatcgactggcagaaggctccgcaggcggtacgagactcgttccgcaacaatctggatcatttggacacgctgttcatggacctttccgtctattacggcgtacgcctgcatgagcgtgacaccctctttattttcgacgaagtacagctcttcccctttgcccgcagcgcggttaaacaactcgttgcggatggtcgatatgacttcatggagactggctccctgatctccattaagaagaatgtcgaaaacatcttgattccctccgaggaagaatcggtgagcatgtttcccatggattttgaggaatttctatgggccagaggagaagaactactcgccgatgcgatacggcaatcttttgcggacaggcgagcaatgtctccgctgctggacaacaaggcggaacgcctgttccgtgaatacatgctggtgggaggtatgccgcaggccgtagagcgttatctgggaacatccgatatgggcaatgtcgatcgagtgaaacgccaaattttgcacctgtacgctcaggacatagagaaatacggcggagattcgaaagaacgggtcaaacgtatcttcgatgaaattccagggcaactttccaagcatgaaaagaagttcacactgtcgtctttaggcgaaaacgcacgcgaacgtgaatatggcgatgctttcttctggttggatgaatcgttcctgatcaaccgctgcatgaatgccacggatccgcatgtgggcctgcgcctacaccaagaggactccacgatgaaatgctatatgggagacaccggcttgttagtaacgcaagtgtttgccgaccgcgcatacacgtcgaatgagttgtaccgcgatatcctgttcggcaagctggaagtgaatgaaggcatgctggtggagaatgtcgttgcgcagcagctccgggcctcaggccatcgcctgttcttctattcccgatattcccgtcaggcgaaggaccgcatggaaattgattttctccttatcggggagtattcaaatgccgccatgaaggccagggtctgccccgtggaggtcaaatcgacaaagagatacaaaacctcatcgctcgataagttcaagaataaattcgacagccgggtcggcatgcaatatgtgctgcatcctagaccaatgcgcgttgaaggagaccgcctatatctgccgttgtatatggcgcattgcttgtgatgattctagaacgtatcgcagagaatgattctcaataagaaaagcgtgaggattacgatgcctcaatcgcacatgcagagcgtcatatcagtgagatcccgccgttgcggaccatgtttgattgtgcggaaaagttcggatgcctcacacttttcttgacgggaattatttactgtgaggcattgcgcaggttggcggccatggcgcggtcgcgcaagcctttggtgagcttgagaccgagggttacggcgatcaggactatcgtgcaggcgatccacagcgttcgaccgccgaagttgctgatggtccagccaccaatcagcggcgccagcgcaatcgataccgaccacactacgttgtagacgccctggtacgtgccgcgtgccgacgcgggtgccatggcggcaaccgtagtggtggcgatagggaatgtgcccagctcacccagcgtccacagcactacggcaagcgcgaatccgccccaggaatgggccgcggcctgcaccgcatagccgatgacggttacggcgaggcccatcaccagcacgcgtgaattgcccatgcgcgagaacagtttcatcgcgggaatctgcagcaggcacaacataccgccattgatggtgagcagcaccgaatactcgcccagccctagaccaaggtccgtcatggcaatgggcaggccggaggtgctttggaagtacacaaggaagtagccgaacatcagcagggagaagccgaggaatggcgtatcagtgagcacgcgccgccaattgcgagacatggagcccttggcactggcagccggtgcggcatccgagtgattcggcccctcgacgccggcgaattccgcatgcgtaacactgcgttcgtcttcatggcgcaccgcacttggcaccgatacagtaatccccaaatgccgcacctcgcggaagaacgcaatcagcaatatcgtgacggctatcatcaccgccgcttcaacgtagaacatcagcgaatacgagatcttgaccagctggttggccacaatcggcccaatcgcgtacccaaaattaatcgcccacgattgcagtacgtacgcacgttgctgacgttcggcgggcaccacatccgcgatatacgcggcgatgaccgggctgggcagtgaggcgaacgcaccatagacaaacagggccgcgcctaaagccacggggtcagtgagcacggaaacgaccagcagggcagccgctgcgccgatttcgccgatgataatcatggattggcggccgaatctgtcggacaaggtaccgccgaacaggcagccgatgattgcgccgaagccgtacatggccacgactgtgcccaccacaccctcatcgaggcgcagcgcggaaaccaaatatatcgacaagaatgaggtcacgaagcgacccatccacagaatcagaatcgccaaccataatccccaatacagcagggacagtccgaatatcatgcgctgcttcttcactctcaataccttaccggctaccgacggcggaatagccgcgttttggcgcggggtgctgggacaatagcacctatggctatcaaaaaaggaccgaccaaggggtcgggtggcaagcatcgcaacaaactgaagggttacggccccactcccaaagccgaggaccgcgtctatcacaaggcgtataaggccaagaaagcggccgaacgtcggcagatggccgacccgcgtctggcagcccgccgtcgagtggacaagttcgcttcggcggatacttcggatctggtgtacggccgtaattccgtgctggaagcactgcgcgtaggcgtaccttcttccacgctgtacatcatgtctcgtattgaacatgacgatcgtactcgcgaaatcgtgaaaatcgctggtatgaacggcctgcacatgctggaggccgatcgtctggagatggatcgtatcgcccgctccggcaaccatcagggcgtgattctgaaggtcgatccgttccagtactcctcgctgaacgagctggccgatcgtgctgagaagaaggccaaggcaatggaggccgcgaattcggcggccgcccgtattgctgcgcgaccgctgttcattgcattggacggcgtgaccgatccgcagaacctgggtgccgtgattcgttcggcggccgcattcggtgccaatggtgtgattctgccggaacgccgttccgcttcagtgaacgccgccgcttggaaggtgtctgccggtgcggccgcgcatatgccggtggcgcgcgtggtgaacctgactaaggcacttgagggcttgaaggagcgtggatactacgttgtcggccttgacggtggcggcgataagctcgtcggcgagactggctttgaatccgatccgctcgttgtagtgctcggttcggaaggcagcggtttgggccgactggtgcgcgaaacctgcgacgcgattgccggcatcccgatcagctcgtctgttgagtcgctgaacgcttcagtggcggcgggtatcagcctgtacgcggtgtccaacgcacggcgcaaggctgcggcggagtgattgtcgcttgaggccgtaataggttgtacacacaaagaagcccctctatttgaggggcttctttgtgtgatgggctcacctacagacagtccaccggattgtccgcttaatgactccacactgccgcatccggatcgtcatcggggttgtagccgtcgtcgtccgggtcgctgtaggtggattcgtcgtcaatgacgccggaatcggcctcttcgttaagttcggcgagtgccttggaatcaaggttgtagctcggcagaacgttgtcgatgtagctggtcacggcctcgcccatcggcacgtcgtggccggccttctccgccaggaaccagcgatggtcaagcacctcatggaagaactgagcaggctcgatctgggagcgatattcgcgcggaatcatacgcacggtcggctcgaacacctcgcgcatccaatcggtggccacgatttccagatcctcgccctcacgccacgtggaggcacggtaggcgtcaaggtcgttgagcagacgacgggcctggttctcctgcacgtcaaggccggtgaggcgcagcagcttgcggttggcgtagccggcgtccaccacgcgcgggcggaccagcacacgcttgccgtcctcggcggtcttcatttccagctcgtccacgtcgaagcccagctcgttgagcttgttgacgcgctgctcgatcttccacatttcgtccgggttgaacttgtcggtgtcggtcagagcgctccacagcgagtggtagcggtcgaccaggcggttgcccacctcgatctcatccacgtcgccgggcagtagcttgccggacgccaaatccataagttcgccgatgatgttggtgcgggccaagtcgatatcgtattcgcgctggccgtcggtgagctggacttgcaggtcaccggtctcggcgtccaccaggaaggcggagaaagcgtcggcgtcgcgcaggaacaggacgttcgacagggacacatcgccccagtagaagccggccaggtgcaggcgcaccagcagcacggcgagggcgtcgatcagtcgttcggcggtgtccgggcgcaggttgcgggcgaacagcgcacggtacggcagtgagaacttcaagtgccgggtgaccagaatcgcctccagcggctccccttcacgggtgtgacggccggtgaccacggcgatcggggtcacagttggcagttcgagcttctgcagtcgacgcaggatctcgtactctcgctcggccacctggcgcgtgatctccttcatggcgtacacctcgtcgcccacgtgcacgaatcgcacgacgtggcgggagatgcctcgcggcaggttggccagcaggtcctcaggccaggtggccaagggcttgtgccagggcagcgtgaacatctttgggttcgagctggcggcggtgattttcagtgcttgcggttccgctgaatcggcgtgttcgtcttcggctttgacagacgtggccttcagcgcacgcggatccatctggggcaattcgttcaactccatgtgttcgattttacgtgtcgttcgcgatgtgtgctccttggccacgacttcggcgcgttatgtttacgggaaaacaccgtttggtctctccctcagaccgtctagaaggcaaaagaaaagccccgcagctatgcagggcttttccaacgaggtcataagagaggaagagaataacctcgtttaatggttgacgaagcgattagacctcgccaagtatctattagttcagacgcagctcagtcgacggagcgaacaggtgcatcttggccgggtcgatcttgatcttgacggtcgcgccaaccttcggcagcgcacgcggattcacacgaatcgtggtgagcttgttctggtcggacatgacctgggaagcctcagcggcggagccatcggtgacgatgttgccgtagatgtagccatcggagcccagatcctcgacgttcacgaccttcagggaga

SEQ ID NO: 3532 - DNA, 7785 bp, Unknown
  R85_18m  MAG No. k141_15551
ctatatggtgaggctcaagaaccatgagacctccaatgtggagtcgcgtagcgccaagctcataaagttggacggcgcgaagggcattgtgcagaacacgacttcgaagaaacaggtggccacaatcgtcgacttgccggatcagatcatggaagtgctgattctcgcggctgagctgctggccgtggtgatcctctacaatctgacgaatctcaacgtctccgaacgtatccgcgaactgccgaccatcaaggtgctcggcggactcggcgtgctggtctaccggcggttgaagacggtcgacatgctcggctccctgaagtcggtggaatagcagcggaatagcaaatgggatcggctttgaagccgatcccattcaattattcgctcactgctttctgagccttctgcgctttctgctccttttggcaatcagggcatagtccgaagacctccagggtgtgggattcgacggtgaagccgtggccgtcggccactttgcgcagccaagcctcgctgggcgggtcgatttccacggttttgccgcaccgcttgcacaccaagtggtggtgatgtccgtcgtcgccgcataggcggaacagctgctggccgtccaggcggatcgtgtcggcggcaccggcatcggccaaggcgttgagctggcggtacacggtggccaagccgattttcgagccttcgtcctccagcctgcggtgcaggtcctgagcggagatgaactcctcacagtcggccaaggcggcgcgaatcgcgtccttctgcttggtctggcgttcgatatgttcaaccatcgataaggtcacgccttctttttcaggtcgtcccagcagccggtggcctcaaggtcagtaaccgtggcatcagggttgtcggtgagcacggtgatgtggcccatcttgcggtcgtggcgcacttcggccttgccgtagtcgtgcacattccactccgggtgggtggcgatcagcgcgcgcgtcggctccacatgctggccgagtacgttgaccatcacggccggcgagagcagcttgggcttgggcatgggccagccggcgatgccgcggatgtgggcgtcgaactggtccatcgagcaggcctcgatggtgtagtggccggagttgtgcgggcgcggggcgagctcgttgacgatgacctgatcgtccttggtgatgaacagttcgatggccagcgtgccagccagttcgaagcccttggccaagcgaatcgccagttcatgcgcttcgcgagccacatgttcggacacttcggcgggggcgatggtcatgtgcaggatgttgttgcggtgctcgttacgcacgatggggaaggtgacgaagtccttgccgttgccggagaccaggatcgaagcctcgaatgcgaagtcgacgaagccttccaggatgctcggcgggaagccgccaccacggtcggaacgggagcggatcttctccaagtcggcgtcggaacgcagcacgagctgaccgtggccgtcgtagccgccggacacggtcttcagcacggccggataatgaatatcatccaatgcggcgtcaagctcatcgaagttgttgacggcgcgccacggtgcggtggcggtgccgtggtcgttgatgaaccgcttctcatgcacgcggtgctgggtcacgcgcagcaggtcggtgccctgcggggtggcggtgatgccgcgcacctcgtcgatggcatcggcgtccacgttctcgaactcgtaggtgagcacgtcggactgcacggccagatcatggatggcggttttgtcatcgtattcggcggcgatctggaagtcggccacctgaccggtcgggcagttcggcgtcgggtcaagcacgccgacgcggaagcccatgtagcgggcggacaaagccatcatgcggccgagctggccgccgccgatgatgccgatggtcgatcccggcatcagcatcgaaacacgaccgcctgtttcctcagacaagctgggcattggattcagccaccttttctttcatttcgttacggtaatcctcaagcttgtcggccagttcgggctcgaaggcggagagcatctgcacggcgagcaggccggcgttggtggcaccggagttgccgacggcggtggtggccaccggaatgccgccgggcatctgcacgatggacagcagcgaatcccagccggacagggcgtgggagcgcacgggcacgccgattacgggcagtgtggtctgcgcggcgatcatgcccggcaggtgggcggcaccgccggcaccggcaataatgaccttcaggccattggcgcgggcgttgtgcgcgaactcggccatgagctcgggcgtgcggtgcgcggagatgacctgcttgtggtaggcgacgccgaactggtcgagaatatcgcaggcgcgcttcatggtctcccagtcgctggccgatcccatgaccactgcgacttcgggcttggattcatttgccattatcatttactccctagttattgagaatacgtccactgtacgcccgggcgcttacttcgacatgccttacagctcaatggcgattttgccgaacacattgccttctatcatcttggcaaaagcctcaggagcggcatccaggccggagaatacggaatcaatcgccggatgcagattggcacgttccacaaagcgcagcaaacgagcaaaatcctcacgcgaacccatggtgctgccctgcacgcggatatcctggaagaacaaacgggtcagctcagcgccgggctgatctccagtggtagcgccgcagatggcaatggtgccgcctggtcgtacggatttcatcgaatgactccatgtggccgctcctacagattcaatcaccgcgtccaccttgccgggcaggcgggcaccaatctcaaatgcggcatgagcgccgagcttcaacgccttggctcgcttgtccgcttcacgtgaggtgacgaacacctcaaggccggctgcctgcgcaagctgaatcgccgcggtggatacgccgccgccggcgccttgaatcagcacggagtcgccaggcttcacaccggccgcgtcgaacagcaatgaatatgcggtcagccagctggtgcccaatgccgcagcctcaatctcggtgagattggacggcttggcaaacacattggcggaaggtacggcggttttctcggccatggtaccgggatacttctccgaaagaatcgtgcgacgctcccccggagccacaccggcaccatcagtaccgacgaacgtgtacagcactacctctctaccggccttcagcccatgcttgccgggaatgtcctcgtccagaatgcccacggcatcggtgcccaggatcatcggcgtctgttcggccgacaaccccacgccctgcagagaccagacatcatgatgattcacggttacggcacgtaccgagacggtcgaccagaatggccggctctgcggctcgggctggtctcccaccgccagcacggataacgggtcatcatgattgacggcagacgcatatacggccttcattgcacgctccttgaagatcggccggtcaccacaaggtccggcaaattacctcctttattttcccacacaacactctgtgaacaccgcccatccatgctgcatgctgtatcaaatccgctatccctcctcatcgccgcagtatttgcagtatttacggagatgttgagggtattgccctcatccgcgcacgttgccgcctgcgcagcgctagcatgtcgatttcggtatgaattgtggagggagattcgaggatatgcatagcatgccgggaaacggaatcagtgcacacgatgccagcggcgcaatcgacaacactcattccaccgactcaggcaatctcgccgatgtcaccctgctgcgtcgcattaccagccctgccgacgtcaaagcactctcccccaatacgctgaatgagctatgccgcgaaattcgcaccaccctactgcattacggccatattcacggcgggcatataggctccaatctgggcatggtggaagccaccgtcgcactgcatcgcgtgtttgattcaccgcatgaccgcattgtgttcgatgtctcccaccaaagttacgtgcataaaatgctcaccggccgcgctgccgcctatctggacacaaaccgattcggcgacgtgaccggattcacgaacccggacgagagcgaccatgaccagttcgtgctggggcataccggtacctcaatttcattggcctgcggattggcgaaaacccgcaatatggaggggcccgatagcggtatcggcaatgtagttgccgttatcggcgatggttcgctaagctcgggcgtggcatttgaaggcttgaataacgccgctgagcaaggtggcaatctcattattattctcaacgacaatgagatgtcgatcgccggtgatttcggcggcatgtacgggacactcgcccggttgcgcgcctcgggcggcactgtacaaccgaacctattcaacgcattcggactggattaccgttatgtggagcatggcaatgatgtggatgcgctggtagcggcatttgaggaagtacgcaatatcgaccaccctgttgtggtgcatatccacacgttgaagggtgccggctacggcggcgagcccaccagctccgctaccggaatccatccgtccagcaatctattgcacagtgaaccgtggcattcggatcattgtaatctgtccgaccatgaaccgcatgagggtcagtgcgaagcctcccattggcagaacccggattccgccatcggcaagccggatgatccgcgcaaacattacggcaagatggcgatggccgcgctcgagccacgatttgccaacgaaccgggattggtggtcatctcccctgccacgccggggtcgaacggcatcacccacgaattccgcgaacgcgccggctcgcattatgtggataccggcatcaccgagtcgcatgccgtggctttcgcagctggcatcgcacgggctggcggcacaccagtggtggccactacggcctcattcttccaacgcgcctatgaccagttcttccaggagatgagcctgaaccggtctcgggtgacggtgcttgatttcctaggcggcctatccggttccgacaacacgcattccggcgcgtatgacgtggcgatgttcgccaatattcctggcatcacgatgctggtgcctacttcggcagatgagtatctggccgatttggcatgggcgacgttgccggctggagccgatggagctcccgatgggccggtggtgattcgggtgccgggtgaggcgattctggctgcggaacgggagccgagtttgttgccggtgacgggtggacgggttcaggttggccaccctcagtcgactgcgtcgacagctcccgccagcgggagcgaatccgcagcacaccgagttgctggcgtaacggctcagcccaccagcgggagcgaccccttggcttggcgtattaatcagactggttcgcgggttgcgatcgccggattgggcaacgcatatccgcttgcggagcaggtggctgccgcgttgaccgccggacatagcatgaaggcaacggtcatcgacccgcgccagtgcacgtcgttggatgcggatgcgctggaatcgttgcgtgacagccacgagctggtcgtcacgcttgaggacgggcagctggaaggcggctggggcgagaaggtgaccgcatactatgcgaatcatcatgtctcggacggcagccgtaatcctcgtgtgctgaacttcggcgcagccaaggaattcaccgaccgcgtgccgctgggcgaactgaacgaacgttatggactgacggtggagcaggtgacagaggtgatcactcgttgtttttgatggcatccagggccgggattttgacggctttgttggccggaccgaagccgaacagcaggccgattagcgtggagaacagcaccgcaaacaggaacagccaccacggaatcaccgaatagcgggtcacgtcctcacctccgaccaatgcctgccacataatcatccatatggatgtgccaccagcaccatcgccggaacttccgtttgagctgccgaccatgccgcccgcatacatcctgccggccacattgatgcccaacgatatcaatccactcagcatgcatccgatcaatccgccaaagaatccgattgcgccggcttcagtcaaaaacatgacgcggatatcacgcacgtagcagccgagcgccttcataatgccgatctcgcgcgtacgctcggtcacggacatgaccatcgtattggcgatgccgatggccgccaccaacagagagaccgcgccaatgccgcccagaatcagctgaatcgctcgcgactgctcctccaacgacttgcgcatgtcctcataggacgaagtctcgtagccaagcgccttaatctgcgattccacttcgggcacggaggaaagatccgcagccttgaccaacacctgatcgtagttgacggtttttttggcggcggccggatcgactttggcgcgcaaatccttgagcgcctgcaaatccatgaccagaccgtccgccgtggcatatcccttgttgtaatcgccgccgataatgccggacgcacgcagatcgatggtgacgttgtcggattgatcgcttccaacagtcgttccgcctcccccgccgtacatgttctgcacatatgggtcgccctgatagttggttccggtggtcaggctgatttgcatggtgagcgggtcgaagaacgggtcctcatcctgatccggctcgcattcgccggtggccgaattgaatgtgcaagacgaatagccgctgccacgggtgccggtacgcatctcaccgtttttcaacgtgtccatgaacccgtaagcaaaccattcaccggcaagaacctggtctttggtggttggcttgctgccatcgaccagtttgtagcccatctgttcgaactggctcatatcgatgcccatgatctgcacgtgatcgtagatgtaccgtccacctgcgccggccttggccgtgacgttgtaggggaagttcattatcggagtcacgccggatacgccgctcatcgagcggaacgattcgagcgctttgtcatcgagcttggcatcgctggatgccgacgatgatccgttcccgccgcccatcggcccggcatagccgccactggtgtagacggtgacgatggataggtcgcccatcgatttgagcattttttcattctgctcgttgatgccctgcccgagggagatcatgagcacaatcgagcagcatccgacgatgacgcccagcacggtcagtattgtgcgggatttacgtcgccataggttctgtctgcacagtcgcagaatgtcgctgaatcgcatggccggaactttcagactgtttgagtggaaccgtcagattggcccgagtcatcgggcacaatctggttcggctcggcggcggcgttcacctgctcgatcaccgtggtcggcgtggcatcggtggacgggctgattgcggacgtacttgttgcgtcgccgcttgcagtggcgttattcgcggtggtgctatccgcagcatcgcccacagtcttgccgcttgcaatatcgccgccggactgagtgtctaatttgccgtcggcattgccgtcagcccagtcatcccactcttcatcaatctcgctcttggctttcttcttgcgatggcgacgcaccagcagaacgatacctacgattaccgcaaccgcaacggctgc

SEQ ID NO: 3533 - DNA, 5821 bp, Unknown
  R85_18m  MAG No. k141_15643
tctcccggttcctctgactcctttgcgagcgccgcggatgggatgagcacgcttacgtatggggttgcgccagacaggacgtcgtcgtagaagcgctgtttggcgtcgatgaagtcgatggaatcctggatttccgcgagctgctcgaccagccgcgcccgcttgccggcgagcatctacttgcgttcggggatgctcggctcgtggaggagcgtaaggggcgcgagtaggagttcgcggctttgctgcggtctctccctcacccggctatactgggagctccctcgtcagagggagcttaaattcggtctggttataggcccatgggcttcttgggctttttgtcgctcatgagcatgaggaagctgcgggactgggcggtgattatgaagcccgcctcatagctcagttccggcccattcgggttgtgcgtatccacgaccagctgccatttgcggccgtatcgctcatccggcagggtgaacataatcggctcgtaatgcgcgttgaagatcaggatgaagtcattgtcgaccatccggttgccgtaccagtctacctccggaatatccgaaccgttcagatagatcatcatggagaacgcatgcgtgttctgccagtcgtccatatccatgatcgaaccggtgtggtcgaaccattcgacctgcggaatcatgttcgaatcgtcgccgggctcacggccggtgaagaagcgacggcggtgcaacaccggatgatccaaacgcagatgaatgagtttggaaacgaaggcgagcagttccttgcgtcccttgtcaagatgccagttggtccaggagatctcgttgtcctgacagtaggcgttgttgttgccctgctgggtgcgggccacttcgtcgccaccgcaaatcatcgggataccctggctgaacagcaacgtggcgaacatgttgcgcatctgacgctgacgcaagtcgttgacgtccggaatattggtcgggccttcaacgccgcaattccaagagcgattgttgctctcgccgtcgcgattgccctcgccattggcttcgttgtgcttttcgttgtagctgaccaggtcgttcatcgtgaaaccgtcatgcgcggtgatgaagttcacggacgccaccggtcgacggccgttgacctgatacagatcggagctgcccatgaggcgtgatgcgaattcgggcaacgtggagggctgtgagcgccagaagtcgcgcaccgtgtcgcggtagcggccattccattcggaccagctggacgggaagccgcccacctgatagccgccggagcccagatcccacggttcggcaatcagcttcacgcgcgagatgatcgggtcctgctccacgatgtcgaagaacgcggacagcttgtcgacctcctggaactggcgtgccagcgtggcggccagatcgaagcggaagccgtcgacgtgcatttcggtaacccagtagcgcagcgaatcggtgatcagctgcagggcgtgcggcgagcgcatgagcagcgagtttccggtgccggtggtgtcgaagtagtgctgctgatcaccttccaccagtcggtagtaggaggcgttgtcgatgcccttgaagctcagggtggggcccatatggttgccttcggcggtgtggttgtacaccacgtcgaggatgacctccatgccggcgtgatggtaggccttgaccatggacttgaattcgttgacctgctcgccgcgctctccggaggaggagtaggcgttgtgcggcgcgaagaagccgatggtgttgtagccccagtagttcgacaggcccttctcctgcaggaaggagtcgttgacgaactggtggatcggcatgagttcgatggcggtgacgccgagcttcttcaggtattcgatgacgctcggataggccaggccggcgtaggtgccgcggatgtccggcggcacgtccatgttgaggttggtcatgccgcgcacatgcgcctcgtagatcaccgaatcgtggtacgagatgtaggggtgctggtcgttgccccagtcgaaatacggattgatgacggccgacttcatggtgtgggcggccgagtcaaggtcgttcatcgccgaggtgtcgtccgggcttttgaaccagtaggagaacaggctttcgtcgccgtcgatgttgccttcgatggccttggcatacgggtcgagcagcagtttgttggggttgcatctgaggccgtgcatcgggtcatagggaccgtagacgcggtagccgtagcgttggccgggctggaggccggggatgtagttatgccatacgtatgagttctgttcggtcatttcgatgcgcgtttccgcatcgtgctcgtcgaacaggcatagctcgactttctgcgcaacctgtgagtacagcgcgaagttcacaccggcgccgtcatagctggcgcccagcggatacattgatccaggtctgatctgcatagttttcagtatcccactttcttgtgtcactgatgtgccggggagttgaacgtcaggagaacagcgacggcttgtctttgtcggagttcctggcgatgagtctgcgtaacgcctcatgctggatggcgatcatcgaattggatgaggtgatgcgcgtggcggcaaggtcgctccacggaatccacgcggattccacgtgctcgtccgcgtcgaaatggcgctgctcccgtctgaacgggcccaaatgcaacaccatgatgtgggccagttcgtcggtcatgccttcggacgagtagaaatcgcccacgaagtcaacacccatggtgtcacggtccggcaccacgccggtttcctcggccagttccctcagggccgcgtccatgatgtcctcgccctcgtccatgagaccggcgggaagcccgtaggcgaacatgtccgatccggcacggtattcgcgttcgatgaggtaacggtcggtggacatgtcgtgcacgagcatgaccacacagggggcgtgacgcagcacctggcggccgatctcgtgttccttgccctgcttgtcggtcagagcgatgcgcatgtcgtccacgtggaagatgcgcccggtataaacggtttcgctactgatcactttggcgggcacgtccatgtcgatgccgtccgaggaggcgttcagcttatggtcgagccgatgctccagttgttcctgcttgcttcccccaaacatgtcatctcctcggaaaaaacgttttcgccacgtcactatagcgccttaatcccgatgcgcggtaatggacagcgtccatggatcggtcgtgtcgtggaaccactcgacttcaagccttgctccggtcgcttgttcgatggcggccggcacatcatcgatcgcgtagttgaaccacatggattcgatggcggcatgaggggtgttgatgaagcagggacgcacatggctctcccccgccattccatggccgagcatgatgccttgggtcctcatacgggcttcataccgggcttgttcgatggcgtcggtcaccgggtggtgacgcaaatcgctggttacgtacacgtccgcaccggtggcacgcacctcgttgaacagggagtcaccggagccaggcagaatggccacatactgaacaaaagtgtccgaatcgccgcatacctggatgccgagcgcggtggtcatgccatgatcggacacttcgtcgaatacacgctgagcgaaatccttcagggcaacaggcttcggcaaacgacccacacgccccaagccgaccggatgagaggcgttggcatcgtcaatcggcacgagtggtttctggtcgatgagtccgaagtagtcggccgccgcctgccccacgccgcgatacgcagcgtcggcattggtgtgccctacccacagcccgcagccttgctggtagagcctgcggacgatgtcgccccggaaaccgagtccgctcgtctcgtgtacggaacggaagaacaacgggtgatgggtgatgagcaggtccgcgccagtagcgatggccttgtcaatgatggcggaggtcgggtcggcggcgaacacgatgcggtgcacgtcgtggctcagatcgccgacgatgagacccggctcatcccattcctcggcgtagcgcaatgggtacagggtctcgagaacgtcgatgacttgcttgagattcggcatatgtcccattgtagtgggctattgcggcaagggactcattctgcaattgcggacaagccatgctcgtgctcttcattgctcgactatcggctcgccttcgcctacaaacaatccactggactgtttgctcaacggctcagcctcctcacccgaggggagctagaaattgtcagtgtgcggcgagctgccagtcggaaccgataccgcacgatacgtccagcggcacggcaaggtcgacggcgtgttccatggcgttgcgtaccagttcggtgacctggtcgccttctcccggcgcgatttccactaccagttcatcgtgaatctgcagaatgatacggctcttgacgtgggcctctgccaaggtctgctcggcgcgaatcatcgcgatcttcatgatgtcggcggcagatccctgaatcggtgcgttgagtgccgcacgttcggcggcctctcgcgcaacacgattggtcgaatgcagggccgggaagtagcgacgccgtccgaaaatggtttccgtataccccttctctcgggcattggccaccagcgattcaaggtaatcgtgcaccttgccgaaggtatcgaaataccggtttttcaacgcttccgcttcacgtggcgcgatcttgagctgctgggcgagaccatacgtgctcagaccataggccaatccgtagctcatggcttttacgtggctgcgctggtcgccggtgatctggtcgaccggcagcttgtagaccatcgaggccacgtatttgtggaagtcggctccggagcggaacgcttcgatcagcgcctcatcaccggacagatcggccatgatgcgcagctcgacctgtgagtaatcgcagctcatcagggcctcgtacccctcccctggcacgaacacgccgcgaatctcacgaccggcggcgttccggttggggatgttctgcaggttcgggtccacggagctcaatcgaccggtggcggcaacggtttgctcgaaagtggtgtggatgcgctcatctgatgtgttggtggcatcgatcagcgtttggacgatctgcttgagcttgttgatctctcgatggcgcagcaacgccccgaggaaaccgttggcccgctcattgtccactgatttgacatacagatcctgcaatgcggccgcattcgtggtgtatgagccggacttggtgcgtttggtgggcttcaaacccatatcttcgaacagcaccttctgcaactgcttgggactttgcaggttgatttcggtgccggcatactcccaagccatttcctgtgcctggcgagcctcggcggcaaactggtcacgcatggaaacgagtcgaacgctatcgactttggctcctgtgtgctccatgccgtgcaatacgcgggaaacaggaagttcaatcgcgcgcatcagccagcattgttcgcgctcgtcgataatcggcccgagcgtgacggcaaggctgcggataatggccaaatcgcgcagacgatgttcgttcggatcttcttcgacctgatcgtcgtcgaagtccaatgtgccttgcgaaggctgttcggtttcggtgaagtggatgtcgaggaagtgctcggccgcctgcttgaggctatcggcgtggaaatccggttgggccagatacccggcaagcttggtgtcgaacatcggcaggtccatgtca

SEQ ID NO: 3534 - DNA, 5128 bp, Unknown
  R85_18m  MAG No. k141_15972
cttcgtgtgttttgttggcgagcgcggcgcggcggtgcgagtaccacagtgggttttcgagcgtgcacatgctgtggctgatgttgtcgatgcgctccgcgagctcggccgggccttcgccgtccgtgcggcacagttcggcgagttccgggtcttcctcaaggtactgggtggcggcgtgcacgcgcggcatcgaatcgaccacctggtgtacgccggcgaaggcgaggtcgatcatcgcggcttcggcgatgtcgatgccggcaccaccgaaacgggtcttcgtcttggtcagcgggaagcgcttgatgaactggtcggcgatctcgtcgcccacttcatagcagtcgccgcagatgcgcgggccgagtgtggccacgatgttcgccggatcggcacccttgctcttcatcaggtctaccgtggcgccgatcacaccacgctccagaccacgacggccgcagtgggccgcaccgatgatgccggtgaccgggtcgcccagcagcaccggcaggcagtcggccgcgaacatgcctagggcgatgccggattgtgcggtgacctggccgtccgcctcgatgacgtgcggagtgtcagtctcaccatgtgtgccggacacgtcgaagccgaagggggtgttgatgacgaacgagtcgtccacgtccacagccacgccggaatgtacttgggagaccagcgataggcgggcttgcaccgcttcggcgagtgcgatgcggttcgacagtacggcctcaggttcgtcgccggacttgccgccgaggttcaggttgccgtaatcgccggcgctcaggccgcccagtcgcgtggtgtacaccaccttgatgccgggggccagtgcgatggggatggtcaccggaatagggcgaccggctttatcggtagagctgatgctgttggaatcgaggatttcttcgctgtattcaggcataaggcattctttcttgggtgcgggcggtgttcatgattcccatgaccacccccagtcagcgggggcggagtggtaggttattcggctttgagggtgggctttttggtgcgcgagcggatggcggcgttgatgggcacctggtgcgggcagggcatcgagaacacgtgcgccggattattgatggcgggtactggcgcgccatcggcatcgcgcaggccggtttccggcacggtaaagaccaatggtctctcgccaggcagcaggaattcaacctgttgaccgggctcgatcttgttacggctcatcagcgtgacacgtccgccttcgtccgcgctccagctcagcacttcgcccactaccagccatgagcggaagtaggcggagcggtcggtgttctgtgtgaccttgtgctccgggtaatagaagccggtggagtagtcgcggtgggccaccttgtcggtttcctcgagcagccattcgggcagttcgacgtgcggggccgggcgaacggccgcatgcttccaatcggtctcgatctgttcgaccgcggtgttggacttgcggcgcgtggagcgggcgtgggagctcatgccgtcgggttcgacggcggtgccggccgacgtaccagaggcagttgagtcggcggcatcagcaaccgtcacgcggtcacgttctgcggcaaccgagccggtgaccgaatcggcaaccgcagtatcagagccacggtcatatccctcatcggccacaccggcgaacgcggcatcggcattgctcatcacttgatcttcggttccttggccaaaatcggggtcgcccgggcgaatcacacggtcacggaaaggcttcagaacattgccatcagcgtcttcaaaaccgcgttgaatcatgtattcattaaccgcggttttgtaggcgttggtcatggcggcgatatagtaggcgcttttcgcgcggccttcgattttgaggctggtggcaccggagtcaatcaaatcatccaagtgccccagcatattcatgtcctgcgaattgaacagataggcgccgttctcggtctgctcgatcgggaagtactggccggggcgcttctcttccacgatcgaatacttccagcggcatggctgcgcgcattcgccatgattgccatcacgcccggtcagatagttggagaacaggcaacggccggagaacgccatgcacatcgcgccatgcacgaagcattcgatgtcgaggtcaccgggaatgttggcgcgaatatcacgcacggcctgcaagtccatctcgcgggccaacaccacacggcgagcgccaagctcatagaaggcgttcgcagcttggtaattggtgacgccggcctgcgtggagacatgcaattccaggttcggagccacttggcgggccatcatcatcacgccgatgtcagagacgatcagcgcgtccacgccggtgtccttgagctggccgacgtactcgcgcatggcttcgatctcgttgttgcgcggcagcacgttgcaggtcacgtacacgcgggcgccgcgttcatgggcgtagcgcgagccttcctcaaagtcctcaaggcttaggtttttgggggccgatcgcatgccgaaggctttgccgccgcagtagacggcgtcggcaccataatcgaccgcggttttcaggcccctcaggttgccggccggggacaacacttcgggctttttgcgggtggggaggttcatcgtcgtattcatcaccgcaatagtgtagtggtggccgtgtaatgcgggcggggctaccgttaggctggataacatgaagatcgatatcgtgagcgtgttccccgaatactttgaggtgatgaacctcagcctgatgggcaaagcccaggccaagggattgttggagatcaaagcgcacaacctgcgcgactggacccacgatgtgcatcattcggtggatgatacgccagtcggcggcggggccggcatggtgatgaagcccgaggtgtggagcgaatgcctggacgaactgctgggattctcgcggccgtctgaatcctccgccctatccggcacaccggtgctcatcttcccgaacccatcggccccgttgtttacccaacgcgacgccaccgagctcagccatgccgaccatctgctgttcggctgcggccggtatgagggctacgatgcgcgcatcccggactactaccgctcccagggcgtcgacgtacgcgaatattcgatcggcgactatgtgctgaacggtggcgaagtggcggtgtcggtgatgcttgaggccatcacccgcctgatgcccggattcatgggcaacccagattcgattgtcgaggaatcctacaccggcgaggacgcactgcttgaacatcgccagtacaccaagccggccgtgtggcgtggtattgcggtgccggacgtgctgttgtccggcgaccacggcaaggtggaccgttttcgccgcaacgaagcgctggcccgcaccgccgagatccggccagaccttatcgcggcactggattgcaaggcgctggataaggccgaccgcaagaccctgatggccttgggctgggaggtctccgccgcccatccgcgccggctcgccgattaattcaccacacggtgggagattcactacgcggcggaatcgtcggaacgctctatatccgagtcgtcatccgcgggctcgatgtagaagacggcggtttcgccgtagttgcggctttcagtgatttgccagccttcgggggcggtgggggtgtcggagcgtaccgagcgttcgagcataatcacggtgttctcgttggtggcgctgcccaccgccagattggccaacaactgattgcattcagcggtctcataggcgtagggcggatcaatgaatatcacgtcaaaggattcaccaaagccgccagccacttgctcggcctttttggtgaacacacgggccttgagcgaggcatcccacgaacgattcttctgtaactgcgacaaggtcttggtaatcagcgccgccgcaggccgggaactttccacggccacgagttctcgcgcgccacggctcagcgcttcgatgcccaacgcaccagtaccggcgaacaggtccagtacacgggcatcatccagcactccccatgagtcgaggtgcgagaaaatcgcctctttggtgcgatccgtggtaggccgggtacccgttttcggcgtagcaagcgccacacccttgaatcgtccagaaattacacgcatagctttcactgtacaggttcatctgcgcataccaatcgtggaaaatggcggaatctcctttcccatcaaaaaaagattgcggaccgtcctcctctattaggaaagacggtccgcaacatttagtaacggatataacgcaatacgttaacgccggatggttcccttgaatggcttatccggagacaatgcgacacgtcccatatcagtccccagaacgttcagcgtaatctccgtaggcttcgaacagcgcaacgtatattccactgtctgatccgtccatgtcgcatccacttggattccacctcttgcgcggagcgcatggaagcttccctcatgccaatcctccggcagggccggaagaacgcgaatccagccatcgtggctttggacaagcatctccgacaaggccgccgggaatccaaggttcccgtcgatctggaacggcgggtgggcgcataatccgctgtcgtacactcctccgcccagcagattggtttcagcgttcgcatccaccggccgcaggaacatgcctatgattcgtttggcgtgttccgcatcacgcagacgagcccacatgatcatgcgccatacgatgctccaaccggaaccatcatcgccacgcaattcgagggattttctcgcggcttcctccagacgcggagtcttagacgtgatgcctgcaccaggatgcagttcgtaaaggtgggacagatggcggtgctgtggatcggattcgatgaattcgtcgttccattcaaggactcttccatcagctcccaatcgcgtttcagccagttgggaacggacggattccgcttcacggaccagagcgctgtcctcttcgtcaaggttttccaaatcgtgagaagcctgaatcaaatcatcaagcagattacgcacgatggccgtggcgttctcgctgctttgcgca

SEQ ID NO: 3535 - DNA, 19779 bp, Unknown
  R85_18m  MAG No. k141_16037
aagccgtcgacgccaatgccgccgaccagcgcagtcaccacagccgccacgataatgatcagaatcgcatcaagtttgagggcgaaacccacaatcacgatcacgattcccaataacacgagataatttggttccatgcgggaaatccttcctatactgcacacgcattgcgccgcaagcgtgcccggatatggatagtgtacgacggaaatcacgattcaactgtcttatcgcgcacattgcaggtattacatgagcctacgggcatataagcgtatggacgcatgagcgtcggctgagcccggtcggcatggtgttcgctatgatggacagtcggactttggtaagagacagtattcgtaacaggcaagtaggttattcatggctattgaggtgcagggacttgaaattcagatcggcgcgcgcacgctgcttcaccccaccaacttccatgtggccaagggagacaagatcggtctggtgggccgcaacggcgccggcaagaccacgctgacccgcgtgatcaccggcgacatgttgcccaccgccggcaaggtgcgcgtctccggcaagctcggctacctgccgcaggacacgcacgcctctgatcccacgcagaccgctctcgaccgcatgatgagcgcgcgtgacatcgccaccatcatcaaccgcatccgcaaggccgaaaaggatatgaccgacccggatccggacgtgatgagcaaggccatgacccggtacgacaaggccatgcaggacttcgacaaggctggcggctacgcggcccagtccgaggcgatttccatggccgcctcgctcggcctgccgcaggaggtcatggagcagcagctcggcacgctctccggtggccagcgccgccgcatcgagctggcgcgcatcctgttctccaatgccgacaccctgatcctcgacgagccgaccaaccacttggatgccgattccatcgaatggctgcgcggctacttgaagaagtacgagggcggcttcctggtcatctcccactccaccgaactgctggacgaagtggtgaacaaggtctggcatctggatgcgcagctcggccagatcgacatgtattcgctcggctggaaggcctacctgcaccagcgcgtggtggacgaggagcgccgccgccgcgaacgcgaagtggccgagaagaaggccgaccgtctcatgaagcaaggcattcggctgcacgccaaggccaccaaggccgtggcagcgcagaacatgatgcgccgtgccgaaaagctgctggaaaacacctccgaggcgcagaaggccgagaaggtggcggacatccgtttccccgagcccgcgccctgcggccgcacgccgatcatggccaaggacatctccaaggcctacggttccaacatcgtgttcgccggcgtgaacctggccatcgacaagggctcgcgtgtggtgatcctcggctacaacggcgcgggcaagaccaccacgctgcgcctgctggcccacatcgaggagccggacaccggttccgtggaatacggtcacggctgcaagatcggctacttcgcgcaggagcacgacaccttggatctgaacgccaccgtgttggagaacctgcagcatgtggcgcccgagctcgataacacgcaggcccgttcgattctcggctcgttcctgttctccggtgacgacgcgatgaaaccggctcacgtgctttccggcggtgagaagacccgtctggctctggccacgctggtcacctcgcgggccaatgtgctgctgctcgacgagcccaccaacaacctcgaccccgcttctcgtgaggagattctgaaggccattgccaagtatgagggcgccatcgtgctcgtcacccacgatgagggcgccgtcgaggcgctcaaccccgagcgcgtgctcctcatgcccgacggcgacgaagacctctggaatgattcgtacctcgaactcgtagccgaagaatagtcctacctcttggctcccctcactgaggggagctggccgccgtaggcggtctgaggggagtctcgcaagcatgcaaaggaatcaaccatgccaaccacaacaggccagaagatcgccatcgtcaccggcagcgcgctgggtttgggctacgagctcgccagccaactcatcgccaagggctggctggtggccggcatcgacttcaacgccgaacgtcaggccgagctgagcgcgcagtggccagccgaatcctaccgcgccttcgtaggcgacatcaccgacgaagcgttcgtcaaggaatccgtggcgagcatcgccgcgcttggccacatcgacctgctcatcaacaacgccggccagccctcgttcaaggtgcccaccgcctatgaagccgctgacattgacaaatgcctcaaggggctcaaaggcatgatcctgtggacggtggaaactctcaaggcctgtggcgagcgtgacgtgaaaatcgcccagatcatgagcaccgccgccacgcgcggcaacgcgaacgaaagcgtgtactgcgccaccaagtggggcgagaagggctacaccaagagcctgcaggccgcatacaagggcaccagcgtcaaggtggtcgccgtctatccgggcggcatcgacaccgccttctaccgtgatagccatgactacgtctccgaagccaagcagcacaccttcatgcagcccggtccgctggccgaggtcatcctcttcaacctgatcaacgaggccaacctcaccgtcaccgacatcgagatcaaccgcaacagctgagctggcaggttatacacatatccaccgattcggccgagctggttgcgcgcagaagttggttatgccatcgtgagttgtatccgtgaataacgcggttcacggatacaaccatcagggggatggcatggagtcctatgcatacaacacgttcttcacacttgatgaggcgcgagacctcgcccagaaaacactggaacaatgccgtgccagatcgatgcgcacttcacaggagctttgcttcagccatggcaccaggctacagcttgctggtatgacggccacgctgaattacaagcccaactatgacctcaacaaactgcacgttacggtgtccggggctgaaagattgtcgaatctcaccgaaacgcaatgccattattggggtcatggcattgaccagacgatgattgatgatcttatcgccgtggtttcagtggaacaggcgctgtgtcagatcgcacagttcgtcgatgtggaaagtatggtcattgccttggattgggccacctgccgtaatgagcatttgaaacagacaacgaaagacaagatatcgttgttcctcaccgatataggtaggttccccggtatcagattatttcgcaaagcgctctcgttgtgcagagagaacaccgattcgccgcaggaaagcatccttcgccttgaatcggtaaaacgtggattacccgaattggaggtgaatgctccgatatacctcccgttgcagaacaaagaggtggttgtggacatggtgtatccgaatgatcatgtgattctggaatacgacggacggtaccactatgaccgaaaccgatgggaaggagatatcgagaaaaggaacaacctctccttcgcgggctataagacttttcccgccacaagaagaacgttcgctaccacgcagaatctggatgaatacttcagaatcgttggaagtgcaattgcggaataccgcaataccgggtcattttcacaatgagatatgaccggacgcattcattaggtcgattcttcattcattaggtcggtgagctctgacagtcaccactggaatggcgtcatcccaatggtgacaatcacagcctcatgacctaatgaatgaagaatcgacctaatgaatgattggaagcgttccgtgcaacgttatggcacccgcaagaagccggaacccggaatatgtctgttatcgtgggggccaagcaacaggtgaaggattgagtatgcacatcggtgacgatgagtttgaacgggccattgaacaggtgttggatgatttgcctgaacggtttgcgcgggtgctggagaatgtcggcatcgtcgttgcggacgagcccaatgagcgcgaactggccacaatgagcaatccgtgcggtgagctgctcggactgtatgagggcatacccatcacaaagcgaaccacgggctacagcggcgtgatgccgggacgccatcaccctgttcaagggaccgcatgaacgcgtatgctcaacacgggccgagctgcgccaacagatccgcaaaaccgtgttgcacgagatcggccattattccggcttcgatgatgagtatctgcactcgcatggctactgaagcgatgctgtttcactagcggggagccgtcataccgccgtatgttgccagatctactgcaagtggtgcaacgcacggatgatggcgcaacggtcctcggtggttccctcgttggcgcacatggtgtgcgtaccaacgcggattgcgcaaggtctcggcgccggtggcctcatccgtggcgacgagcgtgtgcagatcgttggcgtactggaaatgcaggtggctgagcagcccgccctcggcgaacgccttgcgcgaaggcagagggttgatggccagcagccagcggaacgggctgtcttcggcggccggatcagcggtgcggagcacgaaggtgggggagctttcgagcccgtgctcgatgacatggtcgatggcgtattcgtaagtgtcgaggctggtgtcgtcctcggcgaaccattcgatggcgagcgaggcattgtccgtggagccggattcggcggccgggcttgaagccagggccgcaatccggtgccgatacggttccaagtcaaacgcccgcaatcccatggcggtcacgcagccgggggagagggacaggaattcatcggcctcgtaatcctgcacgatatgtccgccgtcgaataccacgtaccggtcggccacgccgttgagccatgcgagtcggtgatgaaacagggcagcatcatcgtgacgtccacggccagcgcggagaccacatgcagccacggcagtcccagggcatcggggtcgagcattcccagcgcggtgagtacggcataggtcacgccgaagttcaacgcggttcgccatcgggcggccgccagcaggggcaacaggaacagcacgaccatgacgatttgcgtggcgagccctacatggaagaacagcatgaggttcgccaccagcagaaggaagagtctcgcgcgcgaatcgagcgtccggcgggcaggaagatggagccgaagccgctggtgaacagggtgctcaccagtgtggcgatgcacaccatcacgaagtacagggccgcaaacacgccgatggtgatgaggtcggagacctccagtttgccggatttggcgggcttgttgagctggtcagaggtttcggcgggcgtgttcggtgcggtcacgatgttttccgtttcgtatgcattgacaatattcctctcgccaatctaacgatgatttcccgcaaggcaatagtctgtctgtgatttttgcgtgcgaaacaatagagctcccctctttgaaggggagcctgagtgttccatcaaaaccgaatgctcgcccggaactcgccttcggccagttggccgagttccagcctggctcccatcgcctcgcatgccgcactggcgatggacaggccgagccccacgccgggcacggcgctgatacgcgagttctcgccgcgatggaacggttgggtcagctcgttcagatcgtccggcagcatctcatccgtggtgttcgtgacggtcagacggggtccgcttccatcctcatccgatacgacggtcacgtcgatcgacccatcatccgtgttgtgcacgacggcattgcgcagcaggttgccgaccgccagttccagcaacgccgggtcggcggcgatgagaaacatgtccgcgtcgccgccggccttgttcacggttatggtgatgcgacgcttggtggcggcatcgtcgatatccgcaagggagttgccgacgcatccgtacaaatctgtggatgtgcgtgccgttgatgcgggactcatctgtgtcacatcgcccgcctgcttgccgccgatgatcccgctttggatacgggacaaggtcagcagcgcctgcaccagttgcgcgccgcgccgattggcatccagtgcgcgctgtaccgacggtcgcacatcctcggggaaccgcccctgggccaacggcgcgtccagattggtctccaccgcggcaatcggcgtgcgcagctcgtgcgaggcattggacacgaaccgccgctccgcttcggatgcggcctgaatccggtcgagcatgccgttgatggcgtcaccgagctgcgtgacttcggaggattggccggcagctcgaccgtccgtgcggctgtccgtgctatgatcccaatcctcggtcccgcgtctgcccgcacgccggaactggggcctacggcgagatggcggcccattcacgtcgatgcgcgtatcaagtttggccgggtccaatgccgccgcctgcgcgctgatggaggtcagttgccgggacatgcgcgaggtgaccagccagatgatcagaatgctggtgatcccgaagaacacgaagatgatggccgcgctgatgcgcaatccggtggcgatgttgtcctggttccacacggagacgccatacggggtgttgatggtatacgacccgtccttgccccattccacctgatagtcaccgtcgcccatatcgccgccgacgctggatgttccagtgatatcgttcagacctgtgccgcttccccgggaaaacattcgcgggtcggaatccgggcgtttgccggtgccggaaccgctgtgctggctttcgacctgcatctcagggtttttggcggtgaccgtcgtggcgtacgtgaacatgctgttgaccacaatggtctgcacgagggtcgccgatcccatggcgatgaggaacacgagactgatggccaacgtcagtttggcgcggaatgatttgggccgcagtttgccggcaagcgcctgtatacgacctgatgctttcgccgtgttcgtcgccttcattgcagccggtatccttccccgcgtgtcgagacgatggcctcgcgatcggcgagtttgcgccgtagcgaatagatggtggttttgatcacgtcggtcgggtcggcggcggtcggctcatcccaaaccgcatcgtagagttcgtgcgcggtcacgtatccgccttccgcacgcatgagctccagcaatatgccgtactccttgggtgtgagtttgacgagcgtgcgcccgtggtcgcggaacacgagccggcgtgtggaatcgagggtgatgtcgccgcgcgtgagcacggctgcggtcgcgttgctggtcccgctgcgccgttgcagggcgcggatacgggccagcagttcgggataggcgaacggtttggtcaggtaatcgtcggcccctaggtccagcccgctcacgcggtcgctgacctcggcggcggccgtcagcatgattacggccacgggaatgcggttcgcggcgacggtggccatcaccgcgtcaccggacaataccggcagatcacggtcgagcagcatgatgtccacgttcgtgccggcaaggatcttcaacgcttcgacgccggtggttgccagactggtcgcgtacccctcgtagcgcagcgcgtcgtccaacgcggcggccagttcgcggtcgtcctcgacgatcagaatccgcatcatgtccccttccgagccttcccgaaccaatggcatcacccaacattttcccgattctacggtaaggcgaaagtaatccgtccgcttaccgacgctccacggtgagggcgattggatggaagtcgtcacaatcgactcacggaatggagacggtaatgtccactactcatacgcgcctggtacggcgaatcgcaatgcttacgtccgcactctcgctggcttcgatgctgggcgcctgctcgtcaccgctggcggcagtcggaacaggctcaggtgccgacgatcggtccgatgcgacgaccaccaccgacgccacggcgaagcgattcgccgcctgcctgaccggcaaaggattcgacgcgcgtacggctgctggcgtgtcgtccggctccggctcgggcaaacaagccccgaccaaaaacgcggtcgcactgcgcatgatcggcaccgacggcaagccggtcgcctcccaaggcaacagcctcagcgcatccgacgacggcccgcaactctacccgaacgctgcctacacgtcgatggaagacgacagcacctgggtggtgttcaaggacgccaaggcgctcgccggctcaccctacgaatccaaacagcgggaatacgccgactgcgaggccaagaaccccgacttcacccagcccattccggacatggggccgcaacaccagtattccggggaagacaagcaggcggcgctcgcctacgcccaggccgcgcgtaagaagggcttcgactgggtcaaggacccggacgccgatacgcccacctcaatcacgattcccggcaccgtaagcgaatccgaactgcgccgattcctcaaggaatgcccgaccgatggcgcgaacatctcctatgccttcgctggcaccaccgaggaattcggctatgactacaacaaagtcctctccgaattcacctccggcagcgcgtccaccgaagccgcgccccagcaatgagacggccatccgataacggacaaaggagcaatcatgacacggacggaagcgcgcagattcgggaaacaccgcagaatcgtgacgatgattatcgcggcgatcgccgtgatcggactggccgcggtgtgcgtggcggtgaggccgtggacgttggccgggcacgtcaccgcgaccgggcagactggccgatcgcagcaggtggatgtgtccacgctgcgcacgcaggaggtgaccaagggcgtactcaacgccgagacccggctcggcgcgagtctgcaatacgatgacgcctccgatttcgcggccgcttccggcacaatcacccaactgccggtggccggcaaacagatcaacaccggcgaacaggtgtacgagatggacggcgcgcccgtgccgctgttccatggcgaccgcccgttctggcggacgatcggcgatggcgtctccgacggcccggacgtcacgcaactggagcagaacctgcaggaactcggattctacggcggcgaggtcggaccgcatttcaactggctgacccgcgaggcgatccggcaatggcagcgctcgctcggcctgaccggcgacgcggtcaccggcacattcgacccgaatacggtggccctggccgcggccgcaccaatccgcatcacggcggtgaacgcgaaactcggccaatcacaggtcagcccggcaagctatacgggcgtcaccctgcatgcgcaggccacgttgaccgccacgcaggcggcgatgttcaaagccggagacaaggcgcaggtcgtgctgccggacaacaccaccgtcgaaacgacgctcgcctcggtcgatcagggcgggcagaagaccggcgacaacgggcaagccacacagccatcggcgcgcatcgacttcccggaccagtcgcaggtggcggctttcgggccgacggccgtgcaagtcatcatcccgaacgccgatgcctcgaccggggaggcgctgatcgtgccggtgaccgcactgatcgccagcgccggcagcgcgtatgcggtcgaagcggtacgcggcggcaagttggtgcgtgtgccggtgtcaatcgggctggtgtccgacgcgcaagtgcaaatcaccaagtccgacggcctcaaggcgggagacaaggtggtggtctcatgaacgacatcgagtttgcccccgctggcccagagcatggggcattgctgacgttggagcatgtgacgaaggcgtttccaggcaaggacgggagcgtgctggagatattgcatgatacgtcactggccatcgatcgcagcgagctcgtggccatcgtcgggccgtccggctcgggcaaaagcacgctgctgtcgttactgggcacgctggacatgccgacctcgggaatattgcgatacgacggcggggatgtgaatgcgatgggtgagcggcagcgcagcgtcctgcgggccgcgcgcatcggcttcgtgttccagcagttccatctgatcgccaccgtatccgccttggagaacgtgatgacaggcctgcaatacacaaccctgccgcgcggcgaacgtcggcaacgggccgccgaggcgttggaacaggtcggattggggaaccgcctgcatcaccggccggcccagttgtcgggcggcgaacagcagcgtgtggccatcgcccgcgccctggccaaacggccggacatcatcttcgccgacgagccgaccggcgcgctggactgcgaaaccggccacaccatcgtcgacctgctgctcacggcggccgattccggcgcaagcctggtcatggtcacccacgaccagaccatcgccgcacgtttccccaggcgtctgcacatccaagacggcctagtcaccgaactcgacaagccgaatcaagccccctctgacgaggggctgtcagccaaaggctgactgggggagagatatgagtgaacgtactcctatgagtaaaccaatacgcacgcgaattgcggatttgatgcatgcggcttgggttggggccgccgggcgggcgtcccgcacggtgctggcatcgctgggcatcgcgcttggcgtggccgcatatgtggcgttgtccggcatcgccgcatcgaaccaggcagcgctcctcgcccaactcgacgcgcttggcgcgaatctgtcggtggtcgcccccggcgtggacgccgcccagcagaaggttccgctgccggattacgcgcccacaaccatcgcccgtcagccgcaggtcgaacgggtcggtgtcttcgacaccgcgccagagaaggtgcagatcttcaagaacgggctgtgccccaaaaccaacggcaacgcgctggccctcgccatcatgcggcccggcgcactcgacgccgtcggagcaagcctcgcccaaggtcatggcatcgacgcgaacaacgagcacctgcccgtcgccgtgctcggctcggactccgcctaccggctcggcgtcaacgagcccggcgaccgcatcctcatcgacaacgcatggtacggcgtcatcggcatcctgaaccccacgccgcaggctgaaaacctgaacgccgccgtcatcatcggcgagcaatgggcgctcggccggtaccccgaccaggccgacaccatcggacggatcagcgccatctacgtgcgcaccacgcccggcgacgccgaaggcacccgccgcacgctcgcccacgccgccaacccggccggcggcaacgtgtccgtcaccgcgtccgccgacctatccaaagcgcgcaacaccaccaacgattcactgaccacgctcggcctgatgatcggcgtgatcgcgctggccgtgggcggcatgagcatcgccaacatgatgattgtcaccgtgatggaacgtcgcggcgaaatcggcctgagacgcgcgctcggcgccacgcccggcaacatccgcatgcaattcgtcaccgaagcggccctcctgtccacactcggcggattcgccggcatcgcgctcggcgccggcgctgccatcggcgtcgccgccagtgccggccagccgatcgccctcgactggacctccctgccgctcgcctgggccgccgccatcctggtcggcatcctcgccggcctctacccggcctcccgcgccgcccgtctcaccccgaccgaggccctgcgcggcgaataggggcgacggctggagtgaacgatcaccatgagtgcgcagcctcaatgtcacttttactgcacatgatgacatgtgcagtaaaagtgacatattggtgctgggcgggagagagcacgcgtggcgcgggcggggtgtggttcgcggctatcggctagtatggtgcggtcacgacagagggaggcatgctgtggccgatgtgatgcgggagctggaacggctgcgaccggtgtatgagacgggcgtcctgcggttgctgttgcgccagaacgcgatgctgtacgtgtcgctgctgcgttccacgttcgacccgctcaccggcgagctgccgcgcgagaccgtggaggagcggttcgcgcaaagtctgaacgctctggccgacgccggcgaatatgcgccgcgcgaggaccagaccttcgccgaggccgcccatcagatcctcgccgacctgacccgtgaaggcgaaggcgactacgcctggctcgccaactcgcatgatgcggccacacaccgattcctctaccgtttgacggcccgcgcccaccgcgccatcgaggcgctgagcaggctcgaagacgaatcacgcgccctgtccggcgcgcaggccaacagcatcatcatggaaatcgaacacgcgcgcatgcagctgaccgccgaccccggcgagcgcatcaaactcctcaaccgtgaaatcaaggaacgcaagcacgagatcaaacgcatccaacagggcaagcagcacgccacgctgagcgaagcccaagtggaggacgtgatcgccgtgatccacaacacgctgcgcggcgtacccatcgacctgcgcgaactcgtgctcgacgagcgggacaacggcgacgccttgcgccggcgcatgcagaccggcgacatcagcgtggacgagaacctgacccgctaccacgacgaataccgccgctcgttcagcgaatcggacagcggccgccgcttcgaggacgccttccaggtgatcatcaccgacgagggccgccagcaaatcgacgaagccctgcgcgccatcgccaaaaccccgtatctggccggcgaatccggcgtgctgctcggccagatccgcgacgaactggcccgcatctacgacggcatcgaagccgtgcgccgccagatgcgcgtctccgacgaggcgatcagccggctcgtgcgccagcaaaccgacactcgctaccgtacgatgctcacccgcttgaaccgactgtacgcgcgcctcaacgcggatgcgaaaacccatatgggagacgcctcgcgcccgtacgacacggccaccgcggacgcgctgttcgcgccattgccgatgcgcccggccaaatccatgacccgcgccaccgcacccggcctgagcgacctcgccgccgaagccccgcaggcgactccggtggccgatctgcgggatatggtcaacagcggcggcccccgactcctgcgcatggtcagcctcatccggcgcaacccggtgaccgttgacaggtccgatgacaggtccaacgcaaccctcgtggacatcgccgccagcttcaaccggctgcccgaaagcgaacgccgcgaaagcgagatcgtcggcttcctgggcgggctgggagccgtaagcggcagcgccatcgccgacgagccgtccactgacggcgtcggcatcgacagcgacatcgccaccgagccggccccggcgcagcgcggcgataccgcgacttggcattgcgtatcgatcgacggcgagccccggcactggatcactagaccggtgctggccgacatggacgagctgaacatcattgtggaggaaggatgaccgtggccgaggaacacgaggagcacatggacaacgccaacccgtacgccctgttcgaaggcgacaccggcgacatgccggccgaggcacgcatggccgccatcgccctcaaacgcgaccgctatatcagcgggcccacctacgacaccgtgctcgacaaccgcgacgtcgtcgtacgctccctgaacaacgacctgctcgacttggtgatcaacgaacgctaccgcatcatgtacgccacgcccgtggccggcgacgacgtgaccctgcgctcgctcaaaacccgtgtcagcctcaaacgcgaggaggccgcgctgctcgccttcctgcgcatccgcgtcctcgaatacgagaacgtgcacgccgaccccgccgactggctcgtcagctttgaggagatccgcgccgcgctcgccaccggcgccggttacctggcagcccgcaatgacgaggaaggcgtggcaaagcagatcggcgccatcgtctccgcgatgatcacctacgggtatttggcgcgcctggacgacgaagccatgtaccagatcacgccgctcgtgcccgtggtgctcgaccgcgaactggccgacacctggctcgacgtcgcggaacacggcgacggcgacacggaagatgacgatgacgacgagaagggagccgaatgatgcaggcgacagacgtgcagatgatcgcggaccggtggatgctggaatcccgccgactcatcaactggggctcctatgagggctaccacgaattccgcccctccacggaccacaagctgccggtgaccctgctcgccggcgccagcgaatccggcaaatccacgctggtcgacgcgcagatctccctgctgtacccgaccggcacgccgttcaacaaggcctcgaactccggccgctccgaacgcagcgactacacctacctgcgcggcatggtcggcgtgggcagcaccgaaaccggcgacgagccgctctacctgcgcggtcgcgacgagaacggcgcgccgcaacccgtgtggggcgccatcgtggacacctatcgcaaccagaccaccggccaggtgctttcctgcgccaaattcctctacctgatgcccggcgacggccgcggcgacgtgcgccgccagtacgtggtctggggcaagcccgtggaccccaggcgcatggaccaataccgtgacgccccgttcacgccagcccagctcaaagccacctaccccgactgcctcacattccccagcgccgaagcgttccacacacacatctggagcgcaatgggcctgagcgaggccgcctgccgactgctgcacaagatccagtccgccgacgcgccctcccggctcgacgacatcttcaaacaaggcgtgctcggcgtgcccgaagccctggacctggcccgcaccacggtcgaggactacgaacgttacgacgagaacttccacgccatggacgagaagacccgccgcatggacacgctgcgcggcatccaacaggcctacggcgaatacgccgccgcacgcggcaaggcccgcgccttcgaaccggtcaagccggccgtcgacggcacggtgccggccgtgctgcgcgactgggcattggcccgcatgcgcggcgaagtcgccgcccaactgcccgccgaccgcgccgaacaacagaacagcgaggcggaagccaagctgctgcgccgccgaaccgaagacctgcgcacccgcctcgacatgatccgaggccagatgcagggtctggacggcggcaacctgacccgactcgaactcgaactcgaccaggcccgccgcaccctcgaagacatgcaagccaaccgaacacgaatcgaacaaacgttcgcatccatcggcgagacgctgcccggcaacgaacagtcctggaacgaacgccgcatcaacgccgtgaacttcaaacgcgaatacaacaaacgagacggcgaatgcgaggaagccctcaccgccgccatcaacgcacgggccggcgcacgcggcgacctcgaacgactgcaacgcgacttcgaccggcaacgctcccagcgcacccgcatctcccagcagatggacgaaacccgcgccatgctctgccgcgccaccggactcgcccccgccgaactgccgtacgtggccgaactcatggacgtgaacgaacacgaggaagactggcgtctcgccatgaacgttgcctacgcgcccatcgcccagaccatcctcgtcgacaagcgccacgaacagggcttcgccgccaaagtcagcaccatcgacccgcgcaccatgccccgacgcacctggcagttcgtggacaccgcacgccactacgacgacaccggcgcgcacgcgaacatactcaccggagaacaggacggcgactggctgtccggcaaactgcgctaccgcgacgactcgcccttcgccgactggctgcgctcgcagacccaggacgaacgattcgacgccctatgcgtcaccgccatcgacgacaccgaccgcaccaaccgtcaggtgcaggccgacggtcagatcaaatccggcgcacgcggccagcacggcaccaaagaccgcgcccaggtcatcggattcgtcaacgaaacctacctcaacgcgctcgcagcgcaggtcgacgccgcccgcaacgcgctcagccaagccgacaccgactacacggccgccaaaacacagtccgataacctccaccgcgaactcgaactggccaaccagctcgcctacacgtcctgggaacgcatcgacatcgccggcgcgcaacggaccatcacggacacgcaggacgccatcgcatccatcaaaaacgatcccaaactcgccgaactcgccaaacagcgcgacgaactgaacgccgaactcgaccgtgcggaacgccagcgcatcgaatccgaccaggccgcggcccgcgccggcagcgccgtcgaagcggcgctcatctggctgcgcgaccatgccgacaccggcacgacggacgccgccggtgccaccgccgacaatgacgatgacgccgcttccggcccgctgccggacgaagtcacggcggcgctcgccgaatcctacgacaaccgattcgccggattggcggacgcggccatgcgcgcgcacatgatcatcggcgcgggcgcggcaggaacgcaggcgccgggggagagcttccccgaacgcaccatcgccggcatcggcaaggacatggcctcccgcatcaacctgctgaacggccaggccgacgccgcacgcaccggcgtcgaatcgaaaatgagcacctacatcgcgctctacgcggccgacgatgattcgctgaccgccagcgtggaggactaccggtactatctcgacgaactcgccagcctcacccagctggccgcggttgccgccaccgacgccgaataccggcgctgcctcgaacagctgctcaggagcttcctgaccatcaaacgcgccatcgacacggatgccagcgacatccacgaccagcttgaccgcatcaacgccatgctcaagggccaacagttcggccccaagcacggcagcctgtccctgcacgcggacgtgcgccgtcccgagcgcaccttctgggcgcagctcatccgcgtcatcggcaccctgaacgattggaaatccgccgacgtcaacgattccgacgcctcgcgcaaggctttcgcggcctgcgcgccgatggtcgggctgctgcgcgccgaactcgcgcaggtcaaggacacgaacggcgtgaaaagctacggcgcccgcaacctcgacccgcgctgccgctcgtccttctacgccatcgtgcatcatgccgacggtccggacgaacgcatcacctccaccggcggccgttcgggcggcgccttgcaggagctcacctcgttcgtatacggcgcggcgctcatctacctgctcggcggcggcctgaccagcgagccctcgtacaccacgctgttcctcgacgaggcgctcatcaaggccgacggccgttacacgcagcgcgccctcacggtgctgccgcgcctcggattccaggtcatcgtctccgccccggaaagcaagaccggtgaaatcctcgaggtctccaccaaggcctacgtgacctacaaggaccccgacaccggcctcacctccctgcgcgaggccgtgctgcatcagaatgacatggacgatgaatcatcgtcggatatattgaaggatgacggggttgccgaatgagcagtcccggcgtcgccggtattaagacgattcggttcgactcgacgatgttcgaaagcaggtgatgggaactatggccggcatgaaagacatcgctgcgatcaccacatgcgtgaagaaacatatgcgttcacatatgtacgacatcgaaccggcatggccatttcccgtgccggtgggattgccggaccaagcatttttggaaaccaatgcgattgcagtgcatgacaacaacaatgagatacggcaatgggcaagcaagaatggttgcgaaatcataaccaagcatcgcaccataggcacctctgtcgagttgatctccaaagtcgtcgttcctgacgaatcaatagccatgcgtgtggttggtcgtacgctggcggcggaatatcgcgaagcgcaccgtcgcacagattccactgacaggattcagcggcaaatggctgaatgagtcaaaaaccaatcgtcgtaaggccatttgccgactgctcggtgtcgaaacgttgggtctgtcaaaacggccgaccgaactgcggttccgttatctcgatccgggccacgacgattttggtaccgatcgtactgaacgcagcgcgaagattgctatgcgggagcctaagccgacgcccggccttcaatcggcggagcgacgtctttatgaacgactgtgtgctgacaaaaccatcgcttatcggcgtatcgaacaggaacgcattcccatgcgtgatgcagttgacgaattacgcaagcttggcatccccgtggagtccattgaagattttgtcccggttcgaacatcaatcgtttgacggacgtaccggggcagaatccgttgtcccggtttgtgatttcgggtgtttttcgcgaaccgggacatgttgtgttgccccggtatgggcgtcaatcgtttgatgcgagaatcgggacaacatggcgattctgagattggctttattccgccgtttccgttcgcgttttatgtggttcgtggaaactggaatgtcctggttctcgaaaacaggccaaaatcacgaaccgggacagcgggttttgccccgatgcggacgtcaaacgattgacatgtgaaccggggcaaatcagaggaggagaggtcttcgggatagagcttgactggggctgggcgcacggttgatgtcgcgtgggccggctcttgcgtttcggtccactgatggtccggaattttgcatactatggttcggttttccggcctgacacgccatcgaacaagcgttcgaatttggtcgtgagttcgggtatccttgggacagatttggcgcgcgcataaccgtgcgcgcgggaacggtgagatggaaggtggggtgtggctgtggcggcaacgcggactggcgcaaggcgcgcaacaagcgcaaagggcgcgaaaaccagcaagggcaagaacggtgaggtcatcgtcgaaaaggtgatgaccagcgactccttcctgagccgggaaatcaaaaaggcgccgctgatcgaacacgatggttcgctggtagctgatatctcgcacatcccgaacgatctcaagatcacgattcagggtgcgcgcgaacacaacctcaagaatgtcgacctggcgattccacgcaaccgtatggtcgtgttcaccggcctgtccggttccggcaaatcctcgctcgcgtttgacaccctgttcgccgaaggccagcgacgctacgtcgaatccctgtccgcctacgcccgccagttcctgggtcagatggacaagcccgatgttgacttcatcgagggcctgagcccggccgtctccatcgatcagaagaccaccaaccgcaacccgcgttcgaccgtcggcaccatcaccgaaatctacgattacct

SEQ ID NO: 3536 - DNA, 29323 bp, Unknown
  R85_18m  MAG No. k141_16149
ccgccgccatattcattgccgtcgtcagtcttccggtgtttcggcttcgagtctcgcgttcgcgtcgtcatgtttccgcagattctcagaccatcgcttgccgggcaatgcgaggggcgcagtccgtcggatttccttttcaccgctccaggcaagcctttggacgagcccatgacgaacggttggaatccgactcggagcgatggctggttcgcggtcgcgttgcgcagggccggcatcgagcgcgggcatatgaccattcacgatctgcggcataccgccgcgagcctcatggtgcagtccggcgcgaacgtcaagaccgtgcagcggcagctcggccacaagtcggccgccatgacgctcgacgtgtatgctgacctgttcgacgaggatctggacgacctgtctgagcgcatgggcggtctgctgttttctcaggatgtgggcaaaatgtgggcgcagaccgtcgagaatgttcagaagacgttggaatcggtggggtttgaccgttgaatgattgcgggttcgagtcccaccggaggcaccttgaaatcggcctgtggccgatgccgttttttgcggctgtgccgcggtctctcccccagtcggcttcgccgacagctcccctcgtcagaggggctcgcagcttactatgtggagagcttataaggccgaaacaaaaggccgttaggctatgtggcgttgtgacgatgtacctgatgaaacgaggaatccacatggcttcacgctggaccgatgtcgaacgagtcgaacaaggcgccctgcccaccatgcttgcccaagccgtcattgcgggcactgcactcaccgttggtgccatcgcctgctcgggattctatctgtccatgatcggcaatgtggccgcactcctgccgtgggcgactatcgtgatactgatcgccgtggcgttcacctacatcgtcggcttcgccctgttgtggtgtgccgaagccctgaccctgcgtgccaacgacaaactcaagccatggctgtacggcgtcgtcggattaatcggctacggcgtgtggggcatgttcgtgatgagcacgatgatgaacacgctgaaccagccgctgaacggcgtggtgttgtcgaacagcgatgtgatggccctgaccgtcaactacgcggtgttcggcttcatcgccttcctgttggcacaggcgtacgcgcccaaaatcgccaccaagaagggactgaccatcgggctgatggtggtgcagatcgtattggccatcatcggtatcatcgtactggttatgatgttctccgcactatctcactgactgacttatcgctcgccggcacgacgcgcgcggccatcatcgcgcaaagcgaaagattccgggcgctaggctggaatacgatatcgtgatggcatgacgcctggtgacaccggcatgccgaaccagcaggggagaaggagccaaatgttcagtgtgcttgacatgttcaccatcggcgtcggaccttcatcctcgcacaccgtaggcccgatggtcgcggcacatgcctttgcctcctcgttgctggccgaccatttggtcgatcgcaccgcacgtgtcaaaatcacgctttacggttctctggcgctgaccggtctcggccacggcaccgatcgtgctgcgatggccgggctcgaaggcaatctgccggccaccgtggataccgaccacatgatgcgcatccgcgagacctgcgcgttggacgatactctgaacctcgccggcctcaaacgcatccatttcgactacgaccgcgacgtggtgttcgaacaatggaagcgcatggccgcgcaccccaatggcatgcgattccaggctttcgacgccgccgcaagcttggtcgacgaacaggtctggtattccatcggcggcggattcgtgcgcaaaggcgctcccgaagacccgatgatcggcattcatgaacgtcctccggaaggcacctcctttgccgacgcggacgaatcatcatccactgatttcggcgtcgaggcaccctacccgttctcatcatgcgccgaactggtgtcgttgtgccgggaacatcatctcagcatcgccgaacttgtatgggccaacgaaaccgcttcacgctcaggcatccaggtccgatccgatattgatgccatctggcgtgttatgcgcgcctgcgtggaccacggatgcacctcggcggagcccacattgcccggtggccttgacgtaccccgccgcgcgccgaagatgtatcggcgtctcgcttcgaattccgatgtgctgcgccgcgacagccggcgcaaagacgccgtgctcgagtcttccgacgccgcatgggtggatctcttcgccttggccgtctctgaggagaacgccggaggcgggcgcatcgtaaccgctccgaccaacggttccgccggcatcattcccgccgtgcttcactattactggcatttcgtggacaacgccaatgaacagggcgtggtcacgtttctgctgaccgccggtgccatcggatacctgttcaaacgcaacgcctcaatttccggtgcggaagtcggttgccagggcgaagtcggctcggcctgttcgatggcggcggccggacttgccgcagtcatgggcggcacgccggaacaggtggagaatgctgctgagatcggcatcgaacacaacttgggcctgacttgcgatccggtgggcggactggtgcagattccatgcatcgaacgcaacgccatggccgccaacaccgccatcaacgccgtgcgtatggccatgctcggcgacggctcacacatcgtgaccctcgatcaggccatcgaaaccatgaagcagaccggtgaagacatgatggccaaatacaaggagacctccaagggcgggcttgccgtcaatgtcgtcgaatgctgattgacatgtctggtattcaccagcatgatgaccggaattgacgtatacggccagcgtgtcgtatcgcacagggatgaaggactaccgccgattcgccgatggtgctaaggtagggcgcattgtgtctttgaaggaggactaatggcagatcagatgcctcaggtgaacgccgaattcggcaccacgcccgttatcgagttcccggcgcccgaagccccgaagggcctcaaggttgtggagctgaccgagggcgacggcccgatcgtgcgtcgcggcgacaccgtcaccgtgaactaccacggcgtggtgtggggtaaggacaccccattcgactccagcttcgaccgtcatcagcccgccagcttcggcatcggcgtgggacaggtcatcaagggctgggaccagaccgtgccgggccataacgtgggctcgcgtctggtggtttccattccgccggaatacggctacggttcccgcggcatcccgcaggccggcatcggcggcgaggacacgctggtgttcgtcatcgacatcatttccacccgctgaccataggtcagcacatgacgaacgccggggtcatagccggcgttttgtcataaataacgaaaattgtttcagcatcgacaacggttcaggaggacgatatggctgaggacaaggtctacctgctgacgcaggaagcatacaacaagatgaaggaagagctcgcccatcgtgaaggcgagctgcgtgaggaaatcgcgcacaagatcgccgtggcgcgtgccgagggcgacttgtccgagaacggcggctaccaggccgcccgtgaggcgcagagcaagaacgagggccgcatcaccgagctcaccgtcaagctgcgcgattccaagatcatcgagaatgccccggaaggcaccgtgggcgagggctctgtggtgaccatcgagctcaacggcaacgagatgacctacgtgctcggcagccgtgacatcgtggccggcaccgactacgacatcatgaccccggattccccgattggcaaggccatcgaaggtgccaaggtgggcgacgtcgtttcctacaccgcaccgaacggccgcgagctgtccgtgacggtcaaggccgccaagccgctggcctgagttataagtgactagtatgcccccgtaggcgggggcatacttatatgtcgtagcgtttattgccacagcgagacgatcaccatgtagatggccaccatatggcaggcatatccggccaccgttccgcagtggaaaatctcatggaagccgaagacgcgaggccaagggtcgggcttgcgcaaggcgtagacgatggcgccgaggatgtagcaggcaccgccggcgcacagcagcaccaccacggctggccccgcatacggcgaattccagaacatcaccatataagccaggccgtagatgccgaagatgatgtacaccaccgtatacagccagcgtggtgcattgatccagatcacatgaatcacgatggcgatggccgtgcacgcccacatcgatatgatgatcacattgcgccagaacggttccagcgcaaacgaaaccggggtatacgtgccagcaatgagcaggaagatgttgacatgatcgatacgccgcagcacatcggtgacgcgcgggctccaatcgcccagatggtagcaggccgaattggtgaacagaatcagcgacgctgtcatgaacacggcacacgcccacttcagactcgcgccatgtgccaggcatataagcacgatgcctgccgccaatgacaggggagcggcagtcgcgtgaatccagccgcgcatcaacggctttggtcgtccgtgcacgtcgagacgaatcttgcgttccacttccgcaggggcaatgccctcgattttcagcgcacggtgctccgctttggcgagcttgtgccgggccttctcctcggctttggctcgaatggcctcggccttgaactgggccttggcccgtacggcatcagccttggcctgcaacgcctgttcgcgcgcctcgatagccgcctgacgcttggatgcgatggtggcatcctctgcaatcgtcgcgctgttatgagcgtcgtgatgcatcgtcttttccgcgtcgtcggttgttgatgccatggtgatgcccccgtttcacgagttgacgatacgcttcttacgctgccgtaacctacgttagcgtaacttttatgcttgtcaataccgactcacacgaacactatcacccaatggtggcgatactatggaatccgaagatgagaacgtcacagcaataaggggttcggtgatggtgtattgcacggagtgtgggtttgccaacgagcaaggaaatgccttctgttcgcagtgcggaagcccattggagcagcccgaggccaatccggcggcccctgcctatgacgataacgcgctgacgctggtgaagcagccggcggcgccgttgcccgccgtcgcgccgccaacggcgccgggttccgcggtgccggggcctatggcaccgggacccatgaccgctggccctgcggcacctgcttctcctgaacctcccgccgggcgtcctggcggcgatcacaccaaagcggtggtgattgtgctcatcgcgctgatttgcgtcgtggcgttggtcatcggcttgttcgtcacccatagcatgggattgtggggagctcagccgcaggcgcaaacatcggtacagtcgaccgggtccgatgcgtcggattccgccgatgatggcacgacggattcctctgacgccaagtccaaggccaagaagaacacgtctgatagcgccaaagacaagaacagcgacgattcgtccaagaaaagctcgacggagaagtcgaagccttccactccggtgatcacatccagccagttgtctgacatcgcggattcatactcgtcctccgatgtggccgtctccgccatggtcatcgatggaacatacgccgattcctcagaggacgccaccatcgcgaccacgtcgcagtccggcaagcaattcgtggctgccggtctctatctgccggtctatcttgcggcccaggacaatggcgatgacaacgccaaagcgcaggcaaacgcgatgatgggttccatggacaacaatgccggcaatatggcggccgcggcggtaggtggctggagcggcgtcaattcgtgggcatcttcgcatgggtataagggcacctcgttcaaccgcgatttcggcgatgtggcggccagcaatgccggttatgagaattacggttcctcccgcgatgcggcccgcatgctcgccgcagtggacgccaagggaggcgcgtcattgatgaacgtggacattgcttccgaaggcgtaaccattccgtccgacatgatcgtgcatgcccaccgaggccaaggcatccaggacacctggaattacttcgccatcgtcgaagccaatggtcataaggccgccgtggccgttgtcacccaatatcaggggcagtcggtggccgcggacctgatgagccgggtgctggccagtgttgacaagacattggggcagtgacggtggctcggcataccaagcatagtagcgacacgcgtgcaacaggcagcgtcgtgggattgatcctgatcgccgccctgatcgccgctttggtaatcggcgtcggtggatggatgtacgcgcataacggtctcggcgcatcgcacgccaaaacatcgcccgtcgcctcggcatcggactcaccggcaacagcgtcggcatcgtcgtcaacggcgtcatcgaaacacgaacaacgccctgtgcatgacaccttggagcgcaaggcggcacctgctcccgacctgaccacggtggcggaagagaagcggatgtcagatgtgtcctcggcggtcacggcagctgtggccggcaatggaggcacctggtcggtgtatgtcgaggatctggccacgggcaaaaccgtgagcgtcggcggccagcccatggtggcggcttcggatatcaaactgtacgtgatgcttgccgtgtacgataagcaacatgccggcaccttggccgcgggcgggcaagataccacctcgctgatcaaccagatgatcaccgtcagctcgaacgctgccaccaatcagctggtattgatggtcggcgatggcgacatggccacaggcatgcaacgggtgactggtacggccgcccgatacggcttcagctcatccaagcagttgcgggtgttgtccgatgccggcacagacgggaccggcaccgagaactggacgtcggcttccgattgcggcagattcctcgctgcattgtaccgaggcaaactggtttccgccgaagccagccgctccatgcttgacgtattgctcgggcagacgcgacgcgccaaaatacccgccggagtaccgtctggcattcaggtggccaataaaaccggtgaactggccggcgtggaaaatgatgccgccgtggtgtggggcaaggccgcggacggaacagaacgggattatgtgatggtggttatgacctcgggagtggtctcgggaaccgcgcagcagcagatcgccgcattgtcctctcaggtgtatgaggcgatgaccgcctgaacggtgggcagccgtgcaacgcgattggtgcggtattgaagatgcgatgtcgtaatagtcgtcatacttgcccgtgtggcttgccgcaatggcggcgacgtgtctgcgtatgataggggcatggctgatttttcacacatccttgcaacgcgccccgacttcgacgacgaggaccgcgagtggctgcatcatctcgttgccgattggcaggtgatcgccgatctgagctttgccgacctgctgctgctggtacagaacggtgacggcaaatacgtggtggccgaacaatgccgcccatccaccgtgatgacgctacgggcggaagacgtggtgggaaacgtcatgccggatgacatggtcggcgaattggacgccgccatgctctccagcgtggtgttccgctccacggtattgagaaccgtgggcaaggcgaccgtctgcaacgtgtacgcgccggttcggcacaatggcaagaccttgggcttggtcgtgcgtgagaccaatatggccacacgagaatccaacggtcgatatgagtcggaaagcattaacgcgggcaaacagctgtacgagatgattccgcgaggccagttcccctacaaggattcggtgatgagccagcgccatatcgctcgcgtggcggacggcttcatcatcctgaccatggacggcgtggttcgatacgcagccccgaacgccatcagctgctttaggcgtctcggcctgctgaccaccatgcctggccattacctcagcgaactcggcacacagctgttgaaggagaacgaccccgttccggaaaccctgccgttggtgctggcgggcaaagccgcggtcgactccgaactcaacgccaaccgttccgccgtctcgatacgctcgctgcccttatatgacaacaacggtcgtatcggagcgattctgctatgccgtgacgtcaccgagctgcgccgtcgtgagcaggagctgcagaccaaggacgctacgatttccgagattcaccatcgtgtcaagaacaacctgcaggccgtctccgcattgctgaggcttcaggctcgtaagaccaagtcggatgaggtcaagaaggaattgcaggaggcgcaacgccgcgtgcagaccattgccatggtgcatgagggattgagccagaccgccgacgaggtcgtcgacttcgacaaggtgattgccaatctgctgcgcatggccgtggacctagccacgatgaaagaccagcacatcgatatcaactacatgggcaagttcggcatgatgcccgctcaggatgccacgccgctgtccctcgtgctgaccgagctcatcaccaattcggtggagcatgggttcgaaggccgcaaggatggccatatcacgatttccgtgggccgctccggcccgaacctcaatgtggtggtcgaggatgacggttccggtctcggctccgaagaacagggaggattggctcgttcttccggttctggtttgggcacgcagatcatcaacacctttgtgaccaatgatttcggtggttccgtgcattgggagccgcgccgcggaggcggcacccgcgtggtgcttgatatgaagctcagggccgctcaggatgagtgatgcgaagcccaaaaataaggaaaccctcccaagtgggagggtttcctagtatgacgaagcgataatcaaaacatcagatttgcatctgcatggcctgagaacggcgggcgcgcatggcgcggcgcttcagcgcacgacgctcatcttcgctcaagccgccccacacgccgtaatcctgattggtgtccagagcgcacttcaggcatgcatcaatcaccttgcaggtgcggcacacggccttggcctcctcaatctgctgataggctgcaccggtgttgcccaccgggaagaagagttccggatccttgtcacgacatgcggccttggctcgccaatcaaaagcgctgctcattgcttgcctcccttaaaagccccgtggctggtgttgttccttaagtccagtaccaaggtaaccacgaaccgtggtgattttcaagaggtttcgccgagaaaaaaccgaagttttcacgaagcgcactgcaccagacatgccgatgtgccctcgatgagcacggcccggcccgcgttgtcggcatcgatatgactcatcgtatccaataggcgagcggggactccggccataaggtcagacgttcgttccccgcacgggaacacgattctggtattgcaatgctctggtatacgtatcgggcgaatcgtgctgacggcgaataccacgctgacggactcatcggccaacgcatgtgtgaaagacagcgcctgctcgtcggtgcggaatgggtcgaacaactcatcggcgtcgtcgacgaaccacacgatatgcggaggcggtggtgcatccgagctggcatacggcgtgcagcggccgttgcgaagccattgcgatccccatacccggcgatgcggggaactgacacgtaccgccaagccatcagccatgctggcgtgtcgagccaatgttttcagcaacgtggttttgccgcgcccctgcgggccgatgacaccgatattgccaccggtgagggataccgtcgcttctcgcaggttgatgccatcgtcggcaagtccaaatcgaatgcgttgcggtgcgtgattggccacagtccggtcttttacgtgccggggaagtggcgcggtaaacagggacggctgcggcgggctcccgacgaaccgcgatgcgaacgcgatctggcggcataccgcatcgatatcgcgcgccgttgcacagcggaatgccgtcacctgttcggaatcgttgcagaacgccgcaccgggcattgccggactgaggtcggcggcacgaccatcaccaagcagctcgcatgattgcagacggtcccgaacccgtaaacaaatgctgacggacatattcgccttcatatcggcactgacctgacccatcggattctgcgtacaggcgatcagatacatgcccagtgacctgccgagcgaggcaatacgcaccagacgattcacataatccgggagctggtccttcagggcatggaattcgtcaatgaccacgatcaggcgcggtggcggattgaccatatcacggatatcggaagcatggacagcggcggacagctgttcacggcgtgtcagttcggcttccagcgcacgcaacgcgcgtacggcatgcgccagatccagatcgcatacgctgcccacggtatgcggcaaccgttcgagtttgcggaacgcggaaccgcctttgaaatccaaaaacacgaaattcagatgctcaggcccgttcatcgaggcgagcgccagacaccagctttgcagcaacacggatttgccggaaccagtggtgccggccaccagagcatgcggcccctgacggttcagatcgagcctcagcggctcgcttccggtcatgccgatcggcaccgcaaggtcaaggggttcaagccaatggcccacaatggtgcgccatggcaggcgtgcgaagtgcagcagcgattctatcggctgcgacggcgcatgacggaggtctgcggcgcgggcatcggcatcgtccgtgataccgatatcgatcgttgcctgttgcggggcgggggtcttctccgggcccggaggtggggggagcgtcagcagcagggacacgagacaggcgaatatgcctggcgtgatcatggcggcgaacagccattgcccgtgcaacagcagtatgaccatcatcagtgcctgcgcgatcatcgggcacgccgcggcaagcatggtcaggcgggcgcgcaatggcggcgcgcccaaacggtgcttcgcccgggatacggcggatgccgtatgggcggaatgtcgcttcgaatcgttctgctgtgatgccatgcttccagcgtgggggagcgcatgccgaaagcgcaagccgaatcaaggtatgtggttctagcttgccgagttatccacatgacattttgcccgtgcatgattggctgcgtgggcaacggcggcgatcatgcgccgacgatgaagccgatgggctccgggaaagcgtcggtcagccttccgccagattgcccacggcgccggccttatgcgtgccgtcggcaagctgattgaacagttcggtgttcctggcgtcatcgagcagcaccgaggagccaacgccatcaacgtaataatctgggtcggaccagtacacgctgccggagatgccattcgagccggtggcgcttttgaacgccaacgccatggtgagcaacgtgtaagggttggttttttcatccacggtgagtgcgctcatcgcggcattggacactgccacgactttggacggattggtcagggtcccactgctggaagcctttttgacgatggccgagatgacctgccgctggcgttcgttgcgtccgaagtctcctcgcgcgtcggcgtatcgcatacgagagaaggacaatgcagtggaaccatccgtcgtatggcatcccgccttccagttcagtccggaataggaatcctgaacatcctcgtcatagcacagttcgataccgcccaaggcgttcaccacgttctgcagaccgccgaacttgatctgcgccacatggtcgattttctggccggtaatctgctcgacgttgcttaccaaggctttcttgccggcaatctgcgccaccgcattgattttcatgtactggtcatcgacgttcataagcgaatcgcggggaatggaaatcagcgaactcggcccgcttttaggcttgatcagcaccagaatcgtatcggttctgaagcctgagatattgtccacgccgccgtaatcggtggaaccgtctcgctcgtcggagccaagaatcagccaggtcgaggccggcgtgttgggggtgtcggtcagccagtcgctccggttcagtttgctgtccacccattgccaggcaccgaaaacagaaagaatcaacgccgccaccagtaccgcaatcgcgcataagatgatgcgcaaggcgcgcggccggtgtgccgttaccgttttcgccgttgccgccgccggccggccaagatggctgaacttcgtggacacgtttgctgctggcgatgagggccgggaaaccgacatatccgacggattgcgcacggcgttgcgggatgagccggaagacatccgcgctcgcgacggcggaatgctgcgcggtgcggcggcatccggagccgtgctgcgggtggcacgtccggttttcggagaaaaactgggcggagtccgcctgccgttgtccgtgacgttggcgcttgccgtgacgttggcgcttgccgtggcgttggcgttcggttgaggctcttcgatgtcatttcccgtgacggacggacgggccgatggagcctgacctgactgacgtgaggcgcgggcaggggcgaaggagcgtggcacctgctcggaaggtcgggtgcgtcgatttcccgcaggaatgaagcttggcgggttgatatgcggatccgccccacctgattcctgcgtcataacccctcctgaaactgtcgattgtctgaatgacactttgacacagcatccgccgggtgttcctgcgctatggtgttcctgcgcaggaacggcacaatatcatgtgcaacggcatcagggcatcgtgtccgcgccatagcacacagttccataaaaatgatgtaatgacacgagaaagaatttgacaaaaacgaaattgcatgtgtgtaatttagtccgtatgaaaagctcaataggcaaggagaatcgcatgtggggtgtggtcgacgattcagccgaagagccatggcatgaattgtggggactattccgacctgatggcgatgtatcttggcagcacaaggcgttgtgcgcgcaaaccgatccggaggcgttcttcccggaaaagggaggctcgacccgtgatgccaagcgtgtgtgcgccaaatgcgaagtgcgtgaacaatgcctgaaatgggccatcgaccatgatgagcgattcggtatttggggcggcatgagcgagcgcgaacgccgtcgatataagcgagagcaccgggagcaggcgtagttccacacacacccccttcaagtctggtgcgtacactgggagtttatgagtccgacaggtaatagcgatattcatgaggcgttggccgacgccatgtcttctcgaccgtatacgcataggcaggatgtggataccggcattacggctgtgatcaccgttgaggaggatatgcgtttcctccggtctacattgcgttcggtattgacgcagaatgttcttccgggagtcgtcatcatcgccgacgcgaccgggcgcgccggttcgaggataaccacttcgttcgaggtcattccctcgccatcggggccggtagtggaggtgccgcagtccaagcatgtgaccattcacatcgtttcggccaagggcgcgcgttccttcggcgatgcggtcagccgggcgttggatcgggccgatttggatgacgctccccgcgcattgtggttgctccatgatgattcccgcccctcggatgcctcatgccttgaacgattgcttgaggcgtggcgcaatacgccgggggccagcgtgctcgggtgcaaacagtgtgattgggaaggatcccacctgcatgatgtcggtatgtatgcaggccgacacgccgtgcattccctggtggtcgatggagaacccgatcaggagcagtatgacgggcgacaggatgtgttcgcggtgtcgctggcgggcgcgctggtgtccatgtcgcaattcacgcgactgcggggcatcaatgcctggctgaccacctacagcgaatcggtcgatttctgccgccgtgtctgcctgagcggcggacgcgtggtggtagtcccgcaagcggagatatcacatcgtcgcgcacggtatgagggcattcgtacgcgaggcggggagccgcttaaggaagatcacacggtcaatcatgcgatgacggtgcatcgctcccaacagcgctatctgtacactgacctggccatgtcgtcctggattatcgtctggctgtggaggctgattcgcagttttggcatggccatagccatgatgttcggcaagaagccgtatgaagcatgggtgcaattgtgcctgccatggttggctttggccgatatcgcgggaaacatgaaatcgcgcaggctggtggccagacagtcgaaggtcgccgcatcgtccctgcaggttttgttcgccgacagtcggcagatcaagcagttccatgatcgtcgggatgcattccaatcccagcagggcagagtgctgctcagtccgctggaacgtgcccatctgcggacacgcaccatatatcgctggagcgcagccgtggtgatggcgctggtgtgctttgcggccatcgtggtgatgtattggccggtgttccgttcgatattctccggtggatcgttgtattccgatgtgttgctttccaccggtgccagcttcactcaactggtgcagtccgccaccacgccatgggtgtttggcagcggcaccggcattcctgcgccgcccacgccgtggctgctggtgctgatgctggcctcgctggtcacgctcggccatgtgaccgccgctctggcgatgatactgtttgtggccgcgccgctgagcgcattgtcgttctgggcgctggcgggcgtattcacccgctcggacgtggttcgtgtgctgggaggactgttgtgggcatccaccggcattatgttcggctggtatgcgcaggccaatatgccgatgctcaccgtaatggtgttcctgccggccgcgttcgcattcgtgttccgtgccgtgggcatgtaccataccgaagacccgctcaagccgcgcacatccgttcaggccgcggccatcgccgcactgtgcttcatccctgtggtggccgccgaaccgcagctgctgttcgcgctgatcgtcgtgttcctgatgttcctgctgttcgtgcgccgcaagcgcgccatgctgttgcttattccggttcctgccgcctttgcggtggcccctacgctcgtcaatgcggtgcgttacgccggtttgggcatgtggcgtcaactgttcggcgacatcacagtgccaacgtcatccgccaacgggtcgccggcgtcgctgagcctgcttgaggccgtacagcgtgcgctgggatggcgaatgggatcgaccgattatgccgatttggcggtcactgtgctgttcggcgtcatcacgctgctcgctcttgcttcgctggtgctgccgttcgcgttgcggacctcgcggctgatgtgggtggtaatcgtttgcggaggcgcgctcgccctgatttccagccgtgtggccatagccgtggatgccgatggcgtcgtggccggttccgcacagcctggcatcgcgatgatgatattgggcttccttgcctgcgtgtgcctcgtcgccggtggggcggtgaagcgattccaaccgttgcatgcgtccggcagcgatcccgcaccgaaaagggaccgtctgcatgcgctcatcgtgtctggccgtgtggtgcttgctctgatactggtgtgctgcatcggcatccaatgcatgtatggcatcgaacgtcataaggatgcgggactgggcgtgtccgaaaacggcctgcccatggtcaccaccgattatctggaggccagtgccgatcatcgtgtgcttgccgtgagcgcggagacccgcaacatcgtcaactatgcggtgatgcgcacctcgcgcggcgatctgatcgacagctctccggtccagcgggcgcgcctgctgtccggcaagcatgatgcggttgacgaacaactggcccaggcctgtgcctcgctgctgtccaatcccgacgaagaggccatcgcggccatcagcgcgcttggattcggcggcatctacgtggttcccgagaccggcgattcctcgaacgacatgccgtatgaacagttgagcgcgaatatcgccgcatcgaacggcacccagtccctggtctccacggatagcggcagctactatcgtctgacgctgcgtagcagcacctcacagcaggtggatacctcatggcagcaacgtgcacagcatagtgtctggaggcacgcctggctgatatgcctaggtgtgatcacggcgttgtactgcttggtcgccatgcctcgcagacgaccgtcctacggattggaggagcaggcatgagcaacaaaacttctggtttcaaacgtgcgatcggcatcgtgctcggtgtgatcaccatgctggtgttgattgcgctgttcgtcgttctcgtcatggcccccatccccaatatctgggtggacaaggtggccgcttccgataatgccatcgaccagacagttagtccgacccagtccgaaacctactgcccggcacctataggattggccgataccggcacgtacggcgacagcgccttccaggccactgtcggcaatctgagcacacaggcgcgctatgcggcgttcggctccgtctacagcgccactgtctcggcgatcgggcaaaagtccagttcagatgacgtgactttgaaagacgccgatccgaccgacgattcctcggtgaaaaccggtgctcagaagatcgatcagggagctcgcctgatcaatacccgtatgttgcaggccgcagctggcaccggcaccgtcggcaccatcgcatcatgggccgatgacggcgatgtgagaggcgtatcggcggcatcctgcgtatcgacctcgctcagccagtcgttcctgctctccggcggcacgaccggtaccacacagcagctcatcgtctcgaatccctccaccaagccgaccaccgtcgacattgccgtctggggttccgagacagccgggaaaatggcattgtccacacaatccacgctgtctgtgccggccgagggggagtcctcgatggaactgtccgccgcggtcgatgggcagcatggtctgttcgtgaccgtttccagcaaggagactcctatcgcgtccgtggtacgtacggtgaccatggatggtctgacaccgaagggttctgatttcgcgctgccgctgccgaccgcctccaatgcgtcggtggcgccgtccatcactgccggcgatgcggtcaccgcttatctgttcgccaaggcagacaccagcaccgggctgtcatggattaccgacaaaggattggttcccgccaaagatgccaccgtcactgccgataaggtgacggcgatcgacttgggagaggctcctgatggggcgttgggcgtgatgtccaccgcagaggatgccgtgtcgttctccgtcaaggccacacgctccggtgactccggccaagccgatttcgcattggtcaatgccggcgagccatccgaattctcggggttggcccttcccgacggagtaaaggcctccatcacgctggccaatacgtccaatgcgcgcaggacggtcaccttgcacgcctacgatgatgccggtgcttcggtgacctccgaggaaatcacgctggatgcgaacgcggcgcaaacgattgagaccggcaaactttccggcgatcatggcaccgcggtcgtgctgatgttggaggactcatccaagaaagtgagctggggagcgcgtttcagtcacgattcgttgcaagacaaggacatcgccggattgtccgccatcgacgcttcaacgctgatgcccgccacggtccatgtctgggctcggaacgattcctccatcgtcaagtagagcgcgctcgccgaagcatcggtctgatgatgtttcggcgccgatatagctgcgggggccgtgccactgtcttacttgaagtggcacggcccccgcaatactgtcacaggccccaatcggggtcgatttcctcgggcctgcgcccatacaattccgctatgcgggccaccagctcatccctgacggccaactgcaattcgagcttggtaggtgcctcggtctgcaacggcatacggtagagcacgactcgtgcgggaatgccgtggctggcggggaagcactgggacgtcatattcggctcggtctgccaaggcgtcggatccgaaggcggcacatcctccaccgcgaactggagcggacgtatcagttccggccacgcttggccgagcctgcgaacctgggccgccaccatatcgtcgaacatgccggtgcgagtgcggtaacggggcagacgggtgccgaacatcggggttcgtgtgccgcgaccgtggcggttgcggtagattcgtgcgttccaaggtggctgaagcatggttcccaccataggacatggcggaggcaacatgcgttaggattggttcattggctgtgaacattcgtcaacgagggaggcgcgacaaatggtggtacgttcgtggtccgaacttgatttcgataatgtctgctccaacgccaaggtgttcggtttcgatttggacaacacgctggccagctcaaaacagccgatgaggcccgcgatgatcgaacggttctgtgcgctgctcgaccatacggtggtggccctgatctcagggggcggcatggcggtggtcacctcacaggtgctggatgtactcaccccgaatgccaggcgcggcaatctgcatgtcatgcctgcctccggctcccggtattaccggtgggatggcacgcaatgggccttggtgtatgcgcatgatctgtccgaagccaccgtggccgctgtctcggaaagtcttgagcgacatgcccgggaactgggattgtgggaacagcaggtatgggggcctcgaatcgagaacaggggcagccagatcaccttctccgctctgggacagttcgcacccgtagcggccaaacaggcatgggatcgcgataacacgaagaaacaggcgctggtcgaagcggtcaaggccgatctgccgcacatgcgggtcagggccggcggctacaccagtgtggatgtcagcgaatgcggcatcgataaggcctatgccgtgcgcaagctgacgcagacacttggcatacaggccgatgaaatggtgttcgtgggcgatcgcatgacgcctacgggtaatgactatcctgcggttgaggccggtgcgatcggtgttcgtgtggagaatccgcaagacacggtacaactgctggatgcactgcttgcgcgattcgatactccagcttgatggtgacgcgttatggacgggccgagcgtatacaagtggtggcatgcgatgtgggcacaggcctgcaatctgctgtttccacgcggctgcgctgggtgtgacgcgccggatgaggtattgtgtgcgacatgctgggccctgttcgcgcaatgccgggaacgggatgcagacagtggtggcggagcccgtatatggtccgcgtcaatctatcagggagcggcgcgtcgtgccattctcgactggaaggaccacgacgataccgagcttgacggcccgttcggccgcatcatggtgtcgctgctgaacaagacgccaataccatcatcatgcttgggtcatcgcgtattggtggttccagtgccgtcatcgcgggcatcaatgcgccgaagagggcgtgcccatacggcaccgttggccaaatcggtggcaggggcattgcgtgggtacggcgtcgatgcgcgaccatgcaatgccctgagctcctccaccaaggcacgctccgtgcagcagacctcttcggcacagcgtgcccgccgtatcaccggtcatgtcagggtgaagcgtgatctcataggccatggcgacgcggtgcttctcattgatgacatcgtcaccacaggtgccaccgtgcggcaatgcgttcaggtgtttcagcaggccggcaccaaggtggtgggcgtgctggtattggcggatgccgtggcgcgacggtccgatgacgatatcaacgggtgaatgacatcggtgacgatgccccagatagcaggcgaagcgccgttgctcggcatgtaatcgggatatcgaggattctcggcgtgcaatatggtgatgccggcccgtgaaaccagccgcttgatggcgatttcatcgtccatgacagccgcaaccacatctccggggactggtgccaacgaacgatcgacaatcagcagatcgccgttatgaataccggcattgatcatggaatcgccggccatctgcatgacaaacagcgtggtgtcgtgcggcatggttcgtgacttggattgctgtgtcatgctgtgcctcccaccctgtattcgaacatctgttcgaatacagtatacggtaggacggcggacaatatcagcgttcggcgacgtgatatttaggcaggatgatttcgaaatcggcgcctcgcgtgtcatcgaccactttgacggtgccgccgtgcaattgggccgcccaacgtgcgatggacaggccaaggccggtgccgcccgactcggtgccgggacccgtcttgcctttgacaaagcgccggaagatatccgaacggtcggacggtgcaatctgggagccgaaattcaccacattggtcacgatggtgccttggctgtcatcctcatgggcatcgaccagcacggtggtgccgtcggccgaatgcttcagtgcgttggcgatgatgttggtgaacagctggcgcaggcggtcctgatcgccttccatcgagatgtcggccggcacggtgacgcggatgtcgtgggcgtggccgccatcggcgatttccaacggctcgatggtctcgtcaagaaagtcggcgaagttgaacttttcgatattcagactcgccgcaccggcctccatacggctcaaatccaacaggaaggcgatgaggtcggagagacgctgcgtttgggtgaggatgctctccagattggcgggagtgggctcggtgacgccgtcggccatgttctcgaccatcgcctgcaaagcggaaacgggcgtacgcagctcatggctcacattggctatcatgtcgcggcgcattttatcggcatgttcgagttcgccggccatctcgttgaacgagcgagccagctggccgacctcgtcatgacgatcctgatcgatatccacgcggaccgtgtaatcgccatccgccatggcttcggccacatcgcgcatctggcgtaagggagcggtgatgccgcgggagaagaaataggtgatgcccaaggccaccaccaaagtcagcggcatggcgatccaaccggaccagccgaatttcaggaggaaccagcacatggcaaacgcgatggcagtggcgataacgatcagtacgctgagttccagcttcagagaggagaacaaatcaaccggcttgacgcgaggtttcatcgcatcaagccgggattgctgttgttttttggatgccatcacgcggtcggcggctcgaaagcgtagcctacgccgtgcacggtgcggatggtatcggcgccgagcttatggcgcagcgccttgacatggctgtcgacggtgcgggtgccggatgcgtcgacccagtcccagacctcttcgagcagcttttcgcgggtgagcaccgacttcgggcggcgggccagcgtggccagcagatcgaactcggtgggggtcagatgcacctgctcgccgttcacggtgacgatgcgctgggccgggtctatgaccatcgaaccgaagtcgagcagcttctcgttctccgaattcttggcgatgaccttcgcacgctccacgcggcgtagcagcgccttgcagcgggcgatgagctcgcgcatggagaacggtttggtcatgtaatcatcggcgcccgctcccagaccgatgaccttgtcggcctcgtcatcacgtgcggtgaggatcagcaccggcaccggacgttcggcgacgatgcgtttggtggcctcaagaccatccatgaccggcagcatgatgtccatgattaccagatcggggcgtagctgggacgcggcctggacggcggaagcgccgtccccggccacgcgagcggtccatccttcagcggtgatgcgctgggcgatggccgtggcgagtgtgggctcgtcctcgaccaccagcaccgtgcgcggtgtcgtattctgacgcgctgtggtattgagcataaataaaccggttacctttcagcctgttgaccagttcagtcttccggcttcaagaatacaactcccagagccggaacggtgatcttcgccgagaacggacgcgaatgatattcgccctcgaccgcttcgaaggtgccgttgtggatgtcggagccgccgtacttggcgtcatcggtggtgaacacttcggtccacttgccgccggtgggcagcgccacctggtaatcgggccaggcttcaccggagaagttgaccaccacggccaaggtctcgcccttggtgccgatgcgcaggaagctcagcgtgttgtggtcggcatcgtcgctggtcagccactggaagccggccggatcgaagtcctggctccaaagtgccggatgcgccttgtagaaggcgttgaggtcggcgaccatggtctggacctgacggtgctcctgccagttcaggcaatcccaatcgatggaggcgtcgtgatcccactcgccccactgggccagctcgttgcccatgaaggagagcttcttgcccgggtgagcccactgataggcgaacatcgaacgcacgccggctagcttctgccagccatcgcccggcatcttgccgtacagggagcccttgccgtacacgacttcgtcgtggctgatgggcaatacgtagtgttcggagtaggcgtacaccatggagaaggtgatttcgttgtggtgccacttgcgattgatgggctcctcgtgcagatactcgagggtgtcgtgcatccatcccatgttccacttcataccgaagccgatgccgccggcggaggtgggggcggtgatgcccggccatgcggtggactcctcggcgatcatcatgacgccggggttgttcttgtacgcggtggcggtggcttccttgaggaagtcgatggcctccaggttttcgcgtccgccgtagatgttcggacgccaatggccgggttcgcggctgtagtcgaggtagagcatggagctgacggcatccacgcgcagcgcatcgacatgcaggtcctcgagccagaacagggcgttggccaccaggaagttgcgtacttcgcggcgtccgaagttgaacacataggtgccccattcggggtgttcgccgcgcagcgggtccgggtcctcgtacagcggggtgccgtcgaagcggccgagtgcgaaggcatccttcgggaagtgggcgggcacccagtccatgatcacgccgatgccggcctgatggaaccgatcgaccaggtaacggaagtcgtcgggggagccgaggcgggaatccaccgcatagtagccggtgacctgatagccccaggagccggagaacgggtgctgtgccagtggcatgaactccacgtgggtgaagccttcctgcttgacatagtccacgagctgcttggccaggtcgcggtaggtcagtccctgcttccagctgccggcgtgcacctcatagatggagaccgggccatcatgcgggttggtggtgcggcggtgctgcatccaggcgtcatcgttccactcgtaggtggattcggtgacgatggaggcggtgtgcggcggaacctcgtgctgacgctccatcgggtcagccttcatctcccacgtgtaattggcgttcaggatctggaacttgtaggtctcgcccgcgccgatgccggggatgaagatctcccacacgccggaggagccgagctcgcgcatggcatgacgacggccatcccaggcgttgaagttaccgaccacgcgcacggcatgggcgttcggggcccacacggagaacgcggtgcctaccacctgttcgccaggcgtgccgtccacgccgcccatcggatcgtcatagcgcagcacgtgcgcgccaagcgcctcccagagcttctcgtgacggccctcgccgaacagataggtgtccatgtcaccgactgtgggcatataacggtatgggtcgtcctcaatgagcactgcgccgctttcccactcggtcctgacgcggtagtcgggaatcgtgggctgcttcttggtgccggaggccggcacggtagccacgaacacgccgttgtattcgtgggtcatcgggtattcgccatcctgggtgaggatggtcacggacttggcaagcggacgcagcacacggattgtggcggtgtcggcatgcttgccgatgccgagatgcccgccgagaactccgtgggggttgtagaattcagcattgctcaccgcatcgaggtcgccttgggcgacaggcacggtgacggtatcttccttgatcttcgtttctttagccatgacccaaagtctacgtgcgttggagtcgaaaacgctacattggcgcgtcgaaaatggcgaattcttgcccttttcggtgtgtctccgtggttgtgagcgctctcataggggcggtccaggccgcatggcataattattcaagtttttgtgtgtaagccgtcagttctcggagggtacatgtcttacaaagtcggcgatatggtcgtctatccgcgtcatggtgcagcgaaggtggaggccattaccgagcggacggtcaagggagtgacgcgcgaatatctgcagctgtccgtactctcttccgatggtttggtcatcaacgttcccgtggacaatgccaggaaggtcggcgtgcgtgacatcgtctccgcatccgaagtggccaaggtgttcggcatcctgcggaccccgatcatcgagaaagagatgaactggtctcgccgttacaagctgaacgtcgaaaagatcgccaccggtgacgtcaacaagatcgccgaagtggttcgcgatctcgcccagcgcgatgtcgacgagcacggcctgtccgcaggcgagaagcgtatgctcaccaaggcccgcgccattctgacttctgagatcgccttgtccgagaagatcgacgaggcggaagcccagcgtctgctcgacgtgaacctgggctacgagcccgctcaacccggtgacgacaagcatcacaccgccgagcccgaagaggccgcggccgatactttggctcgtgtcgaagccgagaagaagtccaagaagaagtgatttgattgttgaggccccggtcgtgtccttatgcgatacgccggggcttcgtgattcataatcgtttgctgccgttcgtctgggcagcgccatcgaaggggactgcatggggtctgcaggagtgttgatagggcagggttttgacgctcaccgttttgcgcctgccggctcaggccgtgaactgtggattgccgggctttactggccggcgtctgattcatgcagcgaggccgatgccgccaaatacgagggtatcgaaggcgattccgatggcgatgtggccgcgcacgccctgattgacgcgttgcttgccgccgcccgattgggagacattggttcactgttcggtgtcggtgtggacgcgcatggtgccggaaggcatggcatcgatatgctgcaagaagttgtggcgcatctggcatccaacgggtatacgccggcatcggcctcggtggcgatcatcggcaaccgcccgaaaatcggcacacgccgtgctgaagccgaagccgccctgtctgcggcggttggttgcccggtatcggttaccgccaccaccaccgaccatatgggattcactggccgcggcgaaggcatcgccgccatcgccaatgccttggtggagaagatataacaaagcccccgctgtgaatttgccagcgggggcaagaaaaatgaatgagattacttccgcactgtctccacggccttggcgatagcccagaacagggtggaaagcgtcacgataatgaagctcgggggggcggggaacatcgccgacagcacgagtccggcccaaatcgacaccaggcacagcacgctggcgatcaccatcgccttgaatggggagccggccagaatattggcggtggccgcaggcgtgatcaccagcgcgaaaatcagcaaggtgcccactgccggcacggcaatggtgattacaccggccataatcgccataaacgccacgttcatcagcccgatcggcacacccttggcctgtgccacctgctcatccaacgagctgaacagcagcgggcggtagatgatggccaacaatgccagcagcaatacgtcgaacacggcgaagccgatgatctggccggtggtgatggtcaggatcgagccgaagaggatcgactgcatctgctgggaggcggaactcgacaatcgcgcgaagaacagacccaagccggtggcgaaggccagtacggtgccggttgcgatttcacgctcggaaacgcgcttgcccaaagcaccgatcaccagtgcgccgcccagtgcgaacacgcccatgcccagtgatacgggcaggccgagcaacaccgcgccggtcgcgcccggcagaccgatatgggccagcgcatgggccgcgaaggtggaacgacgggcgatggtgaagtatcccatgacaccggcggccagggcaatgcacaggccggcgatgaaggcgttggtcatgaatggagcggacagtgtgtccagccattcgggatcatacgaaaagttgatggtgctcatgtccctgtattttctccatgcctgagctgcagcccgttgacgggctgtggatcggctagcttgatgttatcgattctcggcgctgttggcggcactgccattggtggcgttgccgtgctcgtgatggtgcaattgcgccacttcggctgccgtgtgcatatcctgcggctggtcctggggctcatccggcgtcggggtcacgaacatgtcaccctgcggagtggtgaccacctgcacctgtgtgccgtagaggtgggtgagtaggtcggagtcgagcactttgtgcatatcggcgtagtgcgggtgcccgtcgagcaagtagacggcaccggtcagaatcggcaagagcatattgagatcgtgcgcaaccacttggatggtcatgttcagttcacggttcagcttggccagcacgtgtacggtggcgcgttgactggccagatcgaggttggccaacggctcgtcaagcatcagcagttgtggatcgcacaccaacgcctgggcgatggccacacgctggcgcaaaccgccggacagttcggacagacggtactgcgccttgtcggcgatgccggtgaactccatcgcctcgagcgctttggctttctgggccttggtgatggggtggatgccgaatcgggtgccggtcaggcccagcaacacggattgttcggcggtgagattggaatcgacattcgccacatagctctgcggcacatatccgatgcgtttgttcatctcgcctgcgggcttgcccagtacggtcaggctgccatggcaaagcggcaaaagtcccagctcggccctcatcatcgtggttttgccggtgccgttggtgccgacgatggccgtgaccgaaccggtgggaatggcaaaggtgccatgctgccagatgatatggtcaccacgcttgatggcggcatcgctgaacacgatgcaatcggaagtttcactcataacgcccgattgtggcaaacgatgctgacaatcgttctcaatatcgtgtacggatggtgacaaccaaagaaaagggttgtgcgaccatctcgacaatggtcgcacaacccttctcgtgcaaggcgtctatcggcattgcatgaatccgatgccgttgtcctttgcttctaactatttgccggagtcggtctggtcgttgccggaggcatcgccggaatcgccattggaggaggcatcggcctttgccgaatcctgagacgagtcactggatgtggccgccttgcactgacggatgtacttgggctccgtgctggaaccggtgctggccttggaatcttgcgcattggcatcatccgtggcggcgccgtcggcgctggaatcatcggaattcgcgttgccgtccgtggcgtcttcgcagccatagctcggatccaccgcgtcgatgatggtgttgatgagctggttgatccaggcgttcagcgtgtcggtatccttgggcatttgttcggagacgtcgactaccggcacatcggcacgaccggcagcgccagtgatcatattggtcgcgtcactggcttcctgcgtgttgttgaccagcacatccacgcccttgtcttcgatgagtttccggaaagactgcaggtccgcgggggccggttcgccgccggaagcggtcgattgcgtataccccttgggcgtctgattcttgaacccgagatcggccatcagataatagaccacgggttcggtggctgcataggtgaggtcggagtgggatctggtgaactcggacgcccatgtttccagcgatttctcatccgcctgccatgccttgagccgcttctggaaggccttcttcttgctggggagtgcctttacatatgcatcggtgatggccgtggccatgctggatcgagcgtctttggagaaccacagatgcgggttatcgccttccatggcacccatgacggaagcggcggatacgatattcgtggtcttggtcatcgatttggtggcccaggaatcgtaacccgcgccgttggccacgatgatctgggccttggacagcttggcgacgtccgaggtctttggctcgaaatcgtgggcatccacattggtggagttcacgatggacgtgacttccacatcatcgccgcccagctcggcggccagcgagccccattgattgagggaggcgaccacattgatcggccc

SEQ ID NO: 3537 - DNA, 3272 bp, Unknown
  R85_18m  MAG No. k141_16217
cggccgagcttgtccttgcccaccaaggtattgctgaggcctccaagcaccgcgttgcccgcgggcaatgccagtaccgagcaggccacaaatatggccttgccaaccatggagggcaccaacgcggcaccggtgaatcctacagccagcaagacgaacatcacgcccaccagtacgccgccgggcacacggttgaccagttgcgaggccatcagtgcgcccagcaacatgccaacggcggaggcggcgttgatggatccggcggatatcagctggctgccaccttgggagatgtccagcgcggtcagcagtaggaaggcattgctggcaccggtcaccatggccgctgcgatgatgagatggcgttggaaccggtcgcgcagcagccagatcatgccgtccagtgcgtcgcgccagcgtggggcggagtcatcggcatcatcggcgtccgagacggccccgacctccgaaccggtatcaacattgcccggacggccgctatcgctcacagtcgcacgtttccaatagcggcggatacgccatgcggacaccatgcccagcacgctcagcaccgcgctggtcagaaacggcaccgcatgtcccacggtcatcagcagaccgcccaacggaccacccaccaacgtgaccgtcgaatcacgagcatcattcaacgccatcgcgtgcggcagctgctcatccggcaccacgccacgcagcatggcattcgacgtattctccaacagcccatcgcgcaccgaaaacagcacgacgatacacagcagcgcgatcggaagcacgtgggcatacggtccgccgaatgccggagcgtttgccccgttaaccccatggccgctcgtcttcgtcgcattgccgaacagcatcaccgctgccgccgccaccgccgagagcaccacaccggacgcaccccagatcagcatgagcgtacggcgatcataccggtcctgaatcacgccgccggcaaggcccagcaccgcctgcaccaccacgcagatgctttccgtcgtggtggcggcggcagaggatcctgtcgtggcgagcatcatcagcggcaccgcgaacgcgatcaggctggcaccgaccgcaccggacgtgtccgcagccagccaccatccgtaatcagttccccgccataattccgtatcacttgccatcgttgccctccctgggattggtccttatggacgccaccatagggagccgccgccgagccgaacacccgcaatcctcggttatggggacatggctgcggtcgtcgtcctcatttgtgaggacagggcacaatcagcgccggacgccggacatcgcagcttctgccccatcagccccgcacgcacgggatacgcacatagatcatccacgtgccatcatccgaacgggtggtcaattcaccgcccaactcctgcacacgggtgcgatgcatggccagcccacgccccgacagctcctgcgcggacaggccactctgcgcgtcggcatcgtcacggatatcgttggtctcgcgaatctcaatccattcgggagacagggtgacgaatagcaggtaggaatcatctcccgccggtgcatggcggcggatattcgtgccgatctccgtcatcagcgacagcgcctcggccgccgcctcggggtccacgaccatggcgatgccgttgaccgcggccgtcccccgatagccctgcgcctccagaaactcctcggtatcggtgatctgcgccttcacacgcgtgacgaaggactgcggcatgcccgctgtggattgcgtacggtcatcgccaccggcgttctcgggcacggcattgtcaaccacctcattcgcaatcgctggacagctcccggtgcctaccgggtcacgagccagggcggattctttcgtcggcgaatcaacctgccctgattctgcagtcgccacctcagatgtcccggtgccaccgaccggcaaggactcgtcccggaagccggcgtccattccgctctgctcggtcagaaaatcgatgatgccatgcacttccgcaaaggcacgttggctgcgatccagcacgcgctgccagtcgccaccatcgatgccggctggcgcggccagattattccgggcgatggtcgagatatacgtcatatcattggacagcgtgtcgtgcagttcgatcgcgagctggttgccgtggcgcagatcggccagcgccgattccatctgctcgttttcgttctcctgattcaccacgcgcttgcgccagcgcaacgcaatgcccagtaataccagcagcacgcttgccgtcagcgccgccgacgccgtgaccagccacgacccggtcaccgcatagacgatggccgccaccgcaagcacaccgatcgggccgaacatcgccagcggatgattgagttctatatcgatatcaatctgatgatgcttcttgccgtcggcgtgaccatacgaatacgacgaatgccgcgaaatgataatcggacgtttcaccggcccgctccccttatgcgccttgcgcttcttctaccgtgtccccacacacccatcggcgccttcatcagtgcaggttcatgcgaatccatgcgccgataagttccttgagattgccagcgccgagcttgtcggccgcacgcatcagatgcgtgcgcacggtggtttcggtgatggacagttcggcggcgatctgcggcatggtccggccgcgggaccacagttccgcaacctccatctcacgcgcgctcagccggttgtccttctcggccttgatgcgcgcggacgcaacggccgcggtctcgaaccgcacgtcgccaccatcgccccatgttttgccggtctgcacctggcggatagccacggcctgcaatcgcacatcatcgttcttgctcatgatgccctgtgcgccggcccgggccatctcctgggcatgtcggcccacaatcgaggcggtaatggccagtatcgccgtggtcgcgttttccctgcggattgcacgcaccacatccggaccattgatgtcgttcatcgcgatatcggccaatagcacagcaggcgggtgtttggtggccgtgcacagctgaatggctttgctgccttcgctcaccggcggcaacaattcgaagtctggcagggccttcgacaaaatcgactgtaatgccatcagggccatgcggtcgttgtccatgatgagcatggtgggccttggcccatcctgcccgctgatatccggcatatgcctacgtgcgcttagctcttcttcggcttcagcgctgag

SEQ ID NO: 3538 - DNA, 15230 bp, Unknown
  R85_18m  MAG No. k141_16240
acaggttgtcgaacaccgtgcgttcgtcgtccgccggcgattgcgcggggacgacgcaggacacggacatggcttcgaagaaggatcgcatattcatccagtctagtcaggggttcacgtgggaaaccccagcgttcacttcctgtatacccggtgtggcataatagccaaggcaatttttgggctttgcctaagctagtttgaatttgaaataggtgaataacgtggcacagactactaacgacatcaagaacggatccgtcctgaacctcgacggacagctgtggaccgtcatgaagttccagcacgtcaagccgggcaagggccccgccttcgtacgcaccaccatcaagaacgtgctctccggcaagatcgtcgacaagaccttcaacgcaggcatgaagatggaattcgagaccgtcgacaaccgcaccctccagtactcctacgaggacggcgacaacttcgtgttcatggacatgaccacctacgaccagatcatggttccgaagaccctcgtgggcgacaaggccaagttcatgctcgaaggcaccgactgcctggtctccttccacgacggcactccgctgagcgttgacctgccgggctccgtggtcctgaccatcacccacaccgagccgggcctgcagggcaaccgctccaacgccggcaccaagccggccaccgttgagaccggagccgagattcaggtcccgctgttcatcaatgagggcgaccgcgtcaagatcaacaccgaggatggttcctacaccggccgcgagaacaactgatctccgcatcctcaacagacgaccgaccgtataaaggactaggacagcagcagtatggcacgttccaccgcgcgcaaaagggctctgaacaccctgtacgaagccgacgaaaaaagtcaggatattctcgccctgcttgacgagcgcatcgcacatcccggtgcccagaccccgcttcccgactatgccattgaaatcgtcaagggcgtggccgagcaccgtcgtcagatcgacatgaccctggacgaacactccacgggttggaaggtccgccgtatgggcgtggtcgatcgcaacattctgcgtatcgccgcttgggagattctgttcaacgatgatgtgccggacaaggtcgccatcgacgaggctctggcattggccaagaccctgtgcgatgacgattcgcccgctttcatccatggcctgctgtctgcagtgtgcaccgccaagaacgcagcaccggcaccggagtccgcggcagaagaggccgatgaggaatcgtccgattccgatgccgccgcatccgagccgaccgatgagggcgatgtttccgattcgcccgattcgtccggtgcatccgacgagcccgctgccccgtccgctgagattcagccgacggtcgattagtcatttgttgttcagcctccccattcgggaggctttttcatgggcggacacttgtgtcgccacacattctcaagtcggcaccttgccgacagccccgccagcggggtgagactttgcgcccaacggcgtgtgagtctgcgctggccgttaaccttggtacgaatacccgaaaaacataagggggttttggtgagccagaacgagtccgggaccatcgcaattccgatgtatgacaaggacgatgcagtcctcgttttggaagacggacaggtatatgtgggggagccgtacggcgccctcggtgagacgaccggtgagatcgtcttcgccaccggtatgaccggataccaggagacgctcaccgatccgagctacgatcgccagatcgttgtgcagacgttcccgcacatcggcgataccggcgtcaacagcgaagaccctgagtcctcccgcatctgggttgccggatacattgtgcgtgatccctctccgaacgtgagcaactggcgtgccgagggcagcctggacgacgacctcgccaagaacggcatcgtcggcctgagccacatcgacacccgtaagctggtgcgtcacctgcgttccgcaggcgtgatgcgcgccggcatcttctccggcgacgccctgaccgaccaggccaccggcgcgctcaagaccatcgagcagctgctcgaagacgtcaagaacacaccgcagatgcagggcctgagcctgtacgacgaagtgtccaccaagcaggcctacaccatcgagccatgcggcgagtacgaaggcaaggagccgctgtacaccgtggccgccgtggacctcggcatcaagggcatgaccccgcaccgcatggccgaacgcggctgccgcgtgcacgtggtgccctccaccatcaccttcgccgaaatcgagaacctgaacccggacggtgtcttcttctccaatggcccgggcgatccggaacaggccggccccgaaatcgaactgttgcgtcaggtgctcgatgccggctacccgttcttcggcatctgcttcggcaaccagctgctcggccgcgcgctcggcttcggcacctacaagctcaagttcggccaccgcggcatcaaccagccggtcaaggatctgaccaccggcaaggtcgaggtcaccgcccacaaccacggcttcgcggtcgatgccccgatcggcaggcaggtcgacgcgccgtttgagaacggcaagtacggcaaggtgttcgtctcccacatcgatctgaacgacgacgtggtcgaaggcctgcagtgcgtggacatccccgcattctccgtgcagtaccacccggaggccgcagcaggcccgcacgatgcggcctacctgttcgaccgtttctgcgaacttatgaagaacaactccaaggaaggtaagtgatatgccgaagcgcaccgacatcaaatccgtgatggtcatcggctccggcccgatcgtgatcggtcaggctgcggagttcgattactcgggcacccaggcatgccgcgtccttcgtgaggaaggcatccgcgtcatcctcgtcaactccaacccggccaccatcatgaccgacccggagatggccgacgccacctacatcgagccgatcgccactccgatcctcgagcagatcatcgccaaggaacgccccgacgcgcttctgcccaccctgggcggccagaccgcactcaacgccgccatggcgctgggcgaggccggcgtcctgaagaagtacaacgtcgaactgatcggtgcctccctggaagccatcgaccgtggcgaggaccgtgaactgttcaagaaggtcgtcgacgaggccggcgccgaatccgcccgctccgacatcgcccacagcatcgaggaagtcgacaagatcgccgagaagttcggctacccgctggttgtgcgcccgagcttcaccatgggcggcctgggctccggcatcgcccacaacgaggaggagctgcaccgcatcgccggcgccggcatccattactcgcccaccgacgaagtcctgatcgaagagggcatcgagggctggaaggaattcgagctcgagctcatgcgcgaccgcaacgacaacgtcgtggtcgtctgcccgatcgagaacgtcgacccggtcggcgtgcacaccggtgactccatcaccgtggccccctgcttcaccctgaccgaccgcgaataccagaagctgcgtgacatcggcatcgccatcatccgcggcgtgggcgtggacaccggcggctgcaacatccagttcgccgttcatccgaagaccggccgcatcatcgtcatcgagatgaacccgcgcgtctcccgttcctccgcactggcctccaaggccaccggcttcccgatcgccaagatcgccaccaagctggccctcggctacacgctcgacgagattcgcaacgacatcacccagtccacgccggcctcattcgagccgaccatcgactatgtggtcaccaaggtgccgcgcttcgccttcgagaagttcccgggtgccgaccccaccctgaccacctccatgaagtccgtgggcgaagccatggccctggccggcaacttccaggagtccctcggcaaggccatgcgttccatcgacaagcgccacatgggcttcaactgggatggcgagaagccgtccgccgaagaagtggccgaactgcttgaggccatccacaccccgaccgaacaccgttacctgcagctcatgcgcgccatctggggcggcgccacgctggagcaggtgttcgcggccaccaagatcgacccgtggttcctgaagcagatcttcctcatcaacgagaccgccatgacggtgcgcgaggccgagaccctgaccccgaagctgctcaagaaggccaagctcgccggtctgtccgacgtgcaggtggcccacctgcgtggcttgggcgatgaaggcgagaacaccatccgcgagctgcgctggacctacggcctgcgcccggtctacaagaccgtcgacacctgcgccgccgagttcgacgccgccacgccgtactactacagctgctacgccgacgaaaccgagctgcgcccgcgcgagcgcgaggccgtgatcatcctcggctccggcccgaatcgcatcggccagggcatcgagttcgactacacgtgcgtgcacgccgtgcaggagcttggcaaggactatgacaccatcatggtcaactgcaacccggagaccgtctccaccgattacgacatgtccgaccgcctctacttcgagccgctcaccttcgaggatgtgctcgaaatctacgaggccgagaagaggatgggcccggtcaagggcgtcatcgtccagctcggcggccagaccccgctgtccttggccgcgcgtctgaaggccgccggcgtgccgattctcggcaccaccccggaatccatcgatctggccgagaaccgcgagctgttcggcgaggtgctcaagaaggcggagatgaacgccccgcgttacggcaccgccctgagcctcgaagaggccatggacgctgcccaccgcatcggagacccggtgctcgtgcgcccgagctacgtgctgggcggccgcggcatggaaatcgtctacgacgacaagcagctcaccaagtacgtggaccgcgcgcttgccgaggccaaggccgataccgtggtctccggccgcctgccctccccgctgctcatcgacaagttcctgcaggacgccatcgaaatcgacgtcgacgcactgttcgacggcgaggaactgtacatcggcggcattatggagcacgtcgaggaggccggcgtccactccggtgacgccgcctgcaccctgcccccgtccaccctgtccgacgaccagatccgccgcctgcgcgaaggcacctacgccatcgccaagggctgccacgtgcagggcctgatcaacgtgcagtacgccttcatggccaacacgctgtatgtgatcgaagccaacccgcgtgcctcccgtaccgtgccgttcgcctccaaggccaccggcgtggcgctggccaaggccgccgcccgcatcatggccggcgagaccatcgccgaccagcgcgccaacggtctgctgctgcccaagggcgacggcggcgacatccaccccggccagcaggtcgcggtcaaggaatccgtgctgccgttcaagcgcttccgcaccccggtgggcaagaccgtcgacatcctgctcggacctgagatgcgctccaccggcgaggtcatgggcttcgaccgcgacttcccgcacgccttcgccaagagccagctcgccgcctacgatggtggcctgccgacccacggcaacgtgttcatttccgtgaacgacaccgacaagcgtcagctgccgctgctcgccgtgcgcctcgaagagcttggattcaagctctgggccaccgagggcaccgcctccgtgcttcgccgttacggcatcgagtcgaacatcgtggacaagatcagcacccgcgtggacaccgatccggaagccccggtcgaggtgcatcacgccgccggctccgtgggcaagaacgtggttcagctcattgaggaaggcaagatcgacatgatcctcaacacgccgaactcgcgcggctcccgttccgacggctactccatccgtgctgccgctattgcagccgatctgccgcagtttaccaccatcaccgagttccaagccgcactgctggctatcgaggccgtgaagcataatgattatcagatcatgagcattcaggagcattcgaagcagctgttcgaattggagcgacgggagttctgatgactacacccagcagtgaggaattgcaggcacaacgttcggatttcggtctgcgactgagcaattcaatggccaaatacggaccgctgtgtgtgggcattgacccacatcgcaagctcctcaccgactggggatacaacgtcgacgccgaaggcgccgaactcttctccatgcgtatgctgcaggccgccaacgggcgcgccgcagcagtcaaattccagacgtcgatgttcgagcgctacggagccaaaggtttcgaagcgctcgagcgcgtgctctacgcggcacgacaaatgggcgtcatcaccatcgtggactgcctgcacggcggcctgtccaccacgatttccgccatcgcggacgcctatttcaagcccggtgcaccgttgctggccgacgccatcacgctgctgccgtactatggcgcgcgctcgttgaacggcttgattaccgaagcgttggaaaacggacgcggcgtgttcatcgcctccctgacttccaatccggaaggcatgagtctgcagaccgcgttgcgccagagcggcgattacaagggacgtaccgtggcctacggcatcgcctccaccgcgcagaagcataacgtggatatcgaaggcatgggctcggtgggtctgatcatcggtgccaccatcggccaatggatgcaggattccggcgtggacccctccaagttcaccggtccgattctttcccccggttacggttggcagggtgccgaggccaaggatctgaaaaccgtgttccgcggtacgcgcggcaacgtgctggttaccgtgtcccgctttatcgcctcgcatgggccggatatcgccgcactgagccaagctaccgagtcgattgcgcttgacgtacgtcagtcgctgatggaagccactgccgaaggcgcagaaaaccagtaatcagaacggaatcagatgtcgcggcatgcgtacgtatctatctcattgcatacgtcgcatcacgattcatattcttccctgttcgtcggggctgtaacagttaccggtcatctcaccggtgagccgttaccacattggattcataatcgctgcacaccacatcatctccggaggaacccatgactgaaaacacccatgccggccgtctaatcgtcctgactggccccaccgcagtaggtaagggcaccgtggaagccaagctgcgcgccgaccaccccgaagtgtgggtgtccgtctccgccaccacgcgtgccccgcgccccggcgaggttgatggcgtcaactactggttcctcaccgaagacgagttcctgacccgcgaagcggcgggggagttcctggaaaccgccgtggtgcacggcatggcccactacggtacattgctggctccggtggaggagcatctggctgccggcgtgccaacgattctggaaatcgatttgcagggcgcccgccgcgtcaagcagcgcgccgccgaactcgacttggaagtggtgtacgtgttcatcgcgccgccgagctttgaagagctcaagcgccgtctgatcggccgcggcaccgaaaccgccgaacagcaggcccgacgcttggaaaccgccaaagtggagctcgccgccgaaagcgaattcgacgtcaccatcgtcaacgaaaccgtcgatcaggccgccgccgacctctggtccgtcatcgccaaagaatacgggctgtaacgtgtgcgaataggttctgttcgtactgagatgtccatgcttggcatggcgtgctcatgtgattatgcgtgttcagtccctgccagtcggccctcacaatagggggagagcctgacggcagggactgattcataccgatacaaagggtcatgcgccaccattgttgcgtcaatcgtttgatgcgaaaatggtggcagaggcggcgattgccgtgttgggggatgaaatctcaggattggcggaattccgaggattctgagttgtggttgtgtgtccccatttgtgcgtcaaccgtttgatatgcaaatgggggcacatgcatgtgtgcgccatcttccaaaaacgtcgaattatgcaaatggggggcacgaataggtgtcggcgtgatgtggtgtggtgcgatgctgcaggtgcggtgtgacatggtgtgggatgccagcggatttcgggtgtttttcctctggcgtcccacagaacctgatgtacggtgtcgtcaccggtttgtgggattggcagaattccaatggttctgtggaatggggtgtgggatgccagccgtgtgcatcgtttgacgtgcgtggcgtcccgcacggttgcgggacgccggccccaaattggccgctaaccgtgtggtatcccgaatttctccgatatgcgagaggaatccgtccactataaggactctagcccagcgactaatagtttttcctctatgtgcgaataatacgggctgtaaactaccgctttaccaccaactgctggtggaggatttcggtgctgtttttggccggggattgcttccagcggatcgcttcggattcgtgatgctcggtgacataatgccgcatccattcgaagcactgctgggtctggatggcatcgcttaatgcgcggtgttcctcattgtccgcgatgccgaagcgcacgatcaggtcagccagacggtgatgccgctgcgcggggaacagggcgcggctgatctgcatcgtgtcataatccgcgcaggcaaagccgcagccggcgatatgccgggtgttgtaatccaggaatcgcagatcgaagctgacgttatgaccgacaatcggctcaacggtgggaccggcagccggggtagcgagccatgcgatgaatcggggaagcacctcgtcaatcggatcgaggtcggccaccatcgcatcggtgatgccggtcagcgtggtgatctgacgcggaatcggccgcaagggattcaccagctgctggaattgatcgacgatatgcccctcccgcacgcgcacggcaccgatttccgtgatggcgcaactgttcgggtaaaagccggtggtctccagatccagcgccacataatcggtgggaaagagggcatcgtccatggcgattcgcccgccggcaccatgattgggctgggatggttggccgaaaacggtaatgccggaagtggtcacggaggctcctcatatcagtcggtgttcggtgacttattgtaccggcagcccggtctgacggtaaaatttttccctcccggattttctcggatatattggttaggcggccggcaacatgcggcgcatcgggaagggagcacagctgatgaaacagatagtggcaggcatcgtggcgcatgtggacgcgggcaagaccacgctgtccgaggcgctgctctaccgtaccggtgagatccgcaaattggggcgagtggatcacggcgatgcgtttctggacaccaattccttggagaaggcgcgaggcatcacgattttcgcgcaccaggcattggtagaacacggcgacctgcgcctgaccttgctggatacgccggggcacgtggacttcgcagccgaaaccgaacgtgtgctgcgtgtgcttgactacgcgattcttgtggtctccggcacggatggcgtgcaaggccataccgagacactatggcgtctgctggccagatacggtgtgccgacgttcatcttcgtcaacaagtgcgacgccgccggatttgcccgcgaggccgtgttggctcagttgcgcaggcgtctgagcgatgcgatatatccgttgccggcaatggaacagtccactgagggcagcgcgctaccgttggacgcgttcgccgaagacatcgccaccctggacgaggaggcgatgaacgactatttggaacatggcgcgctgtccgtgggcagattgcgatcgatgatcgccgtacgcgagctgttccccgtatatttcggctcggcattgaaactcgaaggggtcaaggaattcctggacgggctggagacgttcacccgcgaacgtgaatggccggccgccttcgccgcacgcgtgttcaaaatcgcccacgacggtcagcacaaccgtatgacgtggctgcgcgtcaccggcggtgcgctcaaagccaaggagatcgtctcctcatcctcgtgcgccgcggcgtcgacaccgtcgccagcgcaggaggatgatgacatggcgtggtccgagaaagtcgatcaggtgcgcatctacaatggcgccaaattcgagacggtcaccgaagtgccggccggctcggtatgcgcggtgaccggactgacgcggaccttccctggcgaagggctgggaacggaaccggacgccgaatcgccgtcgttgcaacccgtgttgacctacacggtgttgcccgtcggagcggaatccgatacggccggcacctcgggagcggccaaacgtgggggagccggccatgacagcgtgaatcgggacgatgccgagcatgatgccgccaagtcgggaaccggccgcaatgaggagaacgacaccgccggccagaccgcggcggacaatagctcgccggcccgtccccagttcgatgatctgaccttgcacaaggtcatcaccgcattgcgtgagctggaagacgaagacccgttgttgcatgtggtgtgggtggaacggatggccgagattcatgtgcaattgatgggcgcggtccagctggaaatcatccagcagaccctgcacgaccggttcggtctggatgtgtcctttggccccggctccatcctgtaccgtgagaccatcactgcgccgatcgaaggcgcaggtcatttcgagccgctccgtcattatgccgaagcgcatatcctgctggaaccaggggagccgggcagcggagtcactgtggcctcggccctgtccgaaaatgatttggaccgcaattggcaacggctgattctgacccacctgaccgagcgtgagcatctcggtgtgctcgttggcgcaccgctcaccgatatcaagatgactttggtggccggccgcgcgcatctgaagcacaccgaaggcggcgacttccgtcaagccacgtaccgggcgattcgccaagggctgatggaagccagggcaggagtcagtggccggcccgagacgccggtcgagagccggccggacaccacaggggagggcaactgccgactgctggaaccgtggtaccggttccggctcgaagtgcccgcagacatgatcggccgtgccatgagcgacatccagcgcatggccggcagcttcgaatccccggtcaccgatgacgaatacgccgtgatcgaaggcgaggcgccggtgtccgaaatgcgcgactatgcgatggacgtgaaccagtacacgcacggccatggccgtttctccgccaccttcggcggctacaagccatgccatgacgccgaacaggtcatcgcagccgccgcctacgatcccgaagccgatctggacaacacccccgactcggtcttctgcgcccacggtgccggctaccccgtcaaatggtacaaagtccccgaattcgcccacgtagactacgtcatgtgaggtggtgactaccaaatctgcggccgaatgaatccgttggcctccaagaaccgttgaatatcgcgcatttccggcatattgatcgaatgggccatgcccggatacacctgttcggtcaacgtgccgtgctcgcgccagaactcacccatcgccgtcacatcggctttcgggaagatgtcgtccgcagcaccatgcccgtagaacacgggcggcttcaacgaagccaattcggcatcgcccgcaacggaccccggtgccagccatccagagcaggagacggctgcggcatatcgcttcggattgaaacgcagcagatgcgcggccaagaggccgccctgcgagaatcccatggcaaccaccggccgagtggcgggaatatgctccgcaacccatgcatcaatggcttgggcggcctcagccgcctgcttgtccaatgattcgccctccggcacaccttcatgcgcccacgcaccgaaccatgtatatcccatgccataggcgatgggtgcctgcaaactggcataatcagccgaaccggcaccgcaatagttcagcagatcgggcaaatcgtattcattggaaccccagccgtgcaacagcacgaacaccggggtggtttcaggaccggtcaaacgggtcaaggccttggcaatcttcatggctcccagtgtatccaccgtttaggcgacaatattgccctgatgttcgcccatcgagtaacgtcccataagtaatgcatatagcgcagcggccatgccacgtgttctgatactctacgatgacacggcaagggggccgtggcaggtatgttcggcccccgaaatcgtacatgggcggctaagaccgtttatgcgcaggagaagaaacgagaagcaaaggaaggagcgcgcccgatgacattcgattggtcgttcgtgcagcgttacgcgcctttcttcgtcaatggcacattgatgaccttattcatatccgtgtttggcatactgcttgccgtcgcggtgggtctggtctgcgctggcgtggaaatcgcacgtatcccggtcgcccggcaaatcgtaagaatctatatcgaactcagccgcaatacgccattgctggtacagctgtactttctgtacttcggcctgcccaaactcggcgtagtatggtccgccgaagcctgcgcgatagtcggcctcggattcctgggtggttcctacatggccgaggcgatgcgcggcggattggaagcggtgcccaacgtgcagcgcgaaaccgcatacgtactggggctgacctccacgcaaaccatcacccgagtcattctgccgcaggcggtgtccaccgccattccaggcgtagtggccaatgtgatcttcctgttcaaggaatcgagcgtcgtctccgccattgcgctcgccgacgtgatgtatatggccaaagatctgatcggcatgtactacagcacctatgagtcgctgttcatgctgattgtggcgtatctggtgattctgctgccgatttccatctttggcacatggctggagaggagattcgattatggacggcgctgaaatactgctccagccgggcgtattcccacgtctgttgcaaggcctatgggtcaccgtgtggatagccggcgtatccgtaggcgcgtccatcccggtcggcctgttggtgggctggctgatgacgctgaagaaccccgtgatccgggccgcgatgcgcatctacctcgacttcatccgcattatgcctcagctggcgttgctgttccttgcctactacggttttgctcgatggttcgattggaatctcgatgccaccggtgcctgcgtgctggtgttcatcctgtggggaggcgccgagctgggcgatctggtgcgtggcgcattgcagtcgattcccaaagtgcagtacgaatcgagctacgtactggggttgagcccgtggcaggctttctcccgggtgattctgccgcaggcagttcgccgtatgctgccggcatccgtgaacttggcgacacgtatcgtcaaaacaacatcgttggccgtgctgctcggtgtggtcgaggtcatcaaggtcggccagcagattatcgacgcgaaccgattccaattcccgaccggaaccttgtggatttatggcgtgattttctttatgtacttcatcgtgtgctggccgctgtccattgtggcccgccgactggaaaagaggtggtcgaatgactgaacccgaaacgacctgcaagggtttcgaggtggatcatctgatcaaacagtatgcgaatgccgacaagccggtgctggacgacatctccttcaaggtggagcatggttcggtgctcgtggtgctgggtccttccggctcgggcaagtcgacgctgctgcgcaccatcgccggtctggaaccgattcagggcggcacgatttccatcaacgatcaggtgatcgataccggaaaacccggcacggaacgagccggacgatccgaccggtccagtgaactgcgcactcgtatcggcatggtgttccaaagctacgatttgttcccgaacaaaacggtgctcggcaacatcaccatggcgccggtgctcgtgcagaagagagacaaggccgaggtggaggctgaagcaatccggttgcttggccgtgtgggacttgccgatcgcaaggactcctggccgcacgaattgtccggcggtcatcgccagcgtgtggccatttgccgtgcgctggttctgcatccggaagtactgctgctcgatgagatcacggcggctctcgaccccgaaatggtgcgtgaagtgctcgacgtggtgctcgaactggccaagtccgggcagacgatgcttatcgtcacccacgagatgcagttcgcgcgagccatcgccgaccacatcatcttgctggatggcgggcacatcgtcgaggaatcgtatgatgcgcaggcattcttcgaacacccgcaaaccgaacgtgcgcagcagttcctgcacaccttcgaattcgagtgattcgattgtgccatatcgacgtacttgagaagaaatatcaataacaacaagagaaggagaactcaatgagtatcaaggttgggagatcattcaaagcactgattgccgcaggtgcggcattggtaatggcggcatccatggccgcatgcggtccgtccgcaggcaccccgagcgaagcgaagtcctctgacacaggcaccagctccagcgccaacgccaaggcccgcagcctcgacgagatcaagaagaacggcaagatcaagattgccgtcttctccgacaaggcaccattcggctacgtggacaaggacggcaagtaccagggctatgacgtctacttcgccgaacaactggccaaggatctgggtgtgaaaccggaatacacgtcggtcgatccggccgcccgtgtggatgtgctcacctccaacaaggtcgatctggtgctcgccaacttcaccgtcaccgaggaacgcaaggagaagg

SEQ ID NO: 3539 - DNA, 5333 bp, Unknown
  R85_18m  MAG No. k141_16508
agccgcgtgaggtggttgtgagcacctatcaggcgatttccggcgcaggcaagaccttcaaggattggcctgagatggtgggcaacatcatcccgttcatctctggtgaagaagcgaagtccgagaaggaaccgctcaaggggttcggccatgtggacgccgaaacgggcgagatcgtgccgttcgacggcgacctcaagatcacttcgcaatgcatccgcgtgcccgtgctcaacggtcacaccgccaccgtgttcctgaacttcggcaagaaggccaccaaggaagagcttatcgaccgtctggtgaactacacgtccaaggcttccgagctggagctgccgcacgcgccgaagcacttcatccagtacctcaccgaggatgaccgcccgcaggtcaagctcgacgtggactacgagggtggcatgggcgtttccatcggccgtctgcgtgaggattccatcttcgattggaagttcgtgggtctggcccacaacaccctgcgtggtgcagccggcggcgccctcgaatgcgccgaaatgctcaaggctctaggctacatcactaagaagtagttgaatctcgttaaaatcgcaaaagccctccgcaaggagggctttcatcgtattaggcgcggaattcgcggctcagcggccagtaccgccgtacaccacggcttcgatctggtcggcatcgagaccgtaggcagtgtgcagagccttgacggcgtcgttcagctggtcgagcggcacaagcgcggcgatacgaatctcggaagtggaaatcatcagcacgttgatgccctcatcgctcagggcctggaagaacttggcagccagaccggcgtgggtcttcatgccaacacccaccacggctaccttgccgacgttggtgttcacatcaaaggagtggtaacccagcacttcctgcttgtcgagcagcgtgttctgcacctgcttgacggccgattcgggcacggtgaaggagatgtctgcagtgccaacggatgcgccggcctgcacgatcatgtccacgttcacgtcggcggtggccagctcggtgaacaccttggctgccatacccggctcgttcggcacgccacgcacggtggccagcgcctcggaacgatcgtgggcaatgccggaaatcaccggtgcctcggggcccaggtcagggaacaggtcgcccatggatttcgcttcttcttcagtcatgtcttgccttgtcttggttgaaattacttacgattattgttcgctgtagccgcgctcagtcgaggttcggcagcgtgcgcgggtcaatgccgtcaggcacaaccagcgtgccggggcgacgggagaacgaagagcgcacatgcagcggcatgttgaaacgctgagcgtactctacgcagcgcagtgccagcaccttggagccgcaggaggccatttccagaatggcttcgtagccgatggaaggaatacggcgggcggaaggcacgatgcgcggatcggcggtaaagatgccgtccacgtcggtgtaaatctcgcagatgtcggcaccaagggccacagcgagtgccacggcggacgtgtccgaaccaccgcggccgagcgtggtggcgtcacccttggcgttgatgccctggaagccggcaacgatggcgatgtctcccaatgagagcgcgttcttcacgcggtccggtctcacggccttgatgtgggccgcgccgtaacgggtgtcggtgaagaagccggcctgctgaccggtgaaggagtgggcgcggctgccttcggcgtgaatggccatggccagcaggctcatggaaattcgctcgcctgcagtcatcagcatatccatctcgcgctcgggcgggttggagtcgatgctcagcgcctgatcgataaggtcatcggtggtatcgcccatggcggagaccaccacggccaccttattgcccttcttctccgtctccacaacgcgcttggccacacgtttgatcgaatcggtatcggcgaccgacgagccgccgtacttctgcacgatgagagccactgctgtcctttgttcttctcttagggatttgtttggtcgatattctacgcaaacgcaacgattataagggctgtcgcgttcaccccgcgaccccgcgccggcatgcggacacgggtatggcctacgttgttcagcaaatattcaagttttcaccggtggttctttgagacagccgcatccatcctttgagattcgagcggttaactatcaattaccggcaaacgaaagcaaaccggcgaggtttccgcagaaccccataactgaataccttcttcttcctctctccttttcaaggcccggtcccgctctattgtggaagttggaccatccctattagggaagttggacactagattacgaactagactttttcggacttcttatacccctacattgcccctatatggcccctatatggccctcgtcggcatgttgcatgaaaggcttggtgcggagtaacgtttcgcagtgtggcacgtgcggcgttgccacttgcggcagcacctatgccaaccacgactaagacgggccggctgtcttgtataagcaaatcatgagcagatcaagcgaaggaacaggcgactatggcattgctgcatcgacgttcgacgagtaaccgtgcctcacagaaaatgcgggaaaacaacgcggccatgcctgatgacacatctgcaaatgacaacgtttccccagcgcgtcccgagcccacagcattcgttccaactccatttgacgaagtcatcgatattagcgatctcgtggccgagcgccgacgcctgcaacgcaatctgtgggcgatgcgcatcatcaccattgtgtcgctgatcgccgcaatcgccgtggcctgtttcccgctagcgttgcaattcgagtccgaccgcaacttggccgccaccacagccaccacagccaaagaagtagccggctggccttacccgcaggcgaaagacaagctcacggcggcccgcgcatacaacaagaagctcgctgaatccggccagcccatcttgggtgaagccgtcgatccgttctccgccgcccaaggaggatcccaagccagcggcgaggattccgcctcaaagaaagacaaggaataccagtcactgcttaataccggcaacggcgtgatgggcgcaatcaaggtgcccaaacagtccatcaatctgccgatttatcacggcacttccgaggaagcactggcttctggtgccggccacttgtacggcacgtcgctgccggtgggaggtaaatccacccattcggtcattaccgggcaccgcgggttggttgaagcgctgatgttcacccgtttggacgaggtgaaagagggcgacttcttctacatcgaagtcatgggcgaaactttgggctacaaagtggaccgcatttcggtgattttgccggatgacacgtcgaagctcaagattgtgccgggtgaggaccgtgtcaccttgatgacctgtacgccatacggcgtgaacacgcatcgactgcttatctccgggcaccgcgtggcaattccgatgccggcccccgagccgaatgacgtgcttgacgcgcgcaatatcgcccttggtgttggcctgggcatactggcggcaggactgttcattatctggttggcacgacggcacaaggccgcgcgcatcatccgccacggcgcattctggccgtggatgcgccgcaagggcgaaagcgccaatgatacgctggcctaggcctcacgccgaccggccagcgccctgcccagcgtgatttcgtcggcgtactccaagtcggagcccaccggcaggccgctggcaagtcgggtgaccttgacacctacgggtcgcaatagctgggtcaagtagctggtggtggcctcgccttcaatattcgggtcgagcgccataatgacttccttgacctcatcgccttctaagcgtttgagcagactgggaatacgcaggtcggcagggccaacgttggccattgggttgattgcgccgccgagcacatggtataggccgcggtattcgcgcgtgcgctcgatgctcatcacgtccttgggctcttcaaccacgcagatcaccgaacggtcgcgtctcgggtcggcgcataccgggcaggggctggattcgcacacgttgccgcaaatatcacagaagcggatcttggccttgacctcctcgatggcctcggccaaatcgcgcgcttcatcttcgggcgcggacagcatgtagaaggcgatacgctgcgcgcccttcggcccgatgccgggcagccgcccgaaagcgtcgatcagtcgctgtattgcgccgtcataagcaagtgccatgggtattcctcgttattcgtcctcattattcatccgagtgcttcttggcaggctggatgttcttggggttcttcggatcatctgccgcgaattgctcgacttttttgacctcgaatagctttttcagatcgtcaagattcatggccgtcgcctcgccgagcgactggtcgttcatcgagtattcgtcgtcctcggccgcgacttgcggttgcggctgcggctggctattccacgggtcggcattcggcgtcggctgtgcgggctgcggttgattccacgggtcatcgccggcagccggctgcggaaccgattggggctggttccacgggtcatcgcccgacatattgcccgacatattgcccgacactgtctgaggaaccgaagaagccggagtctgggactgcggctgattccacgggtcgtctcctggctgcggagccgcctgagcatggttcccctgcggctgattccacggatcatcgtgaggagactgctgatatggctggttccacgggtcggcttcgaccggttgcagtgccagcgaggccgtagcctgagattgcggctgattccatggatcatcgcttgcgccggcaactgccgtagcgggagctgcggtggctggctgccccgtggactgtccagtgggtccagcggacgcaacggacgcagcgggtgcaacaggagcagccggagcggcccacggatcaacaccatcactgatgtccggaaccgcaacatgcttcttgtgatgctcttcgggcgcaggcgcagcagcgggctcgttaggcgcgaacccgtctgcagattgcggtgaagcgttgcttacggccggcttggcccaagggtcatcgtcactccaactcttcgccgccgtggatgcactggattggccggctcgatggctgtcgtccgtatcctcggcttggcctgttgcagtcggcttcggagctttcggctcgctccccatatgaatgcccag

SEQ ID NO: 3540 - DNA, 9430 bp, Unknown
  R85_18m  MAG No. k141_16543
attcgtcaaggaaaggatattcatgaagacactcaaggaccttggagatctcaagggcaagcgcgttctggttcgcgctgatttcaatgttccgctggacggcaccaccatcaccgatgacggtcgaatcaaggccgctctgccgaccatcaagaccctgcgcgaagaaggcgccaaggtcatcctcatggcccaccttggccgcccgaagggcaaggtcgttcctgagctgagcctggccccggttgccgcccgcctcggcgagctgctcggcaccaacgtgccgctggccaaggacacctacggcgaggacgctcaggccaaggtcgccgccatgaacgatggcgatgttgtgctgcttgagaacgttcgcttcaacccggaggagacctccaaggacgccgacgaacgcgccgcttacgccaagaagatcgccgccctcggcgaggccttcgtttccgatggcttcggcgtggtccaccgcgcccagggctccaactacgacgttgccgccgatctgccggccgccgcaggcctgctggtcgagaaggaagtcaaggccctgtccaaggccaccgagaacccggagcgtccgttcaccgtggtgctcggcggttccaaggtctccgacaagctcggcgtcatcgagaacctgctcgacaaggccaaccgtctggtcatcggcggcggcatggtgttcaccttcctcaaggccaagggctacgaggtcggcacctccctgcttgaagaggaccagcttgagaaggtcaagggctacatcgagaccgccgagaagaacggcgttgagctcgtgctgccgaccgacgtcgccgtgaacgccggcttcccggccggtgacaccccggttgctccggaagtcgttgccgccgacgccatcccggccgacaagatgggtctggacattggcccggagtcccagaagctcttccacgacaagatcgtcgactccaagaccgtcgtgtggaacggcccgatgggcgtgttcgaggttcctgagttcgctgccggcaccaaggccgtggcccagggtctggtcgacgccaccgcagccggtgcgttcaccatcgtcggtggcggcgactccgcctccgccgtgcgcaacctcggcttcccggaggacggcttctcccacatctccaccggtggtggcgcttccctcgagttcctcgaaggcaaggagctccctggcctgaaggtgcttgagtaatccattttctagctcccctccttgaggggagctacgtattttttagaagggaaacatatggcgtccaaacgcattccgttggtggccggcaactggaagatgaatttcgaccatcttgaagccacttacttcgtgcagaagctggtatggctgttgcgtgacgctcgctttgacttcaaacgctgcgaagtcgcgcttttcccctcgttcacgtcattgcgcagcgtacaggtgctggtcgaagccgacaagctccatgtcgcctacggcgcacaatccgtttccgtgaccacccaaggtgccttcaccggcgatgtgtccgcggacatgatcgcccatctcggctgctcgtacgtcatcgtcggccactccgaacgccgcaaataccatcctgaagatgacgccaatatcgtcgatcaggtacgtgccgtgctcgccgccggcatgcagccgattttgtgcgtcggcgaaagcttcgaggaacgacgtcaaggcattgaactcgatttcgccgtgggccaggtacgagacgtcacccgcgatctcaacgaagaacaagccgccgaactcatcgtggcctacgaacctgtctgggccattggcaccggcatggtggccactccgcaatccgcccaggatgccgcaaacgccatccgcaacgatttgaagaccacttttggcacgaaggtatccgatagcgtacgtatcctgtacggcggatcggtcacctcgaaaaacgcggcggaactcatttcccaacccgacgtcgacggcttcctgatcggaggggcggccctggatgttgaggaactcgccaaaatcgctcgactggcactgaaagccacgaaatcacggaactaataccacggttttcccgtgtgtgcgctatgctggtcaacagtccaatcaatccggaggtaccctgtgaccgctcttaagatcacgctgcaagtcatcgtcgtgctgctcagcttcgtgctgaccctgctcatccttatgcacaagggcaagggcggcggtttgtctgacatgttcggcggcggtctgacccagaacgccggtacttccggtgtcgccgaaaagaacctgaaccgttggaccgttatcatcgctctggtgtgggtggcattgatcatcggcctcgacatgatgaccaagttcaacctcggctgatcggcttgcacgccatatagacttgtcgctcgcgacccatgaccgttaccgtcggtcatgggtcgtatgcgttctatcgagtattacgaaaggacatcaccatggtcactatgaaccgcaacaaagtcgttatcgtcggcactggccaggtcggtgccaccgccgccttcggcatcgtcacgcacggcctgtgcaatgagctcgtgctcatcgaccgctccgccgccaaagccctgggggaggcccgcgacctcgatgacggcagcgaattccaggaccgccacgtcaaggtgcgcgccggcgactacgccgactgcaaggacgcggacatcgtcgtcatcaccgtgggccgcaagccgccggccaactccaaccgcatggccgaactcggcttcaccgtgggccttgtgggcgaagtggtcgacaacgtcatggcctccggcttcgacggcgtgatcgtcatggtctccaacccagtcgatgtgatggcctggtatgcctggaaacgttccggcctgccgcgcacccaggtgctgggcaccggcaccgcgctcgacacctcgcgtctcaagaccatcatcggcgaagagaccggcctcgacccgcgtaacgtgggcggcttcgtgatgggcgagcacggcgactcccagttcaccgcatggtccaccgtctcgctcggcggcaagccattcgcccgcttcctggccgacaaccaagaccgtttcgcctccgtgtccaccaccgaaatcgaagagaagacccgcacccgtggcgatgagatcgtcgcggccaagggcggtaccaacttcggcatcgcctccaccgtggccggcatcgtgcagaccatcctgtgggacgaacgccgcatcgtacccgtctccaccctgctgaacggcgaatacggcgaacatgacgtgttcctcggcgtccccactgaactgcgcgccaatggtgccaacgagatcgtcgaactcgatctgagcgaggacgagcaggccaaattgcaccattccgccgaactcgtgcgtgaacactgcgaggggctgctgtgattctcgacgccatcacaccgaaacaaccccgactgctggtcgccgacctcgacggtacgttgctgcacgacgccgaggtattcgaggaccggttcatcacccagcgcagcatcgacaccatcaaccgcgcgcacgatgccggactgaaattcgccatcgccaccgcgcggccggtgagtaccggcctccagttcgccgaaaaactgccggtggacgccgtaatctatctgaacggtgccctcatcgatttcgacccggcccactccgacttcgacctgctcacctcaggtgccacgccggccgatgagaaccatttgatcaagattggcttctcctcacggcgtgcctgcgaagtctgtctgttcctgctcgatcgcatgcccggcctgaagctcggcatcgtgatgaacgacgtgcgctacaccaacttcgatgtgcgcgtgtattggaaaacacaggccttccaatacacgaacttccacgacgtgcccgaaggcgtggcggataagatcaccatcttccccgagcctgaacagtggaacgagctgcgtgcgctgattccgccggacttcgacatctccattagcgaaggcgtgatgtggatgctcatgaacccgcaggccaacaaggagcacgcgctgcacctgctgtgcgaacgactggacgtgccgctcgaacagaccgccgccttcggcgacgacctcatcgatatcaacatgatgagcgaatccggccggggtgtggccgtggccaacgcgaaccccaaggtgttgtctatcgccgacgagatctgcccgcccaacaacgaggacggcgtcgcccaatggattgaagcgcagttgggctgaaccggccgagactcgagaacacgccaaaattgaacttgtgttgaaccgggagtatgctttgaactgttgttcaaaagataaattgaactcccggttggaggcataaggatatgagcgtatcggtgtttgcggaacgtctgcgcaatgcgatgaacagtaggggattgaagcaggtcgatttggtgcacgccgccgaacatcgtggcgtaaagatgggcaagagccatatcagccaatacgtggccggcaagaccatgccccgcgaagacgtgctcgaattcctggccagcgaactggacgtcgacgcgaactggctgcgcggcgaggaatccaccccgcaattgaactcggacgcctccaacagtgtcacggacggcgaacacgccgccacaccgcttgccacgggtgccgccaagccccagacggacagcgagattcccgtgggccgccgccgtaccttcggcaaatcgcacaagctcgacaacgtgctctacgacgtgcgcggcccggtcgccgacgaggcgatgcgcatggaggccaacggcacccacatcctgaaattgaacatcggcaatccagcacccttcggcttccgcacgccggacgaagtcgtctatgacatggcccaccagctcaccgacaccgaaggctactcgccgtccaagggcctgttctccgcgcgcaaggccatcatgcagtacgcgcagctgaagaacatcccgaacgtcaccatcgacgacatctacaccggcaacggcgtcagcgagctcatcaacctgtccatgtccgcgctgctcgacaccggcgacgaagtgctcgtgccctccccggactacccgctgtggaccgcctgcgtgaacctggccggcggcaccgccgtgcactacctgtgcgacgaacagtccgaatggtatccggacatcgatgacatccgctccaagatcaccagcaacaccaaggcgattgtcatcatcaacccgaacaaccccaccggcgcactttacccaaaggaagtgctccagcagatcgtcgacatcgcgcgtgaacaccagctcatcatcttctccgacgaaatctacgatcgcctcgtcatggacggcctgcagcacatctccatcgcctcgatggccccggacctgttctgcgtgaccttctccggcctgtcgaaatcgcacatgatcgccggctaccgcatcggctggatgatcctgtccggcaacaagcgtatcgccaaggactacatcgagggcctcaacatgctcgccaacatgcgcatgtgctcgaacgtgcccgcccagtccgtggtgcagaccgcgctcggcggccaccagagcgtcaacgactacatcgtgccgggcggccgcgtgcacgaccagcgtgacctcgtttacgacatgctcaaccagattcccggcatcaccgccgtcaagccgaaggccgcgttctacatcttcccgaagatcgacgtcaaacgcttcaacatccactcggacgagcagttcgcgctcgacctgctgcatgacaagcacatcctcatcagccacggcggcgcgttcaactggcatcgccccgaccacttccgcgtggtgtacctgccgcgcatgggcatgctgcacgaaaccatgggggagctcgccgacttcttcagctactactggcagagctgatccttggtacaggcgaacacgatcgatgccagacggggcaccaaaccggtgccccgtctggccctgaccatgtcggtccccaccatcgtggcgcaggcggcgaacgcctcgtacacgatcatcgaccgactgttcatcgggcacatccccgaagtgggcaacgcggcgatgaccggcgtgggcatctgcttcccgattctgccggccgtcaccgccttcgcctcgctgatcggcgcaggcggcgcgccgcgcgcctccattgaacttgggcgcggcaacttcaagaaagccgaacgcatcctcggcaccagcgccgcgttcctcatcgccatagccctgaccctcaccgtgctgctgcatttggcgaaaccactgtggccatggtctccgtactcatcggcaccggcatatccatccttcttgaccccgtgttcattttcgtgttcggatggggcgtcaggggagcggccgccgcgaacgtgctcgccacattccccggcttcttcgcctcatggttcacctcggaacagacggtcatcgacatcgtgacccgcatgatgccgattttcgtctgcggctggggtatcttcggcatccagatgggcgcgcaatgcgcactcgtcggcatgggccaggccaaacagtcggtgttcttggccgtcttccgcaagatcatcctgctcgtgccgctcgcgctgctgctgccgcactggatcggcgtcaacggcatcttcatcgccgaacccatctccgacgccacctccggcatcgtggccggcttcctgttctatgccacctaccgcaagattcggcgagatatggtctagactcctgattcaatggatgtgccgtctcatgcgttgcgaaacacgggacggatagaatgcctcgcaaaacgggtgcccgttgtttcgtgatatgaaggagattttatgccggtggtgtcgcgtcgtgcgcagccaacgtgatggccataatcgccgaaagcagggagaacaatggcagcacgcacaacacgacggtcagcagtcccaaagcttcacggccgatgcaataagcgacaagacctgcattgtcagttgccgatagcgctgggcagaaatcggtgtgtctaccagtgttgtagctgtaggtaaagaacgtgagacctgaccagaacagggcaacgggaacagagccgatggcgcgaaaagccctgtactcccgcaacggtcagacagagaatcgcgacaacactcagcgcagtcaccgtcataaaccacagtggtgaggtgacgcagactccataatcgtcagttgcttggcccgagagatagtaggtcattctgccaatcgccggacagttcggatgcagcatcatgccgccccaaatgcgctcatatagtggtgtatagtggtgcgaacgatacaccggcaccgctgagcgtcgcaacaaccgccatcaccgaccgaccgccagactccggcacagaccgggaagaactaccgtcgcggagcatcggcgataccaatggcaacaccgaggatagccgggaccacccagccgagctggtattgctgcaagggcagcatggccagcgtcgtgtccagccagccgatggagccgccgaagacggtgattaggctggagatgcaggtggcgaaggagtcgatgcccaccagcagcacggtccagaagtagacatgcgggaatcgcgcgccaagcgacttgtgggtcagcgccagcagcaccagcacgatggcgatcggatacagtgcggacaacaccggcacggaaaccttgatgatcgcgcttagcccggcgttggacacgatgaaactgaacacggtgaagatgacctgccaggtgcggtagctcaacgttctccctgcaacggtctggaaccgagtgtggaagtaggtggcgcaggtactgatcagtccggtgcatacgttgaggcaggcgatgacgaagacgataccgaggaacgcggtaccgaacgcgccaaacagggacgaggtgagattggtgagcacggtcgcgcccgtgtctttggcgggatcgatggtggcgatggcaccggacaccaagcccacgtagctcagtgcgccgtagatcacgatcagcagcacaccggtgccgagtccggcatacgcggtctccttctgcacttgcgattcgtcatcgacctgctgggtgcggatattcgcggaaatcacgatgccgaaatagagcgcggcgagcagatccatggtctggtagccgtcgaggaagccacgtgcaatctggtttgtggagtagtcgcccatcggtttggccggggtaccgataccgtggattaggcaggcgatgaacaggacggcaatcagcaccagcagcaacggtcccatgaatcggccgagcactttggagagtttttcgggatgctgggcgaacaggaacgccagtgtgaagaacacgagcgagtagatgagttgggccagccagccgtaggaggacggcacgaaaggcgccaccatcatttcgaacgaggtggtcgccgtacgcggaatcgcaaagcaggggccgatggtgagcatgatcgccaagccgaggaacagggcgaatttgggggagacccggccggcgagtttgtcgaagccaccggcgaaggtgaccgccagcacgccgagaatcggcaggccgaccgcggagacgatgaagccgatggccgccggtatggtcgcggaaccggcctgagctccgacaaacggcgggaagatcaggttgcccgctccgaagaacatcgaaaagaaggtaaaggtcatcaccaaccgctggcgtgcgacaagtttgttcattacggttcggcctttctctcatgtgctcgtactactgtagcaacaaacgtaagaagccccgaccggttggggtcggagcttctgtgagctaatcagttaatgcgcgaaatgcgcatcagctaataatctcaggcgttcacgcggtcgatgccggactggacgtcagccagcacggaatcccaggacttgatgaaggcggcgacaccgtcggcctccagcttgtcagtgacgtccttgaggttgatacccagctcagccagcttgttgatgacggcgtgggactcctcgtaggtgccctcgatggacggagcgccgttgccgtggtcggccagagcgttcagggtcttctccggcatggtgttgacgatgtgcttggcaacgagctcgtcaacgtacttgcagtcggagtaggcggcgttcttggtaccggtggaggcccacagcggacgctgaaccttggcacccttggcagccaggtcggcccaacgcggatcctcggcaaacttcttctcgaagagctcgtaagccaggcgagcgttggccacagcggccttgccctccagagccttggcctcgtcggagccgttggcttccagcagcttgtcgacagcggtgtccacgcgggagacgaagaaggaagcg

SEQ ID NO: 3541 - DNA, 8793 bp, Unknown
  R85_18m  MAG No. k141_16968
ctggtggcctgtcccatcgccgacgattttgcggcgcgcgaggtcggcatcgtgactcgtgccggcgaccatcgtcccgcgctcggttcattgctcgaagagctcgagcgcacgtcactcaaatatttgagtgccaagtagccggacagcgataagcaagcttgcgaacgccatcacgatttcggggagccagaccgttgagcagcccttctgcaccgggaacaatgacatgttatgagcatgaacaacgtttcccagtcaacgactttgagcagcgcaaccgccggtgcctcttgctttgatgccaatcacatcgacgtgacgaccatcgaggatctggagcaggtcggttcggacaaatggacccgctaccccggctgcatcggcgcattcatcgccgagatggattacggtctggcgccgtgcgtggccgaagccatcgaagaggccaccgaacgtggcgcgctcggctacattcccgacccgtggaagaaggaggtcgcccgctcgtgcgccgcatggcagcgtcgatacggctgggatgtggatccgacgtgcatccgtccggtgccggacgtgctggaggcgttcgaagtgttcctgcgcgagatcgtgcgcgccggcaactccatcgtggtaccgactccggcctatatgccgttcctaagtgtgccgcgtctgtatggcgtggaggtccttgagattccgatgctgtgcgcgggcgccggcgagagcagcgggcgcaatgatgaatggctgttcgatttcgacgccattgagcaggcgttcgcgaacggctgccatgccctcgtgctgtgcaacccgcacaacccgatcggcaaggtattgacgcgcgaggaaatgctgcgattgtccgatctggccgccaagtacgacgtgcgtatattctccgatgagattcacgcgccgttcgtctaccaaggccacacgcatgtgccattcgcctcaatcaaccggcagacggccatgcaggctttcacctccacttcagcctcgaagtcgttcaacattcccggcaccaagtgcgcgcaggtgattctcaccaatccggacgatctggaactatggatgagaaacgcggaatggtccgagcaccagacggccaccatcggtgccatagccaccactgcggcctatgacggcggcgcggcatggttcgagggcgtgatggcatatatcgagcgcaatatcgcgctggtcaacgagcagatgcgcacgagattcgccaaggtgcgctatgtggagccgcagggcacgtatatcgcgtggctggatttctcgtcactgggcatcgatgacccggccgactatttcttcaagaaggccaacgtggcgttgacagacggccgtgaatgcggcgaggtcgggcgcggttgcgtgcgtatgaacttcgccatgccctacccgctactggaggaatgcttcgaccgcatggccgccgcgctcgaggcggacgggctgttgtagaacaaaatcgcggctcccctcagagaggggagccgaggaacggccgaattaatcgaagtcggcacccaacgcttcgagtttgccgcggaagtcggcgtagcctcggtcgatcaggctgatgccgtgcacgtccgaggggcctgacgcggccaaggccgcgatcagatggctgaacccaccacgcaggtccggcacgtcgatgtcgcgtccggtcagcggggtcggtccgaagatcacggcggaatgcttgtagttgcgctgccggaaacggcacggcagcgagcccaggcactcgcggtacaactggatggtggcacccatctcgaccagcggcttggtgaagccgaaacggttctcgtacacggtctcgtgcacgatcgacaggccgttggcctgggtcagggccaccacgagcggctgctgccagtcggtcatgaacccgggatgcacgtccgtctcgatcgccacgggcttcaagtccccgcccggatgccagaaacgaatgcccttgtccgtcacctcgaatttgccgcccaccttgcggaacacgttgaggaacgtgatcatctccggctgggtggcacccttgacgaaaatgtcaccgtgcgtggcgagcgcggcggacgcccaggacgccgcctcgatgcgatccgtcagcgacgtgtgcgtgtacccctgcagttccttgacaccctcgatgcggaaggtgcgatcaacgtccacagaaatgattgcgcccatcttctgcagcacgcacaccagatccatgatctccggctcagtggccgcgcccgacagttcggtcttgccctcggccagcacggccgccagtaaagtctgctcggtggcgcccaccgacgggtagggcaggtggatcttcgcgccgtgcaggccgttgggcgcggtgatgtggatgccgtccttgtgttccttgtccaccgtggcgcccagcttgcgcagcgtctccagatggaagtcaatcggacgtccgccaatcgcgcagccgcccaacgcgggaatgaacgcttcacccaaacggtgcacgagcgggccggagaacaggatcgggatgcgcgacgaaccggacagtgtatccacgtcggccacatcggccagctgcacacgcgaggcgtcgatggtcacaatgccgttcgcaccgtccacatccacgtccacgccgtgcagacgtagcaaatcggacaccacatgcacgtcacgaatctccggcacgttcttcagcaccgacttgcccggtgccagcaacgcggcgaccatcgccttgctcacgaagttcttcgcgccacgcaccttgatcgtgccattcaaaggcttgccgccctcgacatgcaacacgtcatccggattctcagccacgccactctcctcaatcaatcaagattcaaaaaatgctaccgtccagtttgccataagccatgtgccgactccgtgaaatgcaccccagccgaactttgatcaccgtgcacaacggatcccataccccccgtcgaatcaaaccgataacgtgatcttcctcacatttgccgccgcggcgttctccatacttctacgctacgattcagggcaatggcatcagacgccatggccacaagcaaaggagcattcatgaccacagtcgccgtcatcggctgcacgcacgccggcacgttcgccaccacctcgattctcgccgagcaccccgattggaccgtccatgttttcgagcgcaacggtacgctgtccttcctctcctgcggcatcgccctgtgggtgggcgaccacgtatccgacccgaagaaaatgttctactcctcccctgccgctctggccgaagccggcgcgaccatgcatatgcgcaccgacgtgacgtccgtggacctcgacgccagaaccctcacctaccgcgcgctggacgaggccggagaccccgccgaacagaccctcgctttcgacaaactggtcgtgaccaccggctcgcgcccggtcatcccgccgatccccggcatcgacagcccgcatgtgctgctgtgcaagaactgggatcacgccatcgccatcaaggaaaaggcgaaaaccgccaagtcggcagtggtgatcgggtcgggctatatcggcgcggaaatcgccgagcagttcagcgtcaccggcgtcaagaccacgctggtcgacggccttgatcgcccgctggccaataatttcgataagaccatcaccgatcaggtggcggccgcgttcgaggagcacggcgtcacgctcgcgctcggccagaaggtggtcgagttccgcgacaatgacgacgacaccgtcactgtggtcaccgaaaagggcgagtacacggccgaaatggcgattctggccgtcggcttcctgccgaacaccgacctgctcaagggcaaggtggacatgctgccgaacggcgcgatcgtggtcgacgactacatgcaggcgtccgcgccgggcgtgtacgccgccggcgactccgccaccgtgttctacaaccccaccggccagcacgattacattccgctggccaccaacgcggtgcgccagggcctgctggtgggccgcaacatcgagacgccgaccgtgaagtacatgggcacgcaggccacgtccgccgtgcagctgtacgatctctcgctcgccgcctccggcctgacccgcgccggtgccgaacgccgcgggctcacggtccgcgagacctcgctcaccgaggattatcgcccggacttcatgctcaccaccaccccagtcacgtcgattctgacctgggacccggaaacccgcaaggtcaagggcggccagttctgttccaaggccgatatctccggcgcggcaaacgtgatttccatggcgattcaggccggcttcaccatcgaccagctcgccaacgtggacttcctgttccagccgaacttcgacaagccggtctactacgtcggagccgtggccatgaaggcggcggccgagtaagacggctgtacccaccgcaaaaagaaaccccggcgtgatgggcgccggggagagaaaggagagaagaagaaagaggttaagttatgcagcttgttcggccgtgattacatataacagcaacagtttcaatgcaacatgggcactgtctgggaatcgtctgggaatcacggcccgtacaggctgttgcttgtttttggagccgatttaccggctggccttgatcttgtgggccagttcggcgtcccacatcgcgccggtggcggacatcaccgagtccgcgccggcgtcacggtacgcctggtagtcggcgggcgagaccacgccgccgacgccgttgatcgcgaaatcgagcccgagcttttcacgaatcgcggccagacgggcgaccatgtcgaggccggcgccacgaatcgcattgccgcacacgcctgagcgatcgcggcccgcgccgggcagggcctgattgccattggcatcgaccagtttggcggaaatcgtattgatggtgctgaagccctgcacggtgccgtggcccacggtggaacgcaccataagctccagagcgtcgtcgctggggatgtaggcgagcttgaccatcagcgggatgtcgccgatctcctgcttcacggcctcggtgatgcggcccacgagcagcggattgtggcatagcaggcggttgtggccctcgttggggcagctggtgttcatcaccatgagcttggcaccggtctccttgaccaggcgggcggtagtggcatggtcggcgatgtattcctcctcgctcatgccctccacacgcgagccttggaagctcgggaccagcacttgaccgggaccggcggcctcgatggcggcgcgcatgtccggctgccagacgtcagggctctgcgagggcacaccgaagctgttggagatggaaatcggctgttcatagttggtgtcggccagcacgccttcgtccagttcggcgctgcccggcgtcagtgaaccgtccgccgacttggggtgtacggcgagcacgttcgggaacgggttgcagccccaggcgcgcgaacgcacggttttgtaggtcgccagatcgaaacccatgtggaaagcggccgtggtgaaacggctgttgagcagcgggcctgcgggaatgccgaaaggcaggttgaccggctggcccaaaaaggtggccaaggcaccctcgctggtggttccggcggcatcggcaccgttgccatccttcagcgcctcggcgaacgcgccgaacggcccttgctcatagttgtcttcgtaactgcggctgacatcgtaaaacggctcaaaatcactcatgcttcaacgataagccaacctgcatgcgcacacgcacactcaacccatcatcgcgccgacaaacgaaataatggcgaaagcggcattggctaccacaaagatgatgaacgtcggagctgcccagccaaagtacgtgtctggaatactacgattcgtacggtgatattggcgcatctctttgccgtatatcacgaatatgataatcgatccgatcacgccgatcacagatagcgacaatgagaatatcaaatatgcgttgtcatcaagatagttgccggcaagggtatcgatggcgccggaaagaatcgcattgttgaagatgtgcagtgcaatcgaccaaaccaacgagtattccatggccacgaatcccagaatcaggccaaagaggaacgcgaatgtgccttgcactacgtcgtcatggaacaggccgaacaccattgccgaggtgacgatggcgaagttcttgcccaacggcttgagctccttcatcagtacgccgcggaacagtacttcctcgcaaatcggagcgaccagcccaacgtacagccacatgcttacggtgacgctggattcggcgatgctgtctgacgtgggagaggcaagatcggtgcccagcatggaaaaagcgacctgcaccaacataacgatgccttgcacgcccatgcccagcacgatgaacatcaacgcccagagaggctgcatgcgcccgccgccatattggctgatgtggccaagctgattgggctccccgtacgagtcgcgatgctggccaccaagccagaattcgcaggtgaagatgtcacggtggcgcatgagcagcagaaatccgaacgcgacgaacaccgatatcaggctgatgatgccatcccactgcacgccggacaaatcgctcgcggttattacgccgacgataatggtggcgaccattgcgcccaagagcatcatgccttcataggcgagagtcagtcccattacacgattgaccaccttgcgacgccacgtgcgccatacacggcgaggatcgatcggcatgaccacgggcattgctgcgggcatcgtggcaggcattgcgttgggcattgtgactggcattgccggagccgtttgcacgaatggttgcggcgcagcggaatagggttgtggcgcatagcccactggttgagcgtagtacggatgagcgaggggctgtggagccgactgttgcgccgggtatggggaataggcggattgcgccggatacgtcggctgcgtgggatacatcggctgggcaggatacgtaggttggacgggatatgtcgggtatacgagctgcgcggcgtattgtgcaggctgcacagcaggtattgcggcttgcggcacaggttgtgaaacaccttgtgaaacaatccgtggaacaccccgtgaaacatcttgtggaggtagcggttgtgcccatgcctccggctgacccgcatattgcggctgcatgctcggcccaggctgaacatactgtggcgtctgtggcatcggcgtctgtgactgtgccgcagactgcggtgccggtcgaggtggcaacggttgcgctgacagcgattgcgccggagccgtatcggaatcgttcgacggattcatgtcattcatggtcatgatgctcaacctaaccgtcattactggatgaatcgtgattatgtccacaaatgtgtacgaattcaggcacagtatttcgaacgctaggacggagttcatgagtgttgaggaaagcgccgccacgccggtgttggtggctgcggtggataacgaccgtatggcgttgttggcactgaagggaatattgccgcaactcctgcccgccgcgcaatggatgtggggcgcgggcaccagtgagacctttgtttgatgcgatgcgagcgacccaataatctcaatcagacacagagccaacggccctgggcctgcaattatggactcgcctttcggcgaggctcaatgctggcctcgctgctgtcgcagctcggcacagggcctgctgaaagcccaccgggctttcagcaggccgatcgcggctaaataatgccgcgatcggccaacggccctgtccagtctgcgtcctcaggctcgcgggcggactcgattctttcttcggcccagtgtttggcggggatggtcttgggcttgaaggggaacttttcggcgcgcatcttttcgtaggcggcgatgtcgtcctcgtgctgcagcgtcagatcgatatcgtcgtagccgttcatcagacgccaacgcacgtaatcgttgacctcgaacggcagggtcacgtcgccgcaagtgacagtgcgggtctccagcgagacagtcatctcacgaccaggctcttcctccagtagcttccacaggagttcgacggactcctgcggcataatcgcggccagcacgccgttcttggcggtgttgccgtagaagatgtcggcgaagctcggcgcgatgaccacgcggaaaccgtaatcgtgcagcgcccacacggcgtgctcgcgggaggagccgatgccgaattcggggccggcgaccagaatctggcccttaccggcgtattccggcttgttgagcacgaagttcgggtctcggcgccatgcgtagaacagggcgtcatcgaagccggacttggtcacgcgcttcaagaacacagcgggaatgatctggtcggtatcgacgttggagcggcgcagcggcacgcccacgccggtcagtgtggtgagtttttccataacaattttcctttcggggatctctcccccagtcagtcttcgactgacagcccctcgtcagagggggctcacgtgtattgactcagagatcggcgggagacgagattgtgccgcggatggcggtggcggcggctacggccggcgacgccagatgcgtgcgcgagcccttgccttggcggccctcgaagttacggttcgaagtggaaatcgagcgctcgttcggcaccagcttgtccgggttcatgcccaggcacatcgagcagccggcgttacgccattc

SEQ ID NO: 3542 - DNA, 8010 bp, Unknown
  R85_18m  MAG No. k141_
cctcatgcaccgtaaccttgaccgccgtgtggaggctctggtgcgtgtcaccgccccggagcagattgacgggctcatcaagtacgtggacctgcagatggccgactccaccatgagctggcacatgcagcccgacggcacatatgtgctgcacaccaaggacgacgagggccgcccgctggtcgacagtcaggaatacctgattcgcaagcaccagcgccgccccaattcgcacaactgatttcactcgatgctccctgtcagcacgagctgactgagggtggttacgatgcccggctcctctttcgagaggatgccgggcatcgttgttcagcgcgcaaaactacgtagcagcggtccaacgtgacctacaatacaagagatgggtacgaacagtatgagacgaatcgtggaagccgccggcggtattctgtaccggtggaaggatgatgccgagccgacgcaggcatcatctccatcagcgaaatccaatattgccaccgatggcaccatcatcgcgaataccgcggattctgacggcaaggccacggcagcacacggcgcatcggacgcggctcccaccccggacccggcgcaggccgacagcccggccgcggcggacaacgtactcaaccgcatcgaactgtgcgtcgtgcatcgcccgaaatacgacgactggagctggccgaaaggcaaggtcgacccgaacgaatcgcaccggcatgccgccgtacgcgagatcggcgaggaatcgggcctgtccgtggaacttggcccttatctgggcgacatcgagtacccgctgtccgaagaaggcagcaaacagcgccataccaaggatcggtcggcggataccaagcatatccagttctggatggccacgccgatcagcgccatcgacaacctgcggcgtacccatgcgtttggcccggtgcatcgggcggacatcggcgaaatcgacgaagttttgtggctgacgccggccgaggcccgcaagaagctcagccattccaccgataaggacatcctcgcgctattcgttgatcgggtcgaagaaggtgcactggacgcggtgccggtgattatcgtgcgccacggcaaagcggaagcgcgcaagctgtggaagggttcggacgcgaaccgtccgatcacgccgcgcggcgcggctgcggcatacgcgctgaaccgcgagctggcgtgtttcaatccgacccgactggccacgtcgccttgggtgcgctgccaggagacgttggagatgttcgcgtggcagaccggacgagacatggttcatctcgatccgctcaccgaagatgcatacgccgctgcgccggacaccgcatgggagtgtctactcagcgaaatcgagttcgcacttgagcgccgtcagcccatagcgatatgcatgcaccggccggtgattggtggtatgttcggacacctgcgcagcatgtgcgttgcgccgtctctgagcaaacgcctgatcgccaagacaccgttcatgccgaccggcacggcggtggcgctgttcgtcactccgacgcctcatggtcccaaaatcatcgatattcagaaggttcaaccgcttgtctactagacccgcatttcctgattcatccaactcctcggccgctgccgctgcagctcatgccgcgcacaatggtgccgccggcagtctgggcccgggcttcggctcgttgcgtgcggccggagcggcattcggacctgctcgcatgggttcttcacgcccctcgcgcccggctcagctcgacccggctgtggccgatggattggccggtggcatggacccgcaggcgttgagcgagatgagtcatctgtctgctgccgcattgctggatcgtgtgcgccatagcgaagacccggcggttgttgagcgggtgctcacgttggtggagacggtcggcgtggatgaaatcgccgaactatggagcgatgccgagccggattcgctgcctggtgtgctgtggcgactgtatatgttgcgtacgtggatgcgatcgaatcgcgactcgatcgcgcatctgtggcgcttgggtgagccggtggccactaccgcctccgccatcgccggcgtggatcaggctcccagtgaagatgacatcgtgcgattggccgattcgattctctccggtgcttttgtgggcgattttgccgtggcgcttgagcgtgcggcggcgtttaccgatgtggtggcgttgggcttgcgcgtggaggcgcggcgcatggtgacccgggccgaggccaacggcgccttctcctcggatgccgatgaaaaggcggtgcgcaccaaagccgcccgccttatgcacaccgccggcagcctcatggccaccgccaaggatttccagcacggtgccaacctctggcgtcgcggacggttggagtagccctgctccaggctccctctgatgagggagctgtcacgggcgatgcccgtgactgagggagagacccaccaaccgcaccccaacaatcagctaccagccaacaccacacctcccccggcgcggcgagccccatcgcaagctatactaagtatccgcgtcggaccgtgcttaagccccgggctccattttttgccgccgcgagcggcccttgcgccgacaggcgctttcgcggttcggcgcttcttttcttttacccgattcacgccccgaacgttgcgatgggcacgaccagtatgccgtcattgcggcgataggccttcccacctcggccggtaaggaacatcatgaactctggttcgcgaacttgggccatggggttgccacagattttgtcgcggaaggatttgagcttatccgcattgtcatcgttcaccttaaggtcactgagttttatttcgatagcaccccacctgccgtcagacaactcgataatgacatcaacttcaagccccttgtcatcgcggtagtaggcgatgcgattgttcgcgcccggcatggccgacagatatacattcaaatcacgaatgcacagcgtttcaaacagatcgccgagcgtctgtgtatcgcgcatcagagtattcggcgcggcacctaaaaccgcagcaggcaacgaaggatccacgaaatatcgcttgggcttggttcgcacacgactctttgcgcggagtggcggctcccaaccctccaaatccgtcagaaggtacaagtccttgagcattcccaaatagctctttactgtctgcgtatccggttcacggcgctcatcgccataggccatatccgcagccagcgtcgcatattttggtgcctgcgatacgttcacggcgagcgcacgcatgagtgcacgcgcggtttcagggttcttgttcatcttgggcacgctgatatcaagcacactcttgatatattcactcggaatttccagagcaaactcgtcatccaaatcaagatttgcgggccacccacctcgacagcaccatctggcaatatcttcaatgctggttgcacattcggcaggctcgaattgtccatcaaacaaaccagacaagctcactacaccggtagattgccctgactcgcacagactcataggccacatacgcaagcgagaaattcgacctgtgccactgtggtgaattgtttctcggtccttcggaatggccgagcccgtaagaatcagctgccccttgcgattcgcattgtcatccacatgacgacgagcggcatcccaaatttgcggcacatcttgccactcatccaccaaatgcggttcattacccatgagtaccaatgccggatcagtctgtgcggccgcaaaggtagcggcatcatccagacgatccatacttcgcgagcgggaaagcgccgtccatgtctttccacaccattttggcccgacgatttccaccgcgccgaatgctttaagtaacttacctaacctgccatcgaccacgcgagcacgataatcaggttgagtcaaggtatcactacgattgttcaaatcgttcattttccggcctttctcagctacccaatcgcctcaatatagattttacacctttctcattcccgattttacactatttccattcccggttttacaccattccgattcccggttttacaccgcaaggtgtctagtttcttcctatgacttaatccaccgagaatcaatccaacgaatcttcgcgcacgactgcgagcgctaggccaaacttgacccattccgatgagacatatttcacaataccgtagctttttcagctggtttccagaaaccgttgacttactgtccggttcggcctagatacgctctttttcgaatctcatgaaatcaacgtcaacaccttggggaaactctcatgaaggcaaccatcaccaaaacgactatcgcagttctcgccggactcgcgatcctcgccgacgcctttctgcttttttcgatgaagatatccaatagacgccacgtgaatgtcattgccatagtgacggatgcacgcgcacgatgcgagcgtcgagccgctccacgatgtcgtggtgatgcgtggagaacagtacagtcttgccggcatcagtgaaggcgcgcaatacctcaaccactacgtcagtattgcgctcgtccaagccgtcggtcggttcgtccagaacaagcaggtccggattcatcgacatgcagcaggcaatcgccacacgctttttttcaccgccagacagacggtatggcgcccgctcccgcatccgatccaagccgaacaacgtcaccatgtcatcgactctgcgctgtacttcggcatccggcaaccccatctgcaacggaccgaacgcaatctcctcttccaccgacgggcagaacagctgggtgtcggagctttggaacacgaatccgatgcgctgatgcagcgctttggcgaacaggctgttcttcgcctcgacttcctcgcgaaccaccggagtaccgccaaaccgatactcgcctgagtccggaaattccagcgcattgatgatgcgcatcagcgtggtcttgccgctgccgttcggcccgagcagcgccacgcgctcaccgcgttcgacggtcagcgaaaaatcacgtagcacggcgtgcgacgaggtttcatcgtcggcgtcgccgtaatctttataggaaaagtcgatgtgattcagttcgaccagcgggtcgccgcggaaccatgagttatctggctgcatggctgcagtttgtttatgattacgctttaatccgaacattattgggctccattcattcgaaccaccctcatcccgaatacaccgccagcgcaatcattgcagcaatgcacacggcatacaccccgttgcgccacgtcagcagacgctcgtggtggatatgatacgtaccgtcaaacccccggcacaccatcgattcagccatttgccgcgcctgcgtattcgcacgcagaaacagcgcgcccatcaactggccggcggacgtcagcttggtccggtcgcggcccacgctgcgcaaccgcagcgcatccagcaactccaccatcgaacgaccgagaatatcgatgaactgaatcgtcacgtcgcagatataaatcaccgaatcagggtagccaactgcgcgcagtccggcaatcaggcgattccacggcaccgtacgcgccagtgcgatcaccagcgacaccgccacgaacgcacgcaccaccagccggaccggcgcactgtactgcccaatcagcaggctcggcaccgccacgaccaggctcaggatgcatacggccagcaccgggccgagcaacgccctcatcaggcgcgccggccgggtcgccatcatcagcagcaccaccgccagcatgatgtacgagaacagcatgttgcatgtgatgttgacgcagacaatcgtggccagtatgcccagcagccgcacgcccggattgaccgagcccagcaccttgtcgaccgggctcgactcaatcggcaacgcatgaccaacctgctcgagtacgctgccgaaatgccccaggttgtgttcgatgaaggatgacttgtcagccggaggatcgtaatcctccgactcacgcatccatgcaggtatcgtcaacgcgcggatgtcttgccgttgccgctcaccgcgagcgccagcagacggaacacgatagtgagcacggcgatgccaatcactgcggagagaatgtagccggcgatgtccggcagaccctgcagcgagtagtcaggcaacagcgcatcccacgagaagccatgggcgatgtactgcggcacgtagttgagccccgtggcactcatgaagtcctcggcgccccactcgccccaggcgtcgccggtggcgagcaggccgatcggggaaagcaccgccaccacggccagcgcaatccacgcagacttgcgcagtccggcgtgcgcgacctgtttgccgtcagcaccggcggtctcggcgaagttcacacgggcattgtcttcgataatctccggtgcggtgcggcgcacgaattcgacaaccaccacggtcaccagaccctcgaccacgctggctacggccaggtgcgggatcagcatggcgggaatcgtcacgttaaaggtgaacgggaagtagagcgcctggccgtcagcggctttgaacagcagcggctgcacgccgagttccagcgccacgcagaatgcggcgagcgtgatgccgatatagccggacacgaattcggccacgcgttccttccagccgtcgggcagcaccttgcgtagcaacacgtacagtccgtaagccacaaacggcagcacgaacgccatgttgaagcagttggcgccgagcgtgatcaggccgccgtcgccgaagagcagcgcctgcagcagcagggccaccgacacggcgaccgtcgcgtactggggaccgagcagcagagcgatcagcgcgccgccgacaccgtgcgcggtggtgccgccgggcgtgggcacgttgaacatcatgatgaggaacgagaacgccgcgccggcacccaggtaggccatcttctccggcgtgctgttgcggatcacgtagcgtaggcacagcacccacaccggaatcatgatgacgtagaacaacgccccggtggacggcgaaatgaaattatccggaatgtgcatcgccaatgtgacggtgtcaggtacttcgattatatccaacttccctctttttgttgatttcggagctcgaccacaacctcccgctccaggaacgtgatatgtaatatcacaactgtgattcgtctaatgcacaaccatgcaaaatagcttgcaattactagcgacacaccgtgtaccatatatccggtttccgtgttttcggatatttttccgctatattttttgcatatttcgatcattcgttacaaagtgacgcaacaggctctctacactgtggcatgaaggacgtggggattctcacgccacaagcaattttctccaaggagaacggatgatcgccaaagaaatcaccggcaacatcatcagtcagcagtacagcgacggcaaacttaatgtgtcgattgccttcgactggttcgaaaccgataagaagcgcatgcgcaaggtggccgaggacggcaccgagttcggcatcatggttggcaagaccatcaaggatggcgatgtgctcgccgaaaccgaagacaagcgctatttcgcacgcattaaaaccgcacagctgattgagattccggttaactcgatgaaggaaatgggacgcctgtgcttcgaactgggcaaccgccacctgagtctcaaggtcgagaacgaccgcgtgctggtgccgtacgaccatccgaccatggaatacacgaagaagatcggttatgaaccgcatatcatcgagggtgggtttgacggcttcctgatcgtcaaggcccacgccggcaccggcacactgattccgggcaccaacaagaccacgggcgacgtggccgaggaggagcaggaagccgaggccgacaaggaattcccggccgaggaggccgccggccatctggatgtgcatacacacgacgcaggtgagggtgagcccgccgaa

SEQ ID NO: 3543 - DNA, 5098 bp, Unknown
  R85_18m  MAG No. k141_17601
gccgtcggtgaatacgtattcgaaggacttgcccttcggatcgaccgtaaacttgacccagccgttgccggcgtcggccatcagctcgtggccctgctcggcccagccgtcgataccgtagtggaggtacgcctgcttccagccgtcgggcagcttgtagtagatggtgcggctcgtgtcggccgtggccttcttggtctcgtcgttgacggacaggtccggatcggacggatcggacttggtcgtgccggtccaagaatccttggtcgcgcccgcgtagatcgcgatggcggaattcttcgcgagcgtcgcgtcgaacgtgccgtcgtccttcacggtcacagttgcagagcagtcgccggtggcgtacacgttgcagtattcgccggcgggcagtgacgtctggaacgtctgcttggagtcgtcggcgctgttgttgagcgcgaggtagccgacgtcgccgcgaccgaagccgagcacgttggtgtcgtacgccttccagttggtgacgtcggtgccgttgaccgcgttgtggaagccgatcatgccgcggatcgcggtccaacgttcggcgcactgccaggtgccggaggtcatcgagccgtcggtcgggcactccatgtcgggcacggaggtttcggtggcgccgggagcgccgtcgtcggagttgtcgaagtagtagccggagtagatgtgcggctggccgtagtcgtacgcgagcatgaacgcgttcgcgagcaggtacttcgagcccttcttgtaggtaatggccgatccgcgctcggtatcccagttggtcacccacacggcggccttgtcggagctcacccagccgtcgccgccgaccttcgcaaggcccttgctggcgtcggtgatgtcgccggcgaaggcgaccgacaggtggttggtgaagttgaattcggagaccttgccgttcgccacatagttgctcggctggatttccgcggcttcggaggcgttgccgatgacttcctgctcgaagaagatatcgtcggcgttgcggccggacttctcggcgagcttggccttgatggcggccacgtcggccgtggcgatgtgtttgaccgcgtcgacgcggaatccgtagacgccgaggtcgagcaggcggttcatgtagtcggcgagcttgtcctgcacgtattcctggctggtgtcgaggtcctgcaggctggtcaggcggcagttctgtacttcgtcggcgttggtgtagtcgccgatgttcttggtgcagtcgtggaagttctctttggtgtacgggattgcggggaagttgccctcgccgtcgtacttgctgccggcgacgccggtgccctctccctgatcggcgccggtggtgtggttgatgaccgagtcggcgatgatctcgacgcccgccgcgttgcacgtggcgatcatggtcttgaactcggcttccgtaccgagcttggagtcgagcttgtagctgaccggctggtaggaggtccaccattcagtgccctgaatggactccatcggcggggagacctgtacgtagcccacaccttcggggccgtaaacctcggtacactccttggccaccgaattccagttggtttggaatgcgatggcgatcacatcgcccggcgcgccaacagatgtgcgcgcctgtgcattggcctcggtctcgtccgcagaagccggcaatgctaccagcgttgtggcagacattgccaccgctatgccggttacggcaaggcgtttggcgagcgagctgaatcgtcgtacggccatatgagtcctttctctcatccttgagcattgaccgcacgaaccatgaaggggaacaccccctatcgcacggtcagaccgttgacaacgtttgcaacactttcagcaccactcctgcagaaacggcatgcagcacagttgacagactgcatacgttcgcaatactatgtcccaatcagcataccacaccaagcaacacttcccctagcttcgcgctaacgtttgcagtgtatgatacaaatgattacacattgtggatggcgcaacccgttagggggattacgtggcatagctgataccacgaattgcacgaggaggaacatgggcaaggcagacatctaccaagtagccaaggaggccggagtctccatttctacagtgtcgcgcgccttcacccgcccggaactcgtctcggcgaagacccgccgcaaggtgctggatgtggccgataagctcgatttcaacatctcccgctccgccaccgccctgaagtccggacagacctaccgtgtggcgatgctgatgaatgaggagatcaccagctggttcaatacgcagacgttcgcgggcatcgaatcggtgatgcatccggccggctatgacatctcgctgttccagcacatcgataccgccgcaaaccgtcatgagttcttcaccgacctgccgattcgccgcaatgtcgatgccgttttcgtggcctcgttcgctatcgatccgcacgaggtcgagcagctgcagcgcattcatgtgccgatcatcggcatcaatacgccgtcttccgaaggctttgacgccaccatcagcatcgacgacgaaaaaggcatgtacacggccgcgcagcatctcatcaacctcggtcacaagcacatcgtctacccctgttccgaggccgccgggctgaattcctcgattgacgcacgcgcacagggcttcatcaacgcctgcaaggacgccgagggccgccacgacatcaactggcaggtgctttcggtgccgcgcggcccggccttcgccgactctgcgctgtccgcgctgctggcgttggacaagttcccggacgccatctgctgccagatggatatgatggcgattccgctggtgctcaagctggagcgttacggccaccgcacgccgcgcgattattcgattgtcggctttgacgacagcccctatgccgacaccatcaacttgacgaccatgcgtcaggatccgtatgcgatgggccgcgcagctgccaataaggcgttgacgctcatcagcggcaagacgctctatgacccgcacgaggtgctcgaggcgcagctagtgccgcgcagcaccgatattccattcggggaaatggcgtaactaggccagcgcgccgataatcaaaagcactggatagaccgcgtaccaggcccacttggtccaagactgcttgaacccgacttcgtcattgcggtagtgcaggaaggccacaccaataccgggcgtaatgcacatcacggcacccagcagcccggcggtgaacatcatcgtattttcacgcgcgttcaggaagtagaacaccagcacaaacagcagcgtcagcacaccggtatacataatccgctgatccacgcccacgcgcagcagcaacgcccacagcagtccggccagaatgaccacaatggtcagcagccaacgcaccgcagccgcaccgcctcgctgagcaccggaccacgggcgcagactctccccgccgtactggtatgcaatccaatccaccagcatgagcacgaccagggcgatgaccaagccatacaccgggttctgcgcgctcaagtcgaatggcttgccggtcataatcaggtcgtacggcacatcgctgaccaccgcgacgatgaacagacggagcacatattttccaatgctgcccgtatgccggtagccgtcgaacagcagccatgagtagatggggatggcgcaccatgaagccgccgtgcacgccaccaccacggtcagtgcagccatgtcctgagtcgggtcgcccaacatggccggcaggaccgagacgccggccacgcccaatgccatgaatagggcgccgatcatcttgagacggaatacggacaggcccttgcggcggcgcttctcaccacgccgctgctttgccatctccacttcgttcataaggttgcgccttcctgttctggctcccctctgaagaggggagctggctcgcgcagcaagactgaggggagcctatgtgtcaggcaaactcccctcagtcgcctacggcgacaactcccctcttcagaggggagccaagctatatattcaagtatcccaataatccagcataatcggggccggtcagcgagcgcacggcgtgctggctggtttgcggatcgccgggtggggagatctcggtgcgcatatagacgccatcgatgcccgcgccagccgcgcccataatgtccgaacgttcgtcgttgcccaccatcagcaccctgcagggggccacaccctcggcctgcgcggcacggcggaatatggcgggagagggtttgcgcacgccgatttcactggagataacaatccggtcgaacgcatattccaagcccaacatcgccagctccggccgcgtatagcaggattgcgcgttgctgacgagcacaacgcgcaatcccacggatcgcaatcgcgccagcaattccagcgcgcccgggtagaggcgcagcatactggtgctggcctgtcgaaacgtccaagccaacgcccgggccatatccatccggctttcccgaacggcagcgttcccctcaagcgaagtctgcgcggcggcttgggaatcgcggcatatcacgtcatcgcactctctgaacctcgccaatacggcgtcggcccggctggcaagatcggcccatgccgcatcccgacaacccatcagtccggcgaacaccggcagcagatcaggttccgcgtgtgcgccatgagcggcaagggccgccgcgcgaatcggctcggccaacgtttcgaaccgggccctcagcgaagcattgtccggatacggcaccccgtattccgccagagcggcgcgcagcgcgccccatgccgcggccgactcctcatcggtgcgaatgtccaccaaagtgccgtagaggtcgaagaaaatcgcgtcatatgacaagccccgccggcgtgggctatcggcagcatgaccagcggtgacccctcgttcattgatcacgttcagtatgctgttcgacagcccccaccggcgggagcaagcttcatattcacccacgattgcgccgccagatagtgaaggtgtgggatggcaggggcaatcgccggttctcgacttcgc

SEQ ID NO: 3544 - DNA, 12689 bp, Unknown
  R85_18m  MAG No. k141_17722
cgaatatgagatgaacggcgtgctgcaccgcccggacggctcccacagccacgacggcggccgcacctggcacacccactgatagccccatgaacatcaacgaaaccgaatcgcgacgtctggccatgctgcaggtgtgcgacagcgtcttccccgtgggcgcgttcgcgctgtccaacggcatggagaccttcgtacagcgcgacttcttgcgccgtggcgccgatttcgaggagtatatgaagaactacctcgaagtcgcaccgtacaaggaaatcgggcagatggtgctggccggcaagtacgccaccgattcgcgagtctcccgcaaagggctggccgagcgactcatcgaacttgacgagctggcctcggccctgcaatccgcacgtgaaatccgtgaaggcagcgagcgcatgtgtacccgcctggtcaagctggccgagcagatggatgccggccaggcgcagacctcggatgggcatcgtgggttcgccaagccaagtcctgccgacaatgccaccgcatccgctgcggattcgcgcgaaaacagcatcatcgccgtgcacgagcatcacaccgaacgccaccagctgcacgatgccgccgacggcctgtacggctcgccgtcgctcgacctgtatgccgggctgattcgcgagcgccgctgccgtggcctgcattcgatcgcgatgggcctgtacgcggctgaccatgcgaacaacgtgcgcgacgcggccatcatgtatggatattcgctgttgagcgcgcttaccatgtgcgccgcgaaggcgattccgctcagccagtacgctggccaagtcgccctgcatgattcgttcccgcgcctcgtgcgcgcggtgaatatcgcgatgacgttgaagcccgaggatctcggcatctccggagcttacctcgacatcgccgccatgcagcatgaaatcttgtactcgaggctctacatgagctaattatcctggctcccctcaaggaggggagccaggataacctcacccgcaaaccacatacctaactaattcccacataaaggagaaaccccatgtcatacgtacgcatcggcgtcgccggaccggtcggttccggcaaaaccgcgcttatcgaacgcctgacccgcaagatggctgacgaatacagcatctgcgtggtcaccaacgatatctacaccaaggaagacgccgagttccttatcgagcactcacgcctcgcgccggaccgtatcgtcggcgtggagaccggtggctgcccccacaccgccatccgcgaggactgctcgatgaacctcgaggcctgtgaggaaatggcccgcacccacccggacgtgcagatcatgttcgtggagtccggcggcgacaatctgtccgccacgttcagcccggacctggccgacgccacaatctacgtcatcgccaccgatgagggcgacaagatcccccgcaagggcggccccggcgtcacccgctccgacctgctggtgatcaacaaggccgacctggccccgttggttcacgccgatctagacgtgatggcccgcgactccaagaagatgcgcggcgaccgcccgttcatcttcaccgacctgatgggcggtgccggagtggacgacgtcatcgcatggatcaagaagagcgtgctgttcgaggacatgtgatgttttggcccgcccgtatccaaaaacggacgggccgaaacataccgttgcaccaagtgcggcataattgcccatgtcatcgtcaggcaccaatcataagaaggcagcgattcgtccatgggcagtagcacttttcgtctatccactgcattccgccacggacgtaccaaaatcgacgatatttatttcgaggcgccgttcaaactgatgaccccgttcaccaacggacgtcattcggatttcgtcgtgatgctcgcctcccctggcttcctgaggggcgatgaagcccatatcgatatcgacttcggcccaggcaccgattcgaccatcaaaacgcaaagctacgagaaggtgttcgacaccgcggacggctcggccgaacgcaccatcgaactcagggcgcgtggcaatgccaaagccgtgttcctgccgttcccagtgattccgttcaagaacagctcattcatgaacctgaccaccgcgcatatttccgccgagtcagcattcgtgtatgcggatgtggcgacatgtggccgcgttgggatggatgagcgttgggccatgaaacgttttacgaatcgtatgcgcgtatatgtggccgaacccgaagccgtgaccaaggccgccgcagccgaattggcgcaacagcacgcacatcgccgaggccggccttccaaggcggaagccgccgctgcccaaccgcgcgaacatctggcctttgctgaccgcatgctgttggaacctgatgcttttgactacaccgaactcggcatgtggcgcgaattcacccactgcggcgttctctacgctcacctgcccgaactcgaccctagcgacgctgtacaagatgccgcaactaaagaagcatcctccgccgccatccgcgagcgcatcgagactgcccgcatcgccgccgaagacgcgctcatcactcgcatccacgaacacgcagacgccatcggcttcaccggcgagctcggcgtgagccgcgtaatcaatggcatctgcttgcgtgtactgaccacccgaggcgacgacgccttcgacctcattcgagatgtggccgatttcgtgaccgatttcgtggccgaaggctaaaaccaagtggctctcccctttgaggagagccaccagttctctcagaacaggaagtaccgctgggtaagcggcaactcgtacgccgggtcagagtggaccggttcgccgtccaccgtcacttggaaggtttcgggattgacctgaatgtcggcgagcacgtcgttgaacttcagatccttcttgcctaccgtgcggcagccatgcactggtaacacctggcgctgcagctccagcttgcccttgatatcgtcatccacggcggcctgcgaaacaaacgtggcgcaggacttgccaagcgcacggccgagcgcgccgaacatatcgcggtagtagacaggttccggggtcgggatagaagcattcgcgtcacccatacgagagtaggcgatggagccacccttgatgaccatttccggcttcgcgccgaacatggacggctgccaaagcacgagatccgccatcttaccgacttcgatggagcccacgtattcggaaatgccgtgggtgatggccgggttgatggtgaacttggagacgtagcgcttgacacggaagttgtcgttgcggttgttgtcgtgttcgtcttcggggagcggaccgcgctgcttcttcattttgtcggcggtctggatggtgcgggtgatgacctcgcccacgcggcccatggcctgcgagtcggagctcatcatggagatgatgcccatgtcgtgtagcacgtcttcggcaccgatggtctcggggcggatgcgcgagtcggcgaaagagatgtcttcgggcacattgcggtcgaggtggtggcagaccatcatcatgtcgagatgctcgtcgatggtgttgcgcgtgaacggcatggtcgggttcgtggaactcggcagcacgtttgggaagccagcggcacgaatgatgtccggagcgtggccgcctccagcgccttcggtgtggtaggtgtggatggtgcggcccttgaacgcggcgatggtgtcttccacacaaccgccttcgttcagagtatcggtgtggatagccacctgcgtgtcggtttcgtcggccacgccgagtgcagtgtcgatgacggccggggtggcaccccagtcctcgtggatcttcaggcctgcggcaccggcgcgaatctgctcacgcaacggttcggggctggagtcgttgcccttgccaaggtaggcgatgttgatgggcagcgcttcggcggcctcgatcatgcgggtcaggtggaaggctcccgggttgcaggtggtggcgttggtgccgtcggccggaccggtgccgccgccgaccatcgtggtcacgccaccggcgagggcagtgcgaatctgctgcggggagatgaagtggatgtgggtgtcgagtccgcctgcggtgacgatgaggccttcgccggcgagagcttcagtgccggagcccgcttcgagaccgggggtgataccgctcatggtctgcgggctgccggccttgccgatggcgctgattttgccgtctttgatgccgatgtccgccttgtagatgccggtgtagtccacgatgagggcgttggtgatgatggtatccggcgattcaacgtcgagctgcacggagctttggcccatgccgtcgcggaatgatttgcctccaccgaacttcagttcatcaccgtagtgcgtgtagtccttttccacctcgatgatgaggttcgtgtcaccgagtcgcacgcggtctcccgtggtcggcccgaacattcccgcataatccttgcgcgtaataatcttcatgtcaaaagtccttgctgtttttcagctccccttgtcaggggagctggctcgcgaagcgagactgagaggtagtccgctccccgctggcgggagctgtcagcgaagctgactgagggtggcccttagctcagattcccgagaatccaagctcatgcgccttcttaaacgcggcctcccgcacctcagggtcatccaacttcccctcaaccagtgcgctgaagccgtgaatctcacgcgtgccaccaatatcaatcaaccgcactcgatgcgtttcacccggctcgaacctcacagccgtaccagccgcgatatccaaccgcttgccatacgccgccttacggtcgaacttcaggtacttattaacttcaaagaagtggaagtgcgaaccaatctgaatcggtcgatccgcagtgttcaccacgtccagctcgatgtcttcggaaccttcattgagttccaaatcatcgtcagccagcagatattcccccggcaccaacttctcggtggattcgatggggttatgaatagagacgagcttggtgccgtccgggaacgtggcctcgacctccaccacttccagcatctcggccacgccatccatcacatcttcaggcttgagcagcgtgcgaccgtatgccatgagctccgccacagtgcttccctcacgcgcccgctcaacgcattcggcggaaatcaacgcaatcgcctccacatagttgagcttcacgcctctggctttgcggtctttggcaagctgccccgccaagtacagcatcaacttgtcagtctctcgtggtgtaagtctcataacatcctctgttgttgactggagtttttcaggcacaccaatgtgagccctaacatcgcccaataataagagcgttataagaacgggacgtttctcataacgctctatggccataaacgggggtcgaatcaatcacactctcatggattccttggcggcttctacttggtcggggccgccttcgccggtggcgatgaaacggccggaggccaggacgtagtagcggtcggcgcgctcgacggcgaattggaccttctgctcaaccaagaccacaccgatacccttgtcttcggccatcatgcgaatggccttctggatttcggcgacgatattgggctggatgccttcggtcggctcatcgagaatcatgagcttggggcgggtgatcagcgcgcgggcaatcgaaagctgctgacgctggccaccggacagcagaccggcacgtcggccagcaaattccttcaagaccgggaacatttccacggcttcgtcgtaacgggccttggcctctgaaccgtagcggtcggcgaccacgtgcaggttttcgtccacggtcatggtgccaaaggactgctggccctgcggcacgaacgccatgcccttgcggatgcgttggttcggtgcagccttggtaatgtccttgccctcgaaactaatcgaaccggacgaaacgggcagcaagcccagaatcgccttcaacagcgtggtcttaccggcaccgttgttgccgacgatgctcacccattcgccggcggccacgtcgaaactgatgtcgttgacgacggtcactttgccgtaaccggtgttcaaatcctttacttcaagcattgccatgattattcactttctacggcgtcgtgcatattgatgttgaggcgcgttgtatcaccctcaatatgcactgaaaaagcgcattccgggatgcgatggttgttgtcagtgcggtccatattgcgcttcttcctcttacctactcccctcagtcaccttcggtgacagctcgtccgcaattaaggacgggccttgcctgcaacctgctggttcgactatcgtctcgccttcggctacaaacagcccaccgggctgtttgcttaacgcctcggcctcagggaggggagacagggagttagttttctccgccgcccaggtagatgcggactacttcttcgttgttttggatgtcttcgaccgaaccctcggcaaggatttcgccctggttgagcaccgtgaccgaatcggcgaactgacgcatgaaatccatgtcgtgttccacgatgatgaccgtgcggttcttgctgcatcgcttgagcagctcaccggtctgcacacgctcggccggagtcatgccggccaccggctcgtcgagcagcagcaggtgcgcgtcctgcacgagcagcataccgatttccagccactgtttcttgccgtgcggcaggatgcctgcgggcttgtttgcatccacagtcagattgcacacgtccatcatgtattcgatgttctgcgaaacgccgcccatcggctggaacagctcacgacccttcttgcggaagccctcggccagctgcagattctccaacacggacagctcttcaaccaccgatgcggtctggaaggtacgcccgacgcccagcttgacgatgtcgttcggcttgcggcccaacagctgctcgccacggaattccgcggaaccagtggccggcaccagtccggtaatcgcgtcgatgatggtcgttttaccagcaccgttcgggccgatcaggaatcgcaaatcgccgtgctgcacagtcaaatcaagattcttgacggccacgaatccatcgaactcaacgtgcagtccacgaacttccagataatcgctccactggccgccgcgatcatccagcaccgcaagctgatcgtgcagcttcgtacgctcttcaacgatttcggccttcatctgggccgcttcgtcgcgcatacgcttggcttcgtcgcgcatctcaatcatttcggcgcgcaactgctccaaatcggcctgcgatgcaggtgcgggagccgatggattcgagctcatgttcttctcctcactcatgcgttcaccgcctttgcagtagcagtaccggtaccggcaacggcaccagcaccagcaccagcaccagcaccagccgaagctccaaccgaactctttccgagcccgatcttctccttaatccaaggccatacgcccttgaactgtcccaagcccttcggcacaaaggcaatcaccagaatgaagatcaggccttcgatgtacgtccacgcggacggatacgcctcagacagctgcgtttccgcaaagcgcaccagcagcgtgccgaccaccgggccgagcaaagtggcacgtccgccgatcaccacgccggcgagcatcaggatggacggcgtcacgccgatatcggacggcgaaatgatgccgaccactggcacgaacattgcgccaccaatgccggcgaacattgcagccaccgagaaggcgaacaccttgatggaggcggggttatagcccaagaacttcatgcggttctcttggtcgcgcacgccgataatcaggtcgcccataaacgatttgcgaatccagtagacgataagcaccatggccagcgtcaggaacgcgcagatgtagaagatcatctgcttgttggcgttatcagtcaagtcgtaaccaaagaatcccttgaaatcgttgagaccgttggtgccaccggtggttttcgactggccgataagcagcacggcgaacgcggcaaccagcgcctgcgaaagaattgcgaagtaggcgccacgcacgccacggccgaacacagccagaccgaggattgcggcgataatgcccggtaccgcagccacgccaatcacggcgatgaccggattgcggaagagttcccagaatccaggaaccttggtgatgccgtactgggacatgaagtccggcacttggcccacgccaatgtcctcaagcttcatgtggatagccatcacgtacgcgccgagaccaaagaacaggccttggcccagcgtcagcataccgccttggccccaagccaggccgatgccgaccgcgaccatcgcgtagcacaggtatttggacagcaggccgaggttgtacacgctcagcacagtcggagaaaggaagatcagcgccacggcaatgaccacaccgatcaaagccttatatttcgtggcgtattcgctcaaagtcatcttcattgtcgtttccttacccttctgaagcactcacgcgaggttcctggagcggatggagaccaagccctgcggcctgaactgcaggaacaccaccacaatcaggaacacggcaacctgaccaatcgaggcagaggtcggcagttcgatggacgactggcacaagcccagcacgaacgaggcgataaccgcgcccttgagctggccaacgccgccggccacaacaaccaggaaggcctgcacgatgaaggtcgtaccgaagttgaagctaatcgagttcagcaggctcagcgccacgccagcgataccggcgatgccggagcccaggaagaacgtcacatggtcgaccatcttggtggagatgccggaaacctcagcgaggtcgcggttctcggaagtggcgcgaatctggcgacccagcggcgtgagcttcaggatcgcgtacagcgcagccacgcagataatcgacagaataaagatgaacagtcggcctgcagagaagctgtagccaaagatggtcaccggattggtcagcgcttcaggagccgaagcgtagaccggagtggcaccgaaaatatcgcgtgcgagctgctgcaataccagcgatacaccgaaggtaaccagcagcgtatcaagcggacgattgcgcatacgctccagcagcaacacgtccagcagtaaaccaagcaaaccggctactacgaaaccgaccaccagcgccacggccagggacactgttttattgccgatgaccatgctcatgacgtatgcggtgtatgcgccggccatcatgaattcgccgtgggcgttgttgataacgcccatctggccgaaggtcaacgacaacccgagggctgcgagcagcagaatcgatccgttggacagacctgccacaatttgtggaaataacatacccatgttgttgtgtcctcttctctcagttgctctcgacgctggcgctcaggctcttggcccagctgtaggtcttcaggtacgggtccggcttgatgggaccgtccgacttccagacggtgtggatgagcttgtctgagccgatcttgccgatgtatgaggtcttgtagatgtggtggttttcgccgtccaccttgaccttgccttccggtgcattgaaggtgacaccgtctgctgcagccttgaccttgtccacatcgaacgacttggccttctcgaccatgcccttccacaggtacacagatgtgtacgccgattccatcgggtcggaggtggggcgattggctccgtagcgcgccttgaagttcttcacgaacgtcttgttttgcgcattgttcagcgtctggtagtagttccaagcagtgagctggtccttgacgttgtcaacgccgatagcggaaacctcttcctcggcgatagacatggaaatcaccggcgtggtggcggctttcaggccggaagccttgtattccttgaagaatgcgacgttggaatcaccgttcagcgtgttcaccaccgcatccgcgccggagaacttgagcttgttgacgatggtggtgaagtcggtggagcccattggggtatattcctcgccgaccacttccatgccattgccctcggcgtacgccttgaccacgcgatttgcggtctgcgggaacacataatcggagccaaccaagaacagcttcttgtagccttgctccttaaggtaatcaagcgcaggcacaatctgctggttcggtgcagcacccgagtagaagatgttcgggctggcttccatgccctcgtattgcagcgggtagaacagcagcgcgttatccgcctcgaacacaggcagcatggccttacgcgaagaggacgtccagccgccgaacaccgcggccacgcattccttttcgatgagggtcttggctttttcggcgaacacagccggctcggacttgccgtcctgctgcactaccttgagctgcttgcccagcacgccgccctttgcgttaatctcatcaacggccatgtgcagcgaatcactcaccgtctgttcggaaatggccatcgtgccagacagcgaattcacgaaaccgattttgatggtgttgcctgaggtgtccacacatgatgaggtgtcgcttgccgcagtcgcgttgttctcttgggcctctttctcggccacggtgcgaccccagccacaaccgctggtggcaagcactgcggcaacaatgcacaccgcagcacccatcttcagtctttgcaatcgagtcatatggctcttcctccccacatacgactacattccgcgaacgttgcccgcccgcggaatgtctacgctgattgccgtaccgtgccctgatgcctgatatcgtgctgaaccacttgccgtatatcgacggctggcttccggccgactgcactatacgatggcagtgcctgcgtgaatttccgttgcctgaatatttcatatgcgtctcatacataacgctcacgttacaaaatcaacggtgttacgcggcccgccgtcgaacgctgtttacattggtgtgcgatacgcgcgcgactgccgcccaagtgacttccccgcgaactacgggtaggctggggagtatggaacttcacgttttgaatcatccgctggtcgagcacaagctcaccgtgctgcgcgacaagaacaccccctcctccactttccgcgagctcgtctcggagcttgtgatgctcgaggcctatgaggccacccgcaacctgtccgtagttgccgcaccaatcgaaacaccggtcgctccgatgaccggtaagaagctggccaaaccgcgtccgatcattgtgccggtgctgcgtgcaggtctgggtatgctcgatggcatgacccgtcttatgccgaccgccgaagtcggcttccttggtatgaagcgcgacgaggaacaccccactcagcaggtcacctatgcgaaccgtctaccggaggacctgtccggtcgtcagtgcttcctgatcgacccgatgctcgccaccggtggcacgctggttgctgccacgcactatctggccgagcgcggtgccaaggacgtgaccgcgatcaacatcatcgcggcgcctgaaggcatcaagttcgtggaagagcacatcgatccgtccatcgacttcaaggtcgtagtgtgcgcggtcgacgagaagctcaacgacaagtgctacatcgtgccggggttgggcgatgccggcgaccgtctctatggcgtaattgactgattttcctggctcccctcagagaggggagccaatgtgatgggctttttatgcaaatcgacattattgcgccgggacgcgtgaaggaacgatatcttcgcgacgccatcgacgagtattccaagcgactttcgcgctactgcaggctcaacatcattgaagtggcagatgagaaaacgcctgaccacgcctccgaaggcgttgaccgacagatcaaggccaaagaaggcgaacgcatcgccaagcatctgaaggacggcgcgtttgttattgcccttgccatcaatggcaagcagctgtccagcgaagaattagccgccaaaatcaacgaccttggattgcgtggcaccagccatattcagctggtcatcggcggctcaatcggccttgacgacgcgattctgcgtcgtgctgattttctgctgagtttctcgaagatgacgttcccgcatcagctcatgcgcgtgattctgctggagcagatttatcgcgcttataagatcaacgctggcgagccatatcacaagtaaaacgccatacctcatggggcgggaaatcccccatggggcggtaattgccccatggggcggtaaaaccctcatggggcggtatgccaaaatggcttaattccgcggtttcacatattcttcaaaccgccccatgggcaagttaccgccccatgggcacatcaataacgccctcaacctcacactgcgtcggggacgaacgcttcgaagatgtggcggtcgaagtagggcgcgcactgggcgagttcatcgctgctgcgcacggtccatgaaaccggcatcgcacccatcgaacgagcgagcctgacttgcggcgaagcgccaccggtccagtcataggccacgaaatcaggacgagacagccagtcgaacgccagtaagccggcggcccattc

SEQ ID NO: 3545 - DNA, 4457 bp, Unknown
  R85_18m  MAG No. k141_18426
ccacgatcgagcagctgaggcgcgacctcaacgactacgtgtggcggtccgacaaccagcggctccactccacccccgcacaaacacccgaagagccattttcagcatttccatgtcccatgcattcgactacaccttggctgtaccctcatcaataactaatcgttgtagggccgcgatggacacaagcgatttgactgcagtgacactgctctaaatcgagagctccttctggtatttcccgacctcattcagtaaggcgagcggtatatggcattcggctcccggatgggatgcgagatagtgctgttgttcctcggaagactcctcaaatcgagtgagccgttcgatggtcacatcagcaaggtttcgctcatgaatggcggcttcgaatgcatccctctgttctgaatcagtccaatagaaaccgacatgctctgaaatgggtgttttttcatcggccggagtctcctgaatgagcagggcatgcaatctagccagtgtttgcagtgagacctgctgcgaatcgtaggcgacggccacagtctccacggcgccagcttcaccggaagcaatctgctcccctgtgggtcgcgggattctcgattgtgcgaatcccgcgactgtgcttgtcacaccttgcacccggtcatagtaggtctggacgccccaatagcatccccctgccagatagacggtgggcatatcatttctccaaatcagcatacatcggatagttgttataggtgaacgcagctttcttaatgtccttggaaccaactgccgtgatgttctgataccacaacggaatctgtggcaaatcgttcagcagaatctcttcggcttcctgatacttggcgttggcatcatcggtcgtgggggccgcggaaccttcggcgagaattttgtcgacattgtcattgtggtagtcgtattcgttgtatccgccatcggagctgaagcgcagcgtcagatagttttcgatgttcggatagtccggggcccaacccgactggtatggagtgggcagagtcttgtcgacggcggcggtgcgcagctccttctttgtcggatatgactgcggctgcacatcgacacccagattgtcctgcaactgatgcaagacggcttcaatccactgcttgtcactggaatcggcgttgtaggcgatgctcaatgttccatcccacggggagatggcatccgccttcttccagagttccttccccttctgtggattgtattcgaggatggtcttgttcttcagattatcggtgtatccggtgatggaaggcgccgaataatcaactgccttgacacgggtgccatagaagagcttcttgatgatcaggtctcgatcgatggacaggctgatggcctgacggcgaagtatgccttcctccccgctgaaatgcttcaggcgttcgggaatgctgatgccctgtgtctgggaaccggccgcggtgaacactttcacattcttattcttctgataggaagagtaggaggtggcgggaatctgatccagaagatcgaggttaccggcctgaacatcagcgtatgccgagtccaaggtcgtatagaaccggaagtcgatgccaccgttcttcgcggggaagttgcccttgtaatcgtcgttacgaatgaccttcgcgccctgtccatgcttccaggaaacgagcttataggcaccgttgccaatcggcttctcgccatacgctttagaatccttatagaatgcttccggaactggcaggaagctgacggaacccaattggctgggcagtgcggagtccggcgcgttcagattgatctggaatgtgtggtcatccttgacgaccagtcctgacagctgagcgtctgagggcgtgccttccttctgcagttcgtcgtatcccttgacgatggagaagtacgaggagttcagctgggcgttggtcacgttcgccgcatagctccaggccttggtgaacgactccgacgtgaccggcgtgccatccgtgaacttccaaccgtccttgatcttcactgtgaactgggttgcgtccgaattcggtgtgatgctttcggccacttcattcaccggcttgccggacgggtcataagcgaccagaccagcgaggatggcgctgagtatgcggtctccgccgacttcaccggtgttcatcggcaccaaggaaacctgcggttcggtgccgtttacgctgatgacagcgtttggacccgctgacgaatcgttggcggacgatgccgactgggtgctgccgcatgccgaaagcagcaggactggtgccagaatcgcggctatcttcttccatcgaaccatgaatcttctctcctgttaatgttcacttttcgataagaaacattattacctaatggaacagccaaggaaggcagattcgatatatcgatttcttataggacgttatcccctggttgatccgctgttgcgtatcccctgcacccaacgctgcagcgtggagcgcgggatgccgtactcctccctgatccgcgacgacagcttgccgttctcgtacgactgcacggtttgccgcttggactcctcctcgtaatgacgcggatgattctgatcggccgtgatgatcaactccttcgttgccctgtcccgcacgagaccgtccaatacattgcagccaatccatcgttatggcgattcgtctccttggctcttatcccctgtcccagtggtcacacgaccggtgtcgggtatcgacccgacagccgtgatacggcgtgagggccccgtgccgcgcatggtgttggttcatgcgtggcgcggggccctcttgtcggttcggcggcggttgggtccggtttattccggatcggtttccatggcgaacgcctcccatggtccgagtgttcccgtggttttcaggtttcctacgggatcgtccgtgttggcgatgaggatcgtgccgtcgggcatcgtttccagttctccggccggtgcggcctgtgtgggcgagaggttgatgacggtgaggatggttcgctcgtcgagggttctggtgaaggcgaggatccggtcgtttccggtttccacgcgtcggtagtcgccggcggcgacaacggggtcggtgtggcgcagggcgatgagccgtttgtggaacgagtacacggagtcggggtcgtcgatctcgtcggcggcgttgatttccgtgtggttcgggttgacggcgatccagggttcgaccggggcgtcggacatggtgaagccggcgtaggtggagtcgtcccattgcatcggggtgcgcgcgttgtccctgccgtatcgggcgagggatcgcatcatggtctccgatgtccgtatcccggtttcctcgacgcgttgatggtaggcgttgatggattcgaggtcgcggtactggtcgagcgaggtgaagtgcgcgttggtcatgccgagctcctcgccctggtagacgtacggggtgccgcggtgcatgtgcagcagcagcgcgagcgccttggcagagcgaatgcggccggtcttgctggtgtcgtcgccccaacgggagacgacacgcggctggtcgtggttgtcgaggaacaggctggcccagccgtgtcgggcgatggcgttctgttgttcggcgagcttggtttcgaggtcggccggcgcccatggtttgtcgtcccatttcgattcgggggtttggtcgacgcccatgtgttcgaacaggaagagcatgtcgagttcgccgttggcggggtcggtgatgtgctcgttgcgttcggcggtgatgccgggtgcctcgccgacggtgaggaagccgtcacgcccgtcgaacacctcgcggcgcatctcggcgaggaactcgtcctgacgcggaccatcggcgcagaacgggttcgggctggagtagccctcctcccccaccggcaggtcctggagctcggaaccggcctcgccgggaagcctgccgttggggtcggtgcgcttggagatcagggtgatgacgtccatgcggaagccgtcgatgccgcggtcaagccaccagttcatcatgtcgtacacggctcggcgcacggccgggttctcccagttgaggtccggctgcttcttcgagaactggtgcaggtagtactcgccgcgctccgggctgtactcccatgcggaaccgccaaagtaggagccccactgattgggctcggagccgggctcgccgggcgtggtgccgggacgagccggacgccaccaataccagtcggcgtgctcgtcgtctttgttcttggatgcttcaaaccaggcgtgttcatcggaagtgtgattgacaacaagatccatcacgatcttgagcccgcgcctgtgcgcttcggccagcagctcgtccatatcgtcgagcgtgccgaacagcgggtcgatgtcctgatagtcagagatgtcatagccgttgtcgtcttgcggggacctgtagaccggagagagccac

SEQ ID NO: 3546 - DNA, 5792 bp, Unknown
  R85_18m  MAG No. k141_18476
ccgctcaacgccgtgtgacgcgcagaaccagctttaccacaggccgcacgggtcggagaagccgccgccatcaccggtgccgccatcgttgttgccgttgccattgccgtaaccattccggccgttgccgttctggttgttctgcttattctggctgttaccgttggaatcggagctggacgaaccgttcaccgacgactcctcctgatcgagcgtcacgtccacatccatggtcttgccgtcgcgcacgatggtcagcgtcaccttgtctcccaaagccgcggcacgaacgtaaccaagcagcgagtagttgttgttcaccgcgttgccgttgaaggccacgatggtgtcgccctccttgaggccggccttgtcggccgggccgccggagacgaccgcgctgccagtggcgctggacttggtgatggtcgcgccgccgcgagtcacgccgtcggcttcaaccgtgtcggacttgatgaccacgccgagggcaacgtgcttgaccttgccgtccttgatgatttcgtcggccacacgcttgacgaggttggacgggatggcgaagccgatgccgatcgaacccgcggagtcggatgaggtggcggtcgaggcgatggacgagttgatgccgatcacctggccggccgcgttgaaggtcgggccgccggagttgccggggttgatggccgcgtcgatctggacggcgttggtgacgatctcgttgttgttatcgtcggtcacggtcaccgggcggttcagggcggagacgatgccggtggtggcggtgtcgtcgtagccgagcgggttgccgatggccatcacgttctcgccgacggcgagcttgtcggaatcggcgaatttcacggccttgaggtcgctcggcgggttgtcgagcttgatgaccgcaagatcggtggtggtgtcggtgccgacgagcgtggcggaatacatgttgccgttggcaagcgtcacctgaatctgctgggcaccggagatcacgtggttgttggtgatgatgtggccttcggtgtcgatgatggcgccggagcccttggcggtgccgttgctcaacgcggtctggatggagaccacggagccggagacatcgctggcgacagtctgccagtcgggggcttcgccgctcttggcggtggcggacccggagccggacttattcgagctgacgttggacagcgaattgctggtcggcaaggtgatcaggccgctggtgagggcgccgtaaccgaggcccaggcagagggccgcagccagaacggcggcgaccacggcgatgaggatgttgctcgccgtcttggacatgccctgcttggcggggccgggctgaccgggctgtcccggctgggccgggccttgaccgttcggcgtaccggtaccgggagtgccgaaaccgaacagaccgccctgctggggctgctggccattccggccattctgaccggactggctggcaaacgggttgccgttgttctgctgcggctgcgtgggcggattgaacggattgccgttgccctgcggctgcgggttattggtgtagtagggattgcggttgccctgctggccctgtggggtttgctgtgcaggctgaccgaacgggaattgctgcgtgggctgggcattgctgccggcctggccgccctgctggccctgtgcctgagtcggggtcggaccataagcgccatattccggggccggacgatacagcggagttgtggccgaggtctggcctgcggccggtgctgccggagaagccggcgaggaggagaccaccgtgctctcgcccttggcggaggcgtagtccgggatgggctcggtggcggcagtgtcggtagcggcttgcgtaggctgctgatcggcagcgagggcggccgaggaaaccggggcttgctgctcgctggaatcgctggcgttgccggcatcaaccgagtcgccacccacaaacgggttcttcggctcggcgttgccggtatcggcagtactattggggttttcgttattccgcggggtctggtcgacgccctgcgggttaaattcgtcagccattgctgctccttttcctaaattcctatcacgtctgttcggcggctattcgggcacttgcccattgccacttctcgtgtgctacctcagtagtaaaggcagtcaatctggaggttttctgaacgttgattgaaagtctatgcgtaatcatcgcagagtcttatgggcatctcggcttcgaggggctgatttcctgtttcgggaacatctacttgcacttcaaggggctgttcgcgcggtcaattccgagtatcaagggccctcatttaacgccattccgccatttttgcagccggcctacttgaccgggagccccttgaagcggaagtagacgttcgggagcggcgaaatccgcccctcgaaaccgagttcttcacaatttccggcccttttctggcccttctgcctaaagtgaacatatgacgatcagccttcttgaacatccgttgggcgcacagcccggacagcccggcgaccgcagcgccttccatttcgaaacgatcacccgcctgccatccacggccagcgggcttgggcgagacggtgcccgatacggccgcaccggcatcattcacacgccccacggcgatattcgcacgcctgccttcgtgccggtgggcacgcaagccacgatgaaggccgtgttgcccgagcagatgaaggatctaggcgcacagtgcctgctggccaacgccttccacctgttcgagcgcccgggcgaggacgtgctggacgcggccggcggcttggcgcgtttcatgaactgggatgggcccacgttcaccgattctggcggtttccaagtgatgtcgctgggcgtcggtttcaagaagacgctggcaatggacgtgaccggcatgaagtcggacgacatcatcgccaagggcaaggagcgcatggcctgggtggatgaggacggcgtgacgttcaagtcgcctttgaatggtgacgcacatcgtttctccgctgagatttcgatgggcatccagcacaaaatcggcgcagacatcatgttcgcgttcgacgaactcaccacgctgatgaacacccgctcctaccaggaggactcggtggagcgcaccttccgctgggcccgccgatgcgtggacgagcaccagcggctgacggctgagcggctgggcaagccctatcaggcgctgtatggcgtggtgcagggcgcgaattacgaggatctacgccggcgcgcggcctcgcagatcgcctcgctggacttcgacggcgtgggaatcggcggcgcaatcgagaagcgcatcattggagacacctgcgcgtggatctgcgacgcgatgccggagaaccgcccgcgccatgtgctgggcatcgcctccgtggacgatatcttcgcgtgcgtggagaacggcggcgacaccttcgactgcgtggcccccgcgcgctgcgcccgcaacggcgcgatctacacgcgcgccggccggtacaacatcaagcgcgcccagcataagttcgatttcgggccgctggaggagggatgcgactgctacacatgccagcattattcacgcgcgtacgtcgaccacctgctgcgcgcccgcgagttcaacgggtttacgttggccacgatccataacgagcatttcttcgtgaagctgctagacgacatccgcgcctcgatcgacggcggatactttgatgagttccgcgacgaagcgctggcccacttctacggcaacggcgagcgccggccagggttgtgagtttttctccttcgttgcggcttgtgccgaacttctctctgctcccctcgctgaggctgagacgttaagcaaacagcccagtgggctgtttgtagtcgaaggtgagacgatagtcgaaccagcaggttgcaggcaaggcccgtccttaattgcggacgagctgtcacgaagtgactgaggggagtgccgccaccctcaaagatcacggcgcccgcaggagacccacaagcgatatatccctgcctcccatgcgacacgccgaagattgcatgattacccagccgggtgtaagttagtcgattgtctgcgagtgtggcggaatggtagacgcgctgtcttcaggtggcagtgagtgtatgctcgtgggggttcaactccccccactcgcaccagcaactaaagggctggaatcggaaggttccagcccttttgctttgtccgggcaagcgccgtttttcaggggggctttaggacttgagacttatggcccaactttcgtggcggaaaatgtcccggtacctgcatcaatcgtttgacgttcaagccaggccagaatccgctgtcccggttcgcgatttcgggcgatctttgcaaaccgggacaatttttgttgccccggtataaatgtcaatcgatttatgcgaaaaccgggacaacgtgccaattccagaatcggccttattccgccgattccgtctgccagacgatatgagttgaggaaaccggagtgtcccggttcacgaaaacaagccgaaatcgccgaccgggacagcggattctgccccggtcgacaggtcaaacgattgacatatgaaccgggacaaatacagatcagagagaagcccatgaagcagatttaactttcctcaactttccatccgccataaactagcattacataacatcatgaaccgagacgaaaccaacgaagtatctggagtcaccgacgaccagctcggccgaacggccgagccgtacgaatccggcaactggcggggcggcgtcgggagcatcattcgcagcaatccgaaatcaggaaccgacacaagtcggacccagcagacacgcataatacgagttcacagactcggcgatgtattccgcaaccgcaccaccgaataccgcaccacggaagaactgtaagcattacgaaatcaaccttgattattgcgcgggcctatactaggttacggtagcgtaggttagtggtcggaagagcgtcgccggccatagcgaggtgatcagtatgagcgtttccatcagcacgccatctggacgaaccatggcttccgccgcaacagttgcgccttccgcaaccgcgagtcaaaaatccagcgcaagcgccaaccccaccgcactggaccgtgcatcggcccgatacagggccgcgcaatcgcgctaccgccaagccaaggccgcactgaaggcgatcaagcgccagatcgtccccgtggacgcattcggcatacgcaagccccgccttcgcggatggctgcacctcgccaccctgccgctgtgcatcgcggcgtccatcgtgctcatttgtatcgcgccggccggtcccgtcaaggcggcctgcgcagtgtacggcgcctcggccatgctgctgttcggcaacagcgcgctgctgcacgtcgtgccatggcgcagcgcgaaggtgactcgcgtgctgtgcggcatcgattattcgaacatcttcctcatcatcgccggcaccaacacacccgtgctgttcgcgctcagcccggcgattcgccggccatatctcacggtaatctggacgaccgcggcgattggcacgatactgcatatcgtctggctgcggacgccgaactgggtgttcaccaccgtatacgtcgtgttgggactggccccggtaacgcttattccgcagctctggacggctcccgcagtaggcccggcgccgaccgtgctcatcgcgtgcggaggcgccgcgtacatcgccggcgctgtatgcttcgcgctgcgcaagccgaaccc

SEQ ID NO: 3547 - DNA, 20466 bp, Unknown
  R85_18m  MAG No. k141_19278
ctgccggtagtggacaccatcgaatccgtggattccatcgaactggcggaaaagatcgcccgccgtgccaccatgcgcggcatcacggtcggcgtgttgctggaggtgaacgaatccggcgaggaatcgaagtccggctgtgcacccagccacgccatcgacttggcccagcgcatcggtgcgatgggcggactgcgcttgcagggattgatgaccattggcgcccatgtggatgatgagcgcacgattcgtgcgggcttcgcgcatctgcgccgcacgcgcgaccagattattgcctccggtgccgaaggcacggccgactgcaccgaactgtccatgggcatgacccatgacatgacctacgccatcgaagaaggctccaccatcgtgcgcgtcggcaccgccatcttcggcgagcgcgccttcatctgattggagctatacgaaaaaacgccgcttgatcaatagccaagcggcgtttttcgtaaggattttcggcgtatcaatcacgcatagatattgcgcggacgcatgtcctcgggcaggccgtcgagcagaatcgccacggaaccttcctcgaacacggagcgaatacccgcggccagcagcggtgcgcaagacagtacggtcatattcggcaggcgcttctcttcgggaatcggcacggtgtccataaacacgatttcatgcgcgccgcagtgagacaggcgctccacggccgggccggagagcaggccatgggtggcgaccagcgtcaccgacttggcgccggattcgttcagggtgcgcacggcttcgcagatagtaccggcggtatcgaccatgtcgtcgatgaccacgcagtcgcggccgtcgacatcgccgataatgccatgtgcctcggcatggttcggacgagtaatatcacgctgtttgtggatgaatgccagcggcagattgcctagcttggcggcccactgttcggacaccttgatacggccggcatccggggacacgatggtggtgttgcccagatcaagggtggaacgcacgtaatcgagcagcaccggcatggcggttagatgatcgaccggaccatcgaagaaaccctgctcctgagcggcgtgcagatcgaccgtcataatgcggtctgcaccggcggcgtggaacagatcgaaaatcagacgggcggtgatgggctcacgaccgcggtgcttcttatcctggcgcgagtagccgaggaagggcgccaccacggtaatcgacttggcggaggcgcgcttcaaagcgtcgatcatgatgagctgttccatgatccacttgttgatatcgcccgaatgacactgcagcacgaacacgtccgcaccacgcaccggttcggtgaaacgcacgtacatctcgccattggcaaagtcataggacgtggtttcgaggatttcggttcccaaacattcggccaccttctcagctagctcggggtaggcgcggcccgtgaccaatacgagtcgtttatccggagtgccttcaagaatcgccgacatgcgttcgcatcctttgtttgagtcgctgtgtgatttacgccttaaccagtgtacaagcaccccgccgcagcgaacgccacggcggggtgcctatttcgtaagagtgttgagattgccgaaattattcggagaactcgacactgaccttattgtctttgatggtgaaggtgccgtacaccgagaaagtgctggaatcgtcttccggttcccagccatcgctgtaacggtactcgtaattcgccgtcacatcaccttcgtcggtgctgaacgagctatccgacaggctcacgctggtgaccttcggataaccgtcaatcgtccacttgaagttgcggtatcggctggaattggaggtgtagtagccgaacgggcagccctgcggttccgcatcggtggaagccgcgcattcatccagcttgctcttcaccgccgtgtcgatttccgacgtcaacttgtccgtaggctgagcgtcaagagtgccgctatcggagctgttggtgctcagagacacggtcttggcggtgtaatagtcggacttcaccacgccaactttgtagacgccggggtacaccttgagccggtagttgccggtttcgtccgcgtcgttgttcacggcgttcttgggcgttacggtcacgccattgacggtgatgctgcccagcgagcttggcgcatataccgaaatggtcttgaccaacggttcggcgacggtccagttcttgaagatcaggaacttgctgccgttggccaccatcttgatggaatcgccggtgacctccttgccttcaagcgtgtacgtcagctgggcgctcacggtgccatcggcattgttggaagtctgcgagatgcgcgcgttggtgatgtgcgtgttctcgcccgaggatgccttgctggtcagcagtgcgcgctggttcgtatccacgtgaggatcggcgatggtgttggccttgtcgtagtcgccggaggagatggcggccacatagctgttcgccacgctcttcgcgctgaacacggcggaagacagcacgccatacacgataccgaacagtacgaggaagccggccacggcaccaacgatgatgaagatcttcttctgctgctcattcatggtggtggaggtcgcgccaggtgcggctaccggtgccgctccgggagtggtgggagccgcggttgcgaatgcggtgcccggagcaccgggggttgcaggagcggctggggcgcctggggcagcgggcgcgggtacgccgacaccggcaacaggaggctggccggcggacgtcggcgtggcgttgacgtgaggctgcgcagcgtttgcgcccgtacccacaccggcgctcggcgtgccccacgtgggccacttgccgaccattgcgccgctggcatagatgtagtcgaccaccggctgaggcgtagcacgcacagtgccgcctacaagcagtgcccgcagtcccggcatggaaaccaccatggtcgggccgaacgtcagcgcaacgacctcaaccaggaatgcccacaggcccatgaccaggaagtaccacatggcaggtccgatggtctgaacttgcgtgacggaggtgcggttgcccatagtacccatcagcagcgtggcaatcgcccagaacaccatgatggcgatcggggctttccagcagtgctgccagcccatgtaggcacggtcgtacaggttgcgtgcggagacgcgcaatgccgtgtagaaggtgaggaccaggaacacggcgaacaggatccaaataggccatacggtaacgctgaggttgatgctgaacaggctgagatcctgcggcagctgaccggactcggtcagtgtaatggcgccgaaggttccccaggtaaagaagaactcgccgatcatcagcagtgtgaccgggaacgtcagtatcaggattccctgacctgaggagaatgccacggcgaacagggccaccaggccgacgatgaagagcaaagccagctggaagctcaagacgctgaccaccgtgcgcgtgtatccgcgaacgcggtgtgcccactgccaagtagctccgaacacattcttggaatcggaagcatattgggccagtgcatagccggccagagcgccgagcgcggagagcaggtaggccataaagaacgtacgcactgtggcgccggtcaccttggccacgatggtggtgccactggcgagtggtgccgccgcgatggccgcaagcagcgtgatgaccacggccggcagcaatccggtgataaagccggagatcaggccggtgaacttgaatcgaatgctcttggaacggcccagcatgaatgcgccgaatgcggtgccgaccagcaatgccaagccggtgagccccagtgggtacgacatcatgttgctggcgtccatgctggaggatgagaggtcgacgatgtcgaaatgaataccgccagacaggcccatgaccaacgataggaacaggtagtggaagaagttcatgccgttgccggtgatgaacatgccgccaacggcttggttcagtgttgaatcggccccgaggctgggtgctgcggtgctcatggaattcattgcgattgcagggaaaatcgaaagcaccaaggcggctgccgtaccgatgccggccgcaatgccgatggtctgcatgttgggggcgccgaacagttccttgaccagtgggctggaagagatgggttgtgccggagcggcgggagccggcgatgggccgggctgccctgggttcggaatggccgtggtcggtgcggtgaatgccggtccgcctgcgggctgggcctgcggctgtgcagcgggctgaggcgtcggctgcacagccgctgcgccgggcaacggaatcgatggtgcgggagccgcgggctgtgcggtcgtgggaacggcgccggtgggttgaccgggcgtgggtgcggcgggcgtcgctgctgctggagctgacgccgcggcaagatggttgccgcaggaaccgcagaattgcgctccttcgcgcacagctgcgccacaattaggacagaacatatagtccccctttcttctgatgcttcttcgagcactatcgtacccgcaaaatcagcgccatgaccatagggcgaggctcgaaatggacaatactgggtgatggcgcgcgggcttggctgcgcgggcttggctgcgcgggcttggccaaaatggtgggcatcgcgaaaccggcaggaatatggccataccctgtcccgccttatatatagactgtccaagttgcccgaagatgcggtgccggtttggtgctgcgtcatgggctaacacgcatacacactcctgccacggaacgtccgtggccgaatagtccgaaggaggtgggtgatgtctgcgcacaagtacgaactgatgttcatcgccgatcctgagctggatgagcgcggtctgaagaagctgaccgagcagtatctggaactcgtcaccaaggaaggcggctctttcgatgagcccgattactggggccgtcgcaagctcgcctatgagattgccggtaagaccgaaggcaactacgtcgtggtgaagtacaccgccgagcccgctaccagcgatgagctcgaccgtgttctgaacctcaacgaatccgtgatccgtacgaagatccttcgtaagggctgaatcaagcgtttagtcagctgaacagctggtattcaaggtaagtaagaaggaccgttatggcaggcgaaaccgtcatcaccatcgtgggcaacctcactgcggaccccgagctgcgcactattggcagcggcgcgaccgtggcgagcttcacgattgcttccaccccgcgaacctggaatcgtcagaccaaccagttcgaggatggtcaggcgctgttcatgaggtgctcagcttggcgtgacctggccgaccactgcgcccagtccctgaagaagggcatgcgcgtgattgccaccggccgcctccagcagcgttcctatcaggcacaggatggttcccagcgaaccgtcgtggagatgcagctcgatgaaatcgggccctccctgcgctacgccaccgcacaggtgacccgccagtcgtccggtcagggcggcttccaaggtcgttccggtggtttccaggggggtcagcaacccaatcagggctatggcaaccagagtggccaaggtggttatgccggtggccagggcggttacaacggtggctatcagggtggtggcgctggatactcccagcagcctgccgctcccgccaacccgtccgctcctgcggccgacccgtggagcaatgccggtgcatctgatgccggtagcttctccacgttcggcgcttcctccgatttcggcggcggcgacgattccgacccggagttctgatcagtacttacctccccgctgccagcagcaatcaatatcaagatttataaggagaacatcatgtcacgtaagaggccgcaaccgccggtcaagccgttcaagaagaagccgaacccgctgaaggccgccaaggtcaccgagatcgattacaaggacgttgcgctgctgcgtaagttcatttccgatcgcggcaagatccgttcccgtcgtatcaccggcgtgaccgtgcaggagcagcgtgagctgtccaaggcgatcaagaacgcccgcgagatggccctgctgccgtacgccacttcgggtcgctgagttagggaggctttgaacaatggctgaaaccaaggttattctcaccaagaccgtgtccaacctgggccactccggtgacgttgtcgacgtgaaggccggctacgcccgcaactacctgttcccgcagggcctcgctttcgcgtggaccaagggtgctgaggctcagatcaccgctatgaagcgcgctcgtctggccaaggccgtcgccacccgcgaggacgccgtcgccgccaaggccgccatcgagggcaccaccgtcgagatcgccgccaaggtgtccgagtccggcaagctgttcggtggtatttccaacgaggctatcgccatcgctctgtccgacaaggctccggtgaacccgaagtccatcgaggtcgagaccatcaagaccaccggcgatttccccgccaaggtggccctccacccggagatcaccgcttccttcttcgtgaaggtcgtggccgagtgagtcattccggcctagtgctggaatcacacagaccaagagtctgagcttaagcatcatcccccgtgcggttcgcgccgcatgggggatttttgtattggtgtttaaaaacgctggaaataggcgcgacacgccgagagttgcatccgcttcaaatctgagtatatttaacacctgttgcaaggaacacttcaacatctaaccaagcccctgtagctcagttggttagagcagctgactcttaatcagcgtgtccagggttcgaatccctgcgggggcacagacaaccggaatcgaaagattccggttttttgttttttccagcatcagtccgtagctggtgcggaaaggccgtcttcgcgcgtgacggccggacgtgtaaggagcggcgtcatgtctcagatattcgcgttcaccgtatccgaccccgaaggcatgcacgcccgcccagctggccggttggttgccaaagcgcgggaatatgagtcgaacatcaccgttgcctacggcggcaaatccgtggatgccaagcgtatcttcggtgttatgggacttgatgttcaacaaggtgacgaggttacggttcgggtgcagggcaacgatgaagctgtcgctgccgcagagttcgagcgattcctcaaggagcacctgtaatgagaacgatacagggcgtcggcgtatccgctggcattgctatcggcacggtccgcgtgctcgccgccgccgatcatgctgtagaacgccgcgtaatcgacgatccgcaggctgagatggatcgattccgcgcggcccgtgacatggccgtcgctcagctcaggcgactgcgtgacaacgtcgccgctgagttcggcgaaaacaaggccgagctgttcgacgcccatcggcttatgctccaggacccggactatgcgggatgcgtcgaaggtttgattgcgcaagacaaggtgaacgccgaatttgcggtgaagagcgtcgccgaacagttcgccgccatgttcgctgcgatggatagctcgaccatgcaggctcgagccgctgatgtcgaggatgtttctcgccgcgtgatgaacgtgctgcaaggcaaacgcgatagcacggcgcaggatggcagtatacaaggcgatgctgtgcagaacggtactgtgcagaacggtactgtgcagaacgggattgcgcagaacggcgaaagccacatcatcttcgcccaagatcttgctcccagcgagaccgcgcagctcgaccgcgctaaggttttgggcctcgtgaccgccaagggctcagcgaactcgcacaccgcgattctggcgcgcacgatgggcctgcccgccatcaccggtatcggcgacgccttcgacccgactgatgacggtcacgttgccgtaatcgacggcgccagcggtgcggtgttcgtcgacccggacgaggccacgctgaccgagtgccagcgcaggaaggccgaagctgaggaacacctgagcctactacggaagctcaaaggcaagcccaccgaaaccaagtccggtcagcgggtccacctgtacgccaacatcagccgtccctctgacgtagccgccgtgctggccaacgatgctgagggcatcggcttgttccgcagtgagttcctgtatctggaacgcgaggactggccgaccgaggaatttcagttcgatgcatacagacaagtcgcacaggagatgggcgaccgtccggtcatcatccgcacactcgacatcggcgcggacaaacaggtcgactacttcaatctggaccacgaggataaccccgcgcttggttaccgggcaatccgcatctgcctgacccgcccggagattttcaaagtccagttacgcgcattgttgcgcgcctcagcatacggcaatatcgccattatgctgcccatgatcacctcggtgcaggaggtgcgcgacgccaagcggattcttgaagaagccaaaagcgagctgcgcggcgagcacaccgacttcaacgagagtatccagatcggcgtcatgatcgagacgcctgcgtcggtcatcatggccgacgagctggccgccgaagtcgatttcttctccatcggcaccaacgacctgacccagtacacgctggcctgtgaccgtcagaccccgagtctcgaacgctttgccgacccgcattcaccagctgtgctgcgcatgatccagatgactatcgaggctgcccatcgtcatggcatctggtgcggcatctgcggcgagcttggcgcagacctgagcctgaccgatacgttcctgtgcctaggaatcgacgaactgtccgtctcgcccaccagcgtcctacccctgcgcaacgtcattcgcaaccactgagagtcaaggtcgcttcggctgattccggtggctttctgggcattgcattcggctggacattcgacatcgcatcctgccggcatttcgtcgtggggcaaagtgtacaatcgccacgtttgctttcgcgcccagcgtaaatcgcgtcgccggctccgcgaacggatttccaatcacacagaatgccgtgaacagtcagccatgcctgttgcgcggcgaagagaaaagaagaagcagtggaatactctctctttaccaagctggccgccgagttcttcggcaccgccattctgatgatcttcggcaacggctccgtggccaacgtcgagctcaagaacaccaagggccaccacgccggctggctgaacatcgccatgggctatggcttcggcgtcatgttcccggtgctcatgttcggtggcgtatccggcgctcatatcaacccggccatgaccatcgcccaggccgtcaacggcctgttcccgtggagcgacgtgctgccgtacatcgtcgcccagctgctcggcgccctgcttggccagctcatcgtctacatcccttactacccgcactacccggagaccgaggacgccgaggcgattctgggcaccttctgcaccactgacgcggacaacaagaaggtcaactacttcctcaacgagatgttcggcacgctcgtgctggtgttcggcgcactgtgctgcctgacgctgccgtggggcaaggccgacgacgccgcatcctccatcgtggtcggcttcattgtgtggggcctcgtgacctccatgggtggcccgaccggccctggcctgaacccggcccgtgatctcatgccgcgactgctgcacgccatcctgccgattccgaacaagggtacgtcccgctggggcgaagcctggatcccggttgtggccccgattgtcggtgccattatcggtgtctggctgtacgtgttcttcttcgccagctgattcgttgattgattcatgcatgcaaatggcctccgctcgttttgggcggaggccattgtcgttgaatcaggtaaacgcagagactactgctccaggaacacctgcggggccttcatgaagttcgtggcgcagtgttcgccgcagaagtaatagggcttgccctcatactcgcgcgtgatcgcgtcggcattcaccgccacggtcatgccgcacaccgggtcggtggcggtttcgccgtcggtcggggtgacgtggtgcatgtgcattcccatatccatagtgttctccttgttggttggattattggattggtcagatgcgtgattggttggattcagcgtggtgcgatcgtcgatgatgacggttggctcgtgaggcgcgttggatgtggtggagccggtgatgttggcggcgttggctgattcggccgatccggctgattcgatatccgccgtgctgttgcccgagccagcggtgctatcggcagcacccacgttgatattcgccccatgcagcctgttcgcgttcagcaccaggcacaccgagctcaacgccatcgccagacccgcgatcatcgggctcaacagccagccggtgaacgggtagagtgcgccggcggccaccggaatgccgatgacgttgtagccgaacgcccaccccagattctcgcggatgttgcgcatcgtggcgttggacaggttgatggtcttgatgatgccgcgcaagtcgccgctcatcaaggtcacgtccgccgactgcatcgccacgtccgtgccggtgccgatggcgatgccgagatccgcctgggccagcgcgggggcgtcgttgatgccgtcgcccaccatcgcaatcagagtgcgggattgcgcggccgtgcgggaggcgccatccgcggacttggcggcggcctcgtcgcgttcgcgctgcagtttggcgatccagtaggccttgccgtccggcttgacctcgcagatcaccgtatcgatgccgacttcgcgggcgatgcgcccggctacctcggccttgtcgcccgatagcatcaccgtgcggatgccgcgtgcgcgcaacgccgcgatggcctcgcgcgagccttccttgactgtgtcctgctcgtagctcggcttgtcccagtcggcggccgcgtccaccacgccgcgcgtgatggtgccggtcttgtcgaacaccacggtgccgatgcgacgcgcctgttccagcgccttggcgctggtgaccagcacgccgttggtggcgcccaagcccagtgagaccgtcaccgacagcggcgtggccagtcccagcgcgcacgggcaggcgatgatcagcacgctgaccgcggtgaccagcgcatgcgccagttgcggcaccgggcccagtgacacccagatggcgaacgtccagatggcgatgatcatcaccgccggcacgaaataccgggcgatcttatcggccagctgctgcaccggcgccttggtcgcctgggcgcgggccaccatcgccgcgatctgcgagagtaccgtgtccgcgccgacctgggtggcgcgcatcacgcagtcgcccttgagcagcacggtggccccggtcaccggatcgccgacggttttggaaaccggcttggattcgccggtgatcatcgattcgtcgatatgcgcctcgccggccacgatgatgccgtctgtgggcacgcgctcgccgttcttgacgaccagcaggtcgccggtggcgatggcgtcgatgtcggtgtccgtgaaatacgccggattgcgccattcgatgtcgtccacattgtctgcggaagtggcgttgagtttgtgcgcggtgcgcgggcgcagtttgatgagcgactgcaccgccttgccggtgccttcgcgggccttggtttccagaaggcggccgaccagcaccagggtgatgaccacgccaaccgattcgaaatacggttcgcgcgagccttccgggaacacccacggggcgatgcaggtcaccagcgaatacaggtaggcggccgaagtgcccagtgagaccagcgagttcatgtcgggggagcgatgcgccaacgcggggaagccgaccgtgtggatcggacgcccgcagtagaacatcaccggcgtgatcaggatggcctgcaaccacgggttcaccatccaatgcggcaccagcgtgggattggccatatgcagcatggtgacggcgaataccggcaacgtcagtaccgcgcccacaatcaccagcttcgtcagcgccttgatctcattggcgcgttcagccgcctcccggcgctccccctccgccgcatccacggcggtaggtgccgtatacgaagcatcaggatgaggaaggggcgtgttctcatccgagccgtcctctccctcaaccctcaacaacccatgcaccatattcatgccgcacgcaaacggatactcgcccgccggcaacgccggcagtttcacgtcggtggtggcgttgcccggcagcatggcgtcaagtcccagatcagtaaacaccacatgcgaggtgcattcgccggtctcctgccggtcgaaggtcagtgtgatcggcgtacccgcacgcatgctcaccacggcgggggagtacccgcccttgacggtgatcgtcgcggattggcgttcgccggaagcgtccatggccccggccgttgccttctgcgttccgaagaagaaccgcaggaccagccatgtcaatgcggccgccactatcagcgccgtggcggtcgagaagatgctgaactccataactgttccttcccattcctaatgcactgaacaacagtgtataccctatacccctagagggtatatgatggggtgtgttcagctgacggataagtatcaggggggttgcgatgcatggttatgacgaagacaaggccaaggtcatcgcacgattacgccgtatcgaagggcaggtgcgcgccatcacacagatggtggaggatgacaaatactgcatcgatattctgacacagatttcggcgtcgaactcggcgctgaaatccgtggcgttattgctgctggacgatcatctcaaccattgcgtgcggcaggcgtcggtccagggcggcgaggtggccgatgaaaaacttgcggaggcttccgcggccatcgcacgtctcgtcaaatcgtgacgaattctgccgcatgatgacgcgcgctggcaaatcatggaaggacatccggcgttcgggtgtgacacagcgcaataacggttgatgctcgactgcgatgagtccaaatgtccaatgtgggctgctgagcatccgtttaacggcttgaaaccgtcgaattcggtaaaaatttaccgtcattcaccatcgatgacatactaggtaccatgtttgagcaaataggaaccgtgattatcgtcatcgtcgtgctagtggttggtgcagggcttggcctcttcgccggcttcgtgctggggcgccataagggtcaggagatggctcgaggcgtcaaaagcgaggagctggaggagaccaagacctcgctggagaatgcgcgattcgagaatgctgagctcagtgctcgcaatgctgccgcacaggctcagattgaaggcgtgaaccagcaattggctttcgccaagtcacaacttgcccaggcgcagcaggctgagcagattcgcattcagcaggaacgtgagcgtgcagctacggaggcggaacggaagcgtcaggcggatgctcaggccgccgaggccaagcgtgctgaacaggaagcacgtttgaaagaacagagcaaggtactcgaggcgcttgcgccagtggccaagaatcttgataccttgcagaacaaggtcacgcagatcgaagagggtcgcaagagggaaatgggcgcattgggagcccaactcaaggggctcaacgaccagcaggcccgtttggacaaggaaaccagttccctgtccgccgcattgcgcaacaacaaggtgcgtggcgcgtggggcgaggcccagctcaagaacattgtcgagtccgccggattgctggaacatgtcgatttcgacattcaggtggtggtcacggatgccgatggacgtacgttgcgcccggatatgatcgtgcatctgccgggaggcaagaccattccgattgatgccaaagtgccttatgccgattaccagcgtgcctgcgagatcccggacaccgccagccccgaggatattgcccgccgcgatgatttgctgcggtcccatgccaaggcgttgcgcgagcatgtacgtgctctcggcgaaaaggcctattggaatgcctttgatgtggcacccgattttgtggtggccttcatccccaatgaggcgctgttgcaggccgcgctcgaagccgaccccacactgatggatgatgcgttctctcgcaaagtggcgctcacctcgccggtcacgctgtgggccgtgctgaaatccgtggcctatgcctggcagcagcagtcgctcaccgatgacgccaagcagctgttcgatttgtcccgagaactttacgaacggttctccacgttgggtgattatgccatcaaattgggcacccagatcaccaagacagtcagcgcttacaacaagttcgcgtccagtttggaacgccgtgtgttgcccaccgctcgcaagctgcaaaaaatcgaaccgaccaagatcatcgaggaagtaccgattatcgaatcagacaaaggcaatgtgagcgaactgtccgcccctgaagtggtgccggccgatgaaggtgatactcatctgactgcctcaggcgatagtctggagtcatgactgaatctggattccgccccactggtaccccggacctcgccgtcgcgaagagccgcaatgactttgccatgctggagccgcgtgaacagctagccaccttgctgagggagcatgtggtgggccgtccgttctccgaacttgccgcggtgactttcgaccaccatgccgccaccgtcatgggccatgtactgattgacgctttggaagatgcgggctattcggttgatgacttcgatgctgttggtgccttgaccgcagcatctgtgcccatggtgtccgccatgatccaggccgccgcctctcgtggcgaggacctagacggattcgtgatggacttcgtctacccgtccatcaagggcccctccatcgaaggccgccgtgtggtgctgttggatgcttggctgtccgaaaagtcgtacgtgcagaccagctcgctggtcaccctgcgcaacggcaatgagctgagcctcgactttggcatagtggagcagctgggtgccaaggtcgtggccatcgcctcgctggtcggtggcggtgccaaagacatcaatgtggtcaacccctccaccggcgacgagcaaacgctccccttcatccaggtcttcgacgaatccgaactgcggtaaatccacctttgacttccctcgcataaagtcagccgggctgagccgcgaagttgactaagaggaaccggtgaatagcgttatcgaggagaaagattgcacgcacccaaccagatttctttggctgccaaagcttcaggtgaaccggaattccgtgaaatcggccttgggccgtggtctgagacccatcccggcgagcctcgtcccgacgatccgacttctccgaattatgacggtcgtttcgactcggtgctgttgaatgacggcgaccgccgcaacgtattggatcgttaccgctactggaccgtcgctgccattaaggccgatcttgacgctcgagggcgtcatgacttcgaagttgcggtggaaaactggacccacgatttcaacatcggttccatggtccgcaccgccaacgccttccaggccaagcgcgtacacattgtcggtccacataagtggaatcgcaagggcgcgttgatgaccgaactgtaccagcacgtcgaacaccacccctccatcgccgaactggtggaaagctggcatcatcgcatcgccggtgaaatcgcctatgaacgagccaaggccggtgccgccgccatccatgcgcatgatgtggctgtggatggagacaacaagcaccttcatgagctgctggccgaaatcgatgcttgtgatgcgcgcatcaaggagcttcaagccgcccgcgtcatcgccctcgatatcattcccggcgcagtgccgatggaaacctataccttccccaagcggtgcctgctgctcttcggtgcggaaggccccggattgagcgagaaggccctcgaattggccgacgatgtggtctacatctctcaattcggttccgtgcgctccattaatgcaggcgctgcggcggccgtggccatgcacgcatggattgcccaacacgccgtatcaggcgtgtagccatgcgccgacaatcctgccgcatctgcccaatatgggccacattagaggcatgatctacgccaccaaatccatcgccgcggcattaattcgcatttgccgccggcatcgtcggcatcctgctcgccgcaggcatcagcagctccgcgcagtccacactggccgaagccgttaaaccggactactggattcccgaatggtggcagtccggcctgattctcatcgcctgggctgccgccgcatggatcggcggtctcatcatcaccggaaaagcggatatcagatatcaaataacgcgggttactgctttggcggttctgccggttcggccatggtcctggcagtttgtcatggctatggctttggcggttctgcagtgaccatggttctggtgactctgaccccatggatttgaccaccgtggttcactgcgcttaaccagctcccatcactgttccagcatgaggtatgccggctgcccgcagcttattgagtaaaggatgttgttgcatcacctcctcataggtgaatcggacaatggtgtcgactttggcccggtacagtgccgtctcccgttctttctccgcctgaactgcaccacgaacacccttgcggtcattcatatccgggttcacatatttttcatagccatcgaattcgcccacgataagccgattctcaggtagccgccagaggaaatccacgcgatacagagcaccggtttgcgggtcggtgatgttttgttgcagttctggggctaataggccgcctgcgatgatggtgcctcgtccaagtgactcgccaccattctcactcgccggattggcataatgcagtaggcggaatatcggcgtgcaatcacgtcgcatagtgctgcacacattcagaatgtccgtgatggcgacgccgttgcgcagcgccgaatcgataatgggcagtgcaaatcggaagtcgacggacagcccgcaatccaccaccgttctggctttgctggtcaccgggagtccattggcatattctggcgtgctgcttgacgtgaagatgcgtttgacctttgcactgctggcgttggggcctcgtgatgttgtggcgagagtgatggtgccagcatgaagatgccattggtgttcaaaatcgtggatggccgctgccgtgaccccggcgaacacccaatccggatgtctgttatgaagagttcgtgcaatatgtctgatacgttcgtcgggttgcagcgaatcccagtattccgaagcggcgtacatgttggggaatacacgtttgagttcgcgcgcctgcacgcgccgagccagcgccgagcggtgtgccttggttgttccataagcgcactgttgcgttgcttcagccttcgtgatgagtatgtccactgctttgtgatgtttcatgattcgacggtatgccaatggtgaacacggtgtctatctgtctggggttatgtggttctagcttcggtgcctagatgtgtgtttttgcctgattatcaggcatctgaccgtattggactgattatgtggattcttttgggtgggtatgcaaaatgtggataactggcgaggggcgcagggcgattgtcgttcatatgttcgatgtaggtgtgtttgggctcattgtgagcttattagggtggccatgcagatacttcagtggggcacatttgcggttgggccgtggcgttgcctcgctgcggggcgtctcagcggggcgttttattggttggaccgcggttttgttttgctgggatggctgagcggggcgtttcatcggtcagctcgcggttttgctctgctgcgagtcgtctcagtaaggtgaacttgcggtccggcaacggttttgccccgccgaagaagccagcagcggggcaaatgctcgaccggcttgagcttctgattcgctgaagggctccagtaggcgggaaaatgaggcttcccgacaactgcgtgtcacatacggctcatatagttatggccatgccaacattttcacgtgaagaaatcgtgcatttgggcgatctggcccgaatcgcgctcaccgatgaggaaatcacccgtctgcagggcgaactgaacgtcatcgcagactccatcaacaaggtccaggaagtcgcctccgacgatgtgccgccgaccgccaacccggttcctctggaagcctacctgcgcccggacgtcgccgaaaccccgctcacgcaggaagaggcgctcgccggtggcccgaagaccgaggccggcatgttcgtggcaccgcgaatcctgggaagcgaggagtaatcgatgagcaacgaaaccgcaactctcgtcaaactgtctgctgccgagcaggccgctgccatcaagaagggcgacgtcacctctcgtgagctcgtcgaagcccacctcaaggtgatcgaagccgccgagccgtccatcaaggccttcctgaaggtttccggcgatgtggctctcgagcaggccgacgccttcgacgccaagtccgccgaagacaaggccgccctgcctgagctggctggtgtgccgatcgccatcaaggacatgatcgtcaccaagggcattgagaccaccgccgcctccaagatcctcgaaggctgggtgccgccgtacgacgccaccgtcatcgaaaagctcaaggccgccggcatgccgattctcggcaagaccaacctcgacgaattcgcccagggctcctccaccgagcactccgcctaccagaccacccacaacccgtgggataccgagcgcgtgcccggcggttccggtggcggctccgcctccgcagtcgccgcattcgaggcaccgattgccctcggcaccgacaccggtggctcgattcgccagcccggcgccctgaccggcaccgtgggcgtcaaacccacctacggcggcgtctcccgtttcggagccatcgccatggcctcctcgctcgaccagatcggcccggtctcccgcaccgtgctcgactccgcactgctgcaggagatcatcggtggccacgacaagcgtgactccacctccatccccgaaggcccgcgcccgatggtcgccgccgcccgcgaaggcgccaagcgcgatctgaagggtatgaaggtcggcctcatcaaggaactcggcggcgacggcttccagcccggcgtcgaggcccgcttcaacgaggccgtcgacaagctcaaggagatgggtgccgaggtcgttgaggtctcggttccgcacatcggctactcgctgggcgcctactacatcatcatgccgtccgaggtcagctccaacctggcccgttacgatggcatgcgctacggcctgcgcgtgatgccgccgaccggcgtgcctcagaccgccgccaacatgatggcctacacccgtgaggccggcttcggcgacgaggtcaagcgccgtatcatcctcggtacctacgccctgtccgccggctactacgacgcctggtacggttcggcccagaaggtccgcacgctgatcatccgggacttccacaacgccttcgagaaggccgacgtactcgtggcccccaccagcccgtccaccgccttcaagttcggcgagaagatggacgacccgctggccatgtacatgaacgacatcgccacgattccggccaaccttgccggtatgcccgccatgtccatcccggccggcctgtccgacgacggcctgcccgtcggcttccagttcatcgccccgcagcagcgcgacgaagtcatgtacaagccggcggcggccctggaagccgcgctggaggacggctggaacggcccgatctggaacgacctcaagaccccgtggcttgacggtctggacaagtgagcatcggaaggaaagaaacacatcatggctgaaaaactgatgaaatacgccgatgccaccaagaagtacgatgtggtcttcggtctggaaacccacgtggagctgtccacgaacaccaagctgttctgcccggcccacatcgagttcggcagcgagccgaacaccgagctgaccccggtgagccttggcctgccgggctccctgccggtgatcaacaagaccgccgtcgattacgcgatcaagctgggcctggccctgcactgcgaaatcgccgaatggagccagttcgcccgcaagaactacttctacccggacatgccgcgcgactaccaga

SEQ ID NO: 3548 - DNA, 4243 bp, Unknown
  R85_18m  MAG No. k141_19486
cagggcatcaagtgggtcaagaagctgaacctgccgggcaagggcgtatggaacattctgttcgccgtgctgtctgtcgcctcgctggtcatgctgtgcgtccagcccgaacagcgtctgctgtggtcgattctgaccaccgtgttcgccctgtgctacggcttggtcttcgtgattccaatcggcggcgccgatatgcccgtcgtcatctctgtgctcaacgcctgcaccggtacggctgtggccatgtccggtctggcgattgacaacgttgccctgatcgtggccggcgcactcgtcggttccgcaggtgtgaccctgtccatcctcatggctcaggccatgaaccgtccgctgctctccgtcttggccggtggcttcggcggtggtgctgacgtcgccgctgctggcgacggtccggaaggcaccatgaaggagaccacgccggacgatctggccgttcagctcgtctacgcgcagaaggtcatcttcgtgcccggcttcggtctggctcaggctcaggcccagcgcgagctcgctgaccttggcgaactgctcaagggccatggcgtggaagtctcctacgccattcacccggtcgcaggccgtatgcctggccacatgaacgtgctgctggccgaggccaacgtgccctacgaggagctcgtggatctcgatgagatcaacccgcagttcccgcaggccaacgtggctctggtcgtcggcgccaacgatgtgaccaacccggctgctcgccgtcctggcaccccggtttccggtatgccgattctcgacgtcgacaagtcccagaacgtcgtggtcatgaagcgtggccgcggcatgggctacgccggtatccagaacgaactctacttcgaggacaacacccagatgctgttcggtgacgcgaagaagagtctgcagtccgtcatcgccgccgtcaaggaactgctcgcgtaaccattcttggctcccctcacagaggggagccaagctctatatctactacagcccaaacacccgcttaacaaagccgttaacgcgacgccaatagcggtccggatcggtgctggcgctcatcgtgtggtcggcgccgggaatcagcagcttctcgcggtcgatgctggcgcaggcgttgtaattgatgtccagatacttcggattgacaaaagtatccgctccgccgtgaatgaacatcatcggaatagtcgcgtgccgtaatgccttcacacaggaggcgtcctcaaaccggtatccagccttgcgtttagacacatgactggccactttgaccagcagcacggccaacgagtgcggcaaacggaacatcgcctcggcattatccgtaaactgcgagaccacggaactgtatccgcaatcggaaatcgcggcgacgacgttgcgggggagtcgcgcatcgccggccgccatcatcaccgtggcggcgcccatcgaattgccatgcaacagaatgcgtgcatccggatcagctgcggtgatcagcgaaacccagcccaacagatcgtcgctttccagcaatcccatacccacgtaacgcccttcgctcaattcatgggcgcgctgcgcgggtagcaggaccgtaaaaccgagttgcgcatagcgatgcgcccatttggccatttccgcgggctctccggtatagccatggcagcagatcgcgtatagatgcggctgtgggtcggaacaatccgggtccaacagccagccgtggagtttcaatccatcatggctgcgcagcgtgaccgattgcttggcctcctcgaaccaccggccggcctcaagctgctcggacatgtcgaattcgatgcctttcggcgtctcctcgtgcggcatgttgaacatcgaacgtttggccttggtgtccagcgcgaacatgaacatgacgttggcggccgcggctgtgacgccggctcctgtggcggctatcgcggcaagtgccgcagccatgcccctgacaacgcgagtgtgtgcggcgatgacgtcatggccatcctcattgatgacgtcgtccgaacgagtcatatcaacctcccgatatggtactcaccatcgtacgttattatcgaaatcatccccaacttcgtgaaagaccgtacactgagtgtcgctgagcgtacgtttttcacgaaatggcgaacgatttcgtgaaaaccgtatgatgagaacgggtaagcgtacgttcttcacaaagttagggattatttcgcggaaaccgtacgttgacgtagctgggacggcctatatgcagtgtcatcgaagcatcattacgcaaagtccggggttggcgtatacttgacaattgttgctttggcgagggaagtgtgcatgctgacacatgacacagattccgttatcgactcggcgtatttcactccttgtagggtgtctttcggcgcgtcgtggcgtctgagcgagacagtacgaaacgaagatacaaggagtatccattatggctaccaccattaagcttgagggcgaggcccgttccgagttcggcaagggcgttgctcgtcgtctgcgcgttgccaacaagattccggccaccatctacgccggcggcgaagagcccgccttcgtgaccttgccgatgcgcgagaccaccctggccctgcgtcacaccaacgccctgttcaccatcgccttcgacggcaacaccaagatggccgtcgtcaaggacgtgcagaagaacccggtcaagcgcatcatcgagcacatcgacttcctcgaggtcaaggccggcgagaagatcgacgtcgaggtgccggtgttcgtggaaggcaccccgaagggtgctgccgtggcgttcgtcgacattcaggagctcaaggtccgcgccgacgtcaccaacctgcccgagaagatcgtggtcagcgtcgaaggcctgaccgacggcaccaaggtgttcgccaaggatgtcgtcctgcctgagggcgtcgagctggacgtcgaggatccggaagagtccgtcgtcaccgtcgaggtgccggaggatgccaccgagtccaccaccgctccggaagctgctgccgccccggctgacgccgccgctgctccggctgccgacgccaagtgagtcggtcgcttcgatagcgaacaattcagaacataactgaaacgtggaagcccgcagccgttgagaacggtgtgggcttcttcgttttttcaccatgtgaactctgccacacgagtaacacatgggtgtgcaaaagtatgcaacagagttcgcgccacaagcgcacagcacacaccccatatggtggctttcgggccgccaaagtcaagaagaagtagctagtgatgactgaaaacacgcaccacgatccggcagcactcgacaagctcaccgaaccgttcaccgtactgccgaacgacaaccccgcatccgatgagaagcgccagtccctcatcgacaagccggctttcggccaggtgttctccgacaacatgacccacatgacttggaccaagggcgaaggctggtccgaccgccgcgtcgaaccgtacgcaccgctcaagatggacccgggtgcttccgtgctgcactacgcacaggagtgcttcgagggcctcaaggcttaccgtcatgccgacggctccacctggctgttccgcccggatgcgaacgccgagcgtttccagaactccgccaagcgtctgtacctgcctgagctgccgattgacgacttcctcggttccgtggccgcgctggtcaagcgcgacgccaactgggtgccgtcccgccgcgagtacacgctgtacatgcgtccgttcatgttcgcttccgagccgttcctcggcgtgcgcgccccgcaggaggtcgactactgcgtgatcgcctctccgtccggcccgtacttcccgggcggcgtcaagccggtgagcatctgggttgaagacaagtggttccgcaccggccctggcggcactggtttcgccaagtgcggcggcaactacgccgcctccctgctcggcgagtacaagggtgttgagaatggctgcgagcaggtgtgctttgtggacgccgccaccaagacctaccttgaagagctcggtggcatgaacatgatggccgtgcacaaggatggccacgtggagaccccgtccctgaccggcaacattctgccgggcgtgacccgtcgctctctgattcagctgctgcaggacaagggccacgacgtagtcgagaccatgatcgccctcgaccagctgctcgaggacatca

SEQ ID NO: 3549 - DNA, 13941 bp, Unknown
  R85_18m  MAG No. k141_10568
aacgcgacgatcgggcgatgaatcgacgtccaataatcgccgggatgcgaagtgtgcgcacacatgacgatgccgtccatcatgtgccgacgcaacatgtcgacatactggatttcgccatccgtctcatctgcggtagagcacagcatagtgcgtaatccttgcgcagcgagcgcatgctgcgtgcggtaaacgttgcaaagaacgggtggcggatggtgggcacgatgacgccgaccagattcgtacgatcatgatacagattgcgggcaagctcgttcggcacataattgagcagttgcatggctttgcgcacacgttcgcgcatgtcatcagacacgtacccgttgccgttcaccaccagcgagacggtgctcagagacaccccggccttcttcgccacatcgcgcatgccgaccatgatcgcaccttccccgtcatcactgttctatcgccgtattctcacgtgcttaccgctaatattacattcatttacatgctctcgaacctgttcgacagtccggcaacgaaatacagcttcttagtgtcgactcccgcggaggcgagggccttcagcagcggcttggtctggtcgaatgcaatcaccagcgttgcatccggactggcggccttgatggcggttgcgctcagatttctttcacgttactcagcgaccgtccgtgtaacgtgaaaattacgccggattggcaagcagcgcaatgccgaaaccggcggccacgcaaatgagaggcaccgcgacggttgctattccatagcccagagccagcgtaaaacgacgctggcgaatcaatgaaaccacttcgttgagcgccgtggagaatgttgagaaaccaccgagaaatccgacaacgaacatcatgaccgtgtccatatccaccgattgcgaatagtaggacatcatggcgatgcccgcgcatagcgaggcgacgccgttgatgacgagcgtggatagcgggaagttgcggttcgttcttcgattctcgcggttccagccttgttgaattgacacgtcgagcacgtaacgggccatggctcccagaccgccgaacagacagatcatccacatcatcagcgcacctccccggtagtcgggtcggcgacaagcgaaatctccgcagtgatcggtttgggctcgaagctgggtggaagcgggttggccggctgctggattggctgcgactgctgaatctcgggcagctgccccaagtctggagtatccggctcgcgcagcaacggatgcgccggctgcgtcagctgaggaacggccagcggaggaatctgcggaacgcggcctgtctgcataggctggctggcggtcggcggcacggttggtgtttcgactcgcggaacctgtcccgtctgtgcaatctgctgggccgtctgcgcggcttccattgcggcctgcgcggcagaacgcgccacgtcggccactttcacatggcgtacgccctgcgtgtccgattcggcagaatcggacacggaaacagctgaaaacgcaccccgaacccgctttcgagtactccgtgacagcagtgcctgcatcagaaccacgccggcggcggcagtgagcaaaccgcctgcaaaatttcccgcaagatagccaagcgcactggcgatatgccgctcgtgcagaccttccaccgtttccagcatcacgccggacatcgtcgaaagcccgccgagcaagccgagcccaacgccacggctgacaacctgccgcacccggcgacgcagccacgaagcggtcgccatgaattcggtcagcatcgcgaacaggaagcaggcgaccatattcgacacaaacgtgcccacaacgaatggcgtcccgctgaccgacggcaggagcatatccaacgcatgccgacagccgactccaacaaatccaccgacgaacaccacaacatacatcagtccgtcggcgagcggattgaaccgcgcctgcatacgtttcatcggcgccaggggaatcgtaggcggatccatggtgttagcggcgggcgcggttgcaccagcatgcgtcacctcaacagcgtcgattgcctgcgtgatgggatgcgagtcctcacccgcagtcaccacgtctcccggcgattgttcttgcgattccattgcgctccccctgtactggccttccgcggacagcgttgttccgcccataggccgtgcaacaacgagctgggccgcggttgccaccttcctaacgcatatgagtttacacggagcgccaacgtatgcaccctggatgtccgattccgcagattcgtacatccagagtccagccgaattcagccaggctcagtcaagccgggcatcacacagccgccgcatcgcaggtcgcacctcgcgctcctcctcgccactgaacagcaccaccagatagtcgccggcacgcagccgtgtatcgccgcgcggcacgatctcgctttcgccgcgacgcaggccgatgatcaggcacccagacggccaacgcacgtcacgcacccgcttgccgtccgcaatcgctcccatttccaatggcagttccataatgccgctgcccacatggcttgcgatcgccatctgcatgccttgcgcgcgcacgtaccgctccagcaactccccataaatcggtttggtgcgcagcaaatcggacaccaacagcgcgatgaaagcgacggccgcgaccggcagcatgtgcgtcaacgttccagacatctccacagccaacagaatcgacgtgatcggcgttttcacggacgcggcgagcgtgcccgtcatcacgcacaccgcaaacaccgccactgcgtcggatggcagatcaccgaatcgatgcaacacttcaccgcagatgccgccggccaacgaaccgaccgcaagaatcggcatgaaaataccgccaggcgcgcctgagccgaaactcgtagatgtgaacagcatcttcgccacgaacagcagacacagcattcccaagccgacgcgcgcatgttcggcggtatcaatcagattcgagccgccgccgagcacatcgggcaaccagatgccgacaggcaacgcgatcgcaatcgcaatcatcgggcggctccatgccggcagtttgccgtacagcgtctggaagccaagcaacgagcggttcatcagcgaaccaaccaaaccggccaccaatcccaacggaatcagccacacatactcttccaacgacagctgaccgatatcaccgaaatccaaaaccggacgcagaccgaaacagtattttgagacgaaatcggcggtcagcgatgcggcggtggcgcccatcagaatcgcaggggaaaaactccgatgcaccccttccaaagcgaacatcatgccggacagcggcgcgctgaacgcggcggacaagccggccgcggcaccggcggtgaccagataatgctcctgcatgtcctcacggcggcggccgcgcaaacggtgggatacacactgcgcgcccgacgcaccaatctgaatggacggcccctcacggccgagcgacagaccaaacaacgcgcccaacagtccaccgacgaaacggactggcagaatcgtctgccaacgcatcttcaagccgcatatcaccacgccgttggtctgcgggatgccgctgccaccagccatcggctccttgccgaccatccacgcgattgccagcgcggccgccaccgcggcaaccgcccacggcgcaatcagccacggggtctcgcgaatccgcgcatatatccaacgggacgcatccgtgccgtattcgatgccgagacggtatacgacaaccagcaatcctgaaaccagaccaatgactatgccggccgccgccatcttccacttcaagtggtcgaatcgcggaatcagccggcggatatcatgtgccgcgtcgttaccagtcaagccgggaaattcgttgcagacggtcagtcgaccagcgaattgatctggatgacatggtcgcgctgcggaccggtgccgatcgcggagatacggcagccgctcagctcttccaaacgcttgacgtaggcctggcaggtggcgggcagctcgtcgaaggagtggcagtcggagatgtcttcgtcccagccgggcatggtctcgtaaatcggcttggcggcggcgaaagcggcctgatcggtcggcatatcgtcgtgacgttcgccgtccacgtcgtaggccacgcagatcggaatctccttcaggccggtgagcacgtcgagcttggtgagcacgatgtcggtcaggccattgacctgggaggcgtaacggttgacgaccgcatcgaaccagccgcaacgacgcggacgaccggtggtcacgccaaatacgtgaccctgctgacgcagccattcgccggactcgtccagcagttcggtggggaatgggccttcgcccacgcgggtgacgtaggccttggagacgccgattacgcgggtgatcttggtggggcccacgccggtgccggtgcaggcgccgccggcggtcgggttggaagaggtgacgaacgggtaggtgccgtgatccacgtcaagcatggtggcctgagcgccttcgaacagcacggtcttgccttcgtcaagcgccttgttgagaatcaggccggtgttggccacgtacggcttgaggcgttcgccgagcttcagcagctcctcggtggtctggtccacgtcgatcggacgacggttgtagagcttgaccagcatctggttcttctggtgcaggctggcctccaccttgtcgtgcagatggtcggcgttgaacaggtcatgcacgcggatgccgacacggttgatcttgtccgcgtaggctgggccgatgccacggccggtggtgccgatcttgtgcttgccaaggaagcgttcagtcaccttgtcgagtgtgcggtggtagggcgcgatgatgtgtgcggcctcgctcaccttgaggtgggagcaatcgatgccgcgggattccaagccgtcgatctcctcgaagagcacttccgggtccacgaccacgccgttgccgatcaccggggtcaggttcgggttgatgatgccggagggcagcaggtgcagggcgtacgactcgtcaccgaccaccacgctatggcccgcgttgttgccgccgttgaagcgcgcgacgtaatcgaccttggtgccgatcagatcggtagccttgcctttaccctcgtcgccccactgagcaccgataagaacaattccaggcatgatgcacctccgcattcgcacgattccgccggaaacagactaccttacaccctctactcggggcgcggccatctcacgcaatcgggcttctggtgtctttgccgcgcgttgcgcgaggcgggccgacaccaaggcgccgccacggcgaatgacagtttatttgggtgttatctgagtgctttgccggccgagccgagttgcttgcatgcctcagccacgcgggcggacatggattcctcggccttgcggccccaggaacgcggatcgtagaacttcttttcgcccacttcaccgtcgatcttgaggaccttgtcatagttctcgaacacatggtcggcaatcgggcgcgtgaacgagtattgcgtgtcggtgtcgatgttcatcttgatcacgccatggctcacggcttctgcaatctcttccggacgggagcccgaaccgccgtggaacaccaattcgaacggcttgccgttgggaaagtcgactatgccggcggcgctgggcagctcaccctcgaccaccgcgcgcgccacacgggactgaatatcaccgagcagggcgggacgcagcttgaccacgccgggcttgtaggagccgtgcacattaccgaacgtgaaggcggccatgtatcggccacgctcgcccaaaccaaggcgacgggccacttcaaggccatcggccggcgtggaatagaggcgttcgtcgattttggcggaatagccgtcttcctcgccgccgaccgcgccgatctcgatctccagcaccgtgtgcgcggcctgcgacttatcgagcagctcctcggcgatgtccagattttccttgagcgacacggtggagccgtcccacatatgcgactggaatgtgggctcctgaccatgcgccacctgatcggcctcatgtgcgagcagcggttgcacccattcgtccagatactgcttggcgcagtgatcggtgtgcagggcgatggtgatgttcgggtacttcgcggcgacctcgtgtgcaaaagcggccaaggccagcgatccggtgacacggtcgttgacgccgatgccggaaaggtatgcggctgcgccgacggacacctggatgatgccgtcggattcggcatccgcgaaccccttcagcgcggcgttcagcgtctgcgagctggtcacgttgatggcagggtaagcgtagccgccgcgtcgtgcggcgtctagcatttcggcataacgttccggtgttgcgattgtcatggcttcattatcgctcggggtgtgcccgccagactaggttctggagccaggcgagctgtgaactatctcacgaggaacaccatgatgataatcatggcgaagccgaccaaatcggtcggggtaaagaccgcgccggcgaataggacaccggtgatagtggcggttacgggttcactggtgccgagcatggtggcgcgcattgcaccgcagcgctgggtgccgccgaggaatagccaataggcaccgaatgtgccgaacaccacggtgaataccatcagaccaatgccgaaccagtccaacgcgggggcggtggtccacgggcgcacgagcggcagcagcattaggccggaaacgatgaacatgacgccgctggccatgaagttgccccatttggccattaatgcgatgggcagaatcgcaagcagtgacgtgcatacggcatcggtcaggccccacagcagaccgggcagcggcagactgagctggctgagatcgccgcctgtggcgatgagcaccgtgcccacaaaagcgagtaccacaccgatgctttcgcgtttgccgggcagccgtttgcccataatacatacgaatacgagtacaaccagcagattgagcgtctgcagcactgtggccgtgccggaattggtccagtcaatggccttcaagtaggagacctgcaccatgagcacgcagaagaacgcgcacagcaggagtctcgggtaggaacggtagtccttaagcgagttgatgaacttgtcaggcgtgaagattcctgcgcaaaccagaaagatgacaccggccaatagctcgcgcacgcaggcgatccacagcggatcggcgtgatagtcgttcatcaggagtttggagacggtggcgttgacgccccagaagacgcctccggcgagcgccagtccggcaccgacgaagatgtcgtgcggggtgcgttcgagggttggcgttggttggccattggttgcagcggtcttgggttcacacatcgcccatcacgatacgcggacgacgtgaattgttctcatatagcggtcatacggcaggaaaataagctctcaaaagagggaaaaccgttgaaatttcaaggaaaatcgatggagcggacgacgggagtcgaacccgcctctaaagcttgggaagctttcattctaccgatgaactacgtccgcatgtgcgcttccacgcacgagaggcaagtgtatcacctatgcggcaccttgcgccatgtgccggtttgagttctgtgctggactagtgaattgcgcgcgtggaatacgtggatgcggccaccggagtgccgttcatttcattggccatttgcatcaggcgtgcgatgcgctgatcagtcggcggatgcgtggagaacagtttggagaaaccgaccgcggagaacggattggcaatcatcatcgcggagacggactgggtgccggccgttttgcgcatgggcgtggtctgggcaccataggagatcttgttgagcgcggaggccagggcctcggggtcgccggtcagcagactgccgtcttcgtcggcgtcgtattcgcgagtacgggagatggccatctgaatcagtgatgcggcaatcggcgcgagaatcacgctgaggagcacgccgatcaagccgagaccgcctgaattatcgcggtcgtcgcgcgagttgccgccgccgaaatacatcagagaataaccgaggtacgtgatgacggtggccatggcagaggcgatggcggaggtcagaatgtcgcggttgtacacgtgcatcagttcatgacccagcacgccgcgcaactcgcgggcgttcagaatctgcaggatgccctgcgtgcagcagacagccgcatgccgttcgttgcgtccggtggcgaaggcgttcgggctcatggtgggggcgatgtagatgcgcggcatcggcttgccggccttggcactcagctcgcgcacgatctggtagatttcgggggcttcctgctcgctgacctccctggctcccatggatgcgatggcgagtttgtcggagaaccagtatgagccgaacgtggtggccaacccgataatgacgtagatgcccagcgtctgctgcctgccgcccgtggcccaccatatcagcatgatgatggcccacatcaaggcgaacagcagcgtagtcttcaggccgttgaaatggccgtgcacccgtactttggcatccatgaggctcacactaaaatcactgcctgaatattggctggatgtgcgccgaggggtgaatcggatgggggttggcggtgcttacggtgcggttggcggggatcggaatagcctgtttacatgagattgacgatgcttgacagtgcggttgcttggcctgttttaccgctttaccgctttaccgattggtctgatcgggacgctttgcttgtttggcctgctttggctgcttggatcgtttggcccatcggcctgctcgactggcatgacactggcttttatataaataagaacgctggcgtataaccggcgttcttatttatcgatgtatcaatcgcgccgattgctgctggtgcagttgccggtgcgatgagctgatagtcaatcaggccagagcgagctcacgcatctggtcgggctcgatgaccttcttgtgctcgcggccctccttggcgccttcggcgcgctcgaaggcgtcgaccttcttccagccagcgaagtcaatcggcttgacgccgcggctttccagcagtcggtcgatggattcggggtcacgatcctcggccacgcgaccaccttcggcggccttggccagatcctcaagcatgttggtcacgatggcaagtgcgtcggacttggtggagccgatcaggcccaccgggccgcgcttggcccagccagtggcgtacagacggtcgcgcacttcgccgccgtccgcttcggtggtgatgcggccatcgccattggcgttggccaggtgagcgccgtgctcgtcgtaggtgatgccgggagcctcggccggcttgtagccgatggcgtggtagacggcctcaaccgggtagtcggtgaactcgccggtgcggctcatcttgccgtcggcaccggtttcggtgcgctccacgcggatggccttgaccttgccgtcctcgccgaggatttccgtgggtgcggagttgaagtgcacgtagtacttgcggtcggccggattgccttcgaagtcgacgtcgccgtcatcttccatgtcctcggccatctcgcggatggcgaacagttcctcgaccatctggcgggtgagcttgtccttgccggccacctcgatggtctcgtcgtccaaatcgaagtcgtcctcattgatgatgagctgcacgccgggcagcttctccatctcgcgcagttcctgcacgctgaacttggcctgggccacgccacgacggatgaacaggtggagcaccttggccttgttctggccgatgccctcgtacacgttgtccggaatgtcggtcttggccttgaggtcgtcggcgttgcgcatgagttcgcgggccacgtccatggccacgttgccgccgccgatcacggcgacgttctcggccgtaagcggccattcgcgggcaccggtggggtaaccgtcataccattcgacgaacttggcggcaccgtacacaccttcaaggtcggcaccgggcaggttcagcggcttgtccttgaccgcgcgggtggcgaacagcacggcatcgtagcgggcaagcaaatcatcaagggtcacgtctttgccgaattccacgtcgcagtagaggtggatgtccgggttgtcgagcgtcttctcaagcgcggaggcgatgaacttgatggacgggtggtccggggccacaccgtaacgcaccaggccgaagggcacgggcagcttctcgaacaggtcgatgcgggccttggtgccgaggccgagttcttcgcccagtttcttgagctggcgcaggaagatgtcggaggaatagacgccggccgggccagcgccgattacagcaatacgaagttcagtgttcacagattcagtcacgcgttacaggttatcgcaaagccttccgttgcaacaggggtgagtggtgggaatcctgtgcctaataccctctgccagcctcacgccagcggggcaaaaccacgagtcgatcaagaaattgccccactcacagaccgccagcggagcaaaatcgcgagtaacccgaaaaattgctccgcttacagcccatcagcggagcgaaactgcgactaacccgccaaggcaccccgctgaacacccaccagcgcagcaaaaccactattagaccgtaaaatcaccccactcgcagaccacgagtggagcaaaacccctattagcccacagaatcgccccgcttacagaccgtcagcggggcaaaaccgcgactcagtcgaggagataccccgcctagtcgcggtcgatgagggcagtgagggcccagaggatgctgatcacgtcgatggcctcttggaggaaagcgccgacgatcactggaatgaggttgaaggcggcggcaatcatgccgatggtggcgagtacgagaccagcgatcacggcctgcagcatcacgcgcttggtacggcgtgcaatggcgatagcgcgcggcacagcggcaatatcgtcattcataatgaccacttgggcgctttcggaagcagcagtggaagtgccgtcggtcatggccacgccgatatcggcgacggcaagtaccggggcatcgttcacgccgtcgccgaccatcatcgtgaccggcttgcggattgcggcggcgcggctgcatcgagaacgcgacggttgagaaccatcggaccggatgccatctacggcatcggacacagggctggcggcgtgattcgcgcgcccggccggcgcggcgcttgcctccgtggcagccttgacggcggcaaccttgtcttcggggaacagctcggcgtggacctcgtcgatgccgacttcgtccgcgatgatttcggccgaggcgtgattatcgccggtaagcatggcaagcttggtaacacccagttcgtgcagattggcgagcgcggttttggtgttggcgcgaggtacatctcgcagcacgatgcgggcgatcagttgcccgtcaacggacacgtaggaggccatttcgtccggctgtagcataccgaatcgcgtacgcagcgtttccttttccttagtgttcccggcaatcgtacggccagatcctgcctcagtatccccgcccagaggggactgtccgtgaagcgggctgaggaggtcggccgcctcctgccgtgggccatccgcccggcttacacccgctacctcggcagtcaagaacccatcctccccggctgcagcgaacgacagtcgcccgacgcggacggcatggccgttcacctcgccggacacgcccttgccggagtcctcattaatattcttgacgaccggatattcgcggccgtggccgggccagctggcctctggttcggggcagagacgctggccgtccgcgaaacgctgacgcaagcgggccatcgcgtcggcaccggctttggcgatgcccttcgacaggatgtgtacggaatagctctctacaacgccggccatcatcagcacatggtcctcattaagacgggtctcagctccaggcagcatctcaacgcgcaccacttgcggctgcttgacggtgagcgtaccggttttgtcgaagaacacctgggtgacgcggccaaggttttcgagcacatcctgcgccttgatgagcacaccggcggcggcgagacggccagtaccggcgatgtatgccacgggcgcggcgataagcagtggacagggcgtagccagcactaacacctgggcgaaccgcgtcggtatgccggacaccgcccaggcgacgcccgctattaccagcgacagcacagtgaacggaacggccaatcggtcggcggttttcaccacggccggacgggactcctgtgcggaagcgacgagttcgaggatgcgctggtactgggaatcggcggccacctgggtggcgcgcatggtcaaggcagtggaaccgttcactgcgccagacatcactcgggcaccggcgaacacctcgcgcggcaccggctcgccattgatgttgctcagatcgagcgtggccgagccggaaagcagttcgccgtcgaccggcacggtttcgcccggcaacaccatgagcacatcgccgagcttcacctgctcgaccggcaccgtgtcgaagcggtgcgtggcggcctcagccggccagctcccctcagtctcgctccgcgagtcagctcccctcgacggcggtacttggttcccctctccaaggggagctgtcggcgaagtcgactgaggggaggacgtcgccggaaccgagcctacacgccggaagccatcggacgaatcgtccttatcagcggcagccccacaccccacgccaggcaagttgacgacgtgcgcagtttgcggtgctgcctgcatcaatgcggtcaaactgtgctcggccttggcctgcgcgtattcctcaatggcctcgccggacgtaatcatcagcatgaccgcccagcttgcccagtactcgcggacggcaacggtggaaagaatcgccactacggccagcaaatcgacgccgacttgtccgtggcgcaaatcgtcaatcatgccacgcactgtgtcaatcacaatgattgccaccagcgcgattatcagccattggcctacaccaggattacccagcaccggcatcgcaattgcgttgccccatgggcgccaatcgcccagcaatgccagcgggattgcggcgataacaacaacgggaagcatcggcacaagtcggcagatgtcgaggattttggtgaagaatctgatgagtccgctcatcattgctccttacgctcgtatacggagtcgattgcggcaagcgtggcccgcgcaatcggcgctgcggtcacgccttgttaacccaccggcggctttgcttagggcctttcggctccgcgcgaccatccgatacacggcgtaaagaaatcgtttttagttatgtgttgaattattgtgcgcatcgttcgagacattgcccgaatcagcgcttggcctaccctatcagcggcctgaacgcgacatgccgggcggcgaaactacgttggcagctcagtcggaaggcatcaatcgcccccctcctacgattccgccaagaattcccgtgcatatgaggggctcgcagcccttatgcgcctgcagctgacgtcctgccagaacgattcccgtgcatacaaaagcccacggaacaagatatctgccgccgctccggccgacccagccaaacgcttcccgcgtatacgaaaggcccgcagcaggagttgctcactgctacgggcctttgccggtctgacacggtgttcaacggttaccgctcaacgccgtgtgacgcgctgaaccagctttaccacaggccgaacgggtcggagaagccgccgccgtcacc

SEQ ID NO: 3550 - DNA, 3486 bp, Unknown
  R85_18m  MAG No. k141_19784
ccatcaatggccgactgctcgttctggctggatgactggtcggagttggagttaccggaagtatcagaacctgtgccggagctgctgccggtgccggactggccatcagtgccttggctggagcgaaaggcgttctggaacttattgacaagatttctggatggtttttggatgtttcctgaaagcgatagcgggctcggtgtccggcaatgtagacagacatgtaccggctatccatcaagttcggcaaaactgcaatcgggtgatagtgtaaggggacgctatgtggggaggaaaccatggttgaattcaaggacgatggcacggccactacccctggcaagccgcgggagaaccgtgacgccgagtccgcagtcgtggctgatctggtggccgtcgaactggacgacgccggcttgaacccgaacgccaagcgattaccgattctggcgcgcatctatggcgcggtcgtgctgctggacggactcgccacattgccgattatggtgatttccatcctctatgccgtgcgcgagattctggatggtcatgtgcacgtcgatgcgatgagcctgactttcatcctgtccgcgattcatgcggttgtgctggtagtcagtgccgcatgcctgattgtgttcggcgtgatgctgctgcgcaatcatcgccggtatgccgcgcgctggacctacgtgctgatgccgttgacgttggccgacggcatgctgtcgctggccctgaccggccttggcttcaacctgctgctgccgctgattcagatgattattctcgtcgtgatttcggtgaccgccgatccctccctgagcgaggaacgccgtttgcagcgcgcgctcaaacgcatggacgatcgcgatgattatgaatcggcggtggcggccggcatgctgggccgcgaccaatctggcaagggctatattgcactggacttcttcaatatcttctggctgtttaccatcgcttcggtgggtggcctgattatggagacgatctaccatatggcgctgtataacggtgaacttcaggaccgcgcgggtttgctgtggggcccgttctcgccgatttacggctgtggtgcggtattggtaaccgtgtgcctgaatcgcctgtggaaggcgaatccgttcttgatcttctgcgcttcggcggtgatcggcggcgcgttcgaatactgcaccagctggttcatggaagtggcgttcggtattaccgcgtgggattacaccggccgttggctgtccatcgacggacgtacttcgggccaattcatgttcttctggggactgattggtgtggtgtgggtcaagtggctgttgccgcgactgctggctctgattaatcgcattccatggaaagtacggtattcgctgactgcggtatgcacggtgctgatggtgatcgacattgccttcacgctgatggccttggattgctggtatgggcgcatggccggccagccgcaggattcaccggtcgcgatgtggttcagcgaacgctacagcgacgcttacatggccaatcgcttccagaccatgcatatcgacccttccaaggccgggcgtatgtgaatggctggcaagtaattacgcttcgcgggcagaaggtgcgtagaacctaagacagccttcgcgtgtgggtggtaagtgggatacactttcgagcgttgaaggaatgattccctccgctgatgcgctgttttgtgacgcgcgtgatgacgatgggacaatcaaacgaaaggcaaggcacatggccgaagctacagcaaacattggtgtgattggactggccacgatgggctccaatctggcgcgtaatctggcgcaccatggcaacacggtggcgttgttcaaccgtcactactcgcgtaccgagaagctcatgaacgagcatggcgccgaaggcaacttcgtgccggccgaaacgctcgaggaattcgccgcgtccctgaagcgtccgcgtaccgccatcatcatggtcaaggccggtgctccgaccgacgcaactatcgcgcagctggaagaggtgttcgaaccgggcgacatcatcgtcgacggtggcaactccttcttcaaggacaccatcaagcgtgagaaggaagtacgtgccaagggcttccacttcgtgggttgcggcgtgtccggtggtgaggaaggcgcgctcaacggcccgtctctgatgcctggtggcactgcggaatcctggaagaccttgggcccgattcttcagtccatcgccgccaaggtgaacggcgaaccgtgcgtgacccacatcggcaccgatggtgccggtcactttgtcaagatggtgcacaacggcatcgagtatgccgatatgcaggtgattggtgaggcgtatgacattctgcgccgtggactcggcatggataccgaggagattggcgacgtgttcgctgaatggaacaagggcgaccttgactcctacctgatcgagatcaccgctgagattctgcaccacaaggatgccgagaccggcaagccgttcgtggacgtggtcgtggatcatgccggcatgaagggtactggtacttggaccgtgcaggctggtctggaatttggttctcctgtggctgctatcggtgaagccgtgttcactcgtgcactgtcttcgcacggtgagctgcgtgaagacgctcagaaagaaggtctggctggcccgaacaagaccatcgatctggccggagaagacaaggccgcgttcgtcgaggacgtgcgcaaggccctgttcgcttccaaggtcgtggcctatgctcagggcctgaacgagattcaggacggtgctaaggaatacggctgggatatcaacctgtccgaagtggcccgcatttggcgtggcggctgcattattcgcgcccagttcctgctcgaccgcatcaccgaggccttcaagggcgataatttgccggcttccctgttgttcgatccgtacttcgagaagatcatcggcgaatcgcaggatgcatggcgtcgtgtagtcgtgcgtgccgtggaggccggtatcccgaccccggtgttctccagctccctggcgtactacgatggtctgcgctccaagcgtctgcccaccgccctgacccagtcccagcgtgacttcttcggtgcccacacctacggccgcgtcgacaagcccggcgtgttccacaccctctgggcgcaggaaggccagcccgaggaacagcaggcttgagcgtctgcgacaatctgtgggccgggcccctcattcagggttcggcccacaggagacgccatcacaactcggtgacggtttcttcggtggagaaccaggtgaactcgtccactccgttggcggaggaggacgggtaatccgggttgttgggccgctcgaagacatgggccagcgattcggctttgccggcaccggcggcgaagaaccatgtacggcgcgagcgggcaatcagcggcgcggtcaacgagacgcgcaacggcggca

SEQ ID NO: 3551 - DNA, 25375 bp, Unknown
  R85_18m  MAG No. k141_19884
gcgccgcggcatccagacattggccctgcgcatggaccggcagcaggagaatgcgaatgccatcgcgcggtacctgctcgcgcatccgctggtcaagtccgttcattacccgggcctgccgggggccggtgaccagcgactcgccgccaagggactgaagggcgccggcggcgtgctgagctttgaagtagtgcctggcgtggaccctgcggatgtgctcaacaacctgcacatcttccgattggcggtctcccttggcgctgtcgaatcactggccgagctgccctgccgcatgacccatttcgagctgcctcgcgaagaacgcctcaaggtgggcatcaccgacgagcttgtgcgcctttccttgggtattgaggatgccgccgacctgattgaggatcttggccaggcgttcgacatcgcctacgaacaatacctcaaacgtcacgtcgactgcgatgtgttcgcgcaattaacggaagaagcgtttgcctgaccgctcgcaacacgctccatcgaagactattaccgacatgaattgggggctggaaacacctatgagtatcacgtccggaacaggtgagtttgccacgcgggcaattcatgcggggtatgaccccgcggactatggccatgcggcggtgccgcccatctacgcctccgccgcattcgatttggagaatgcgcagcgtggtgatgcgctcgcaggcggactcatcgacggattcgaatactcacgtgtggccaaccccacggttgatgtgctcgaaaagcgtcttgcggcattggagggcggtatcggtgcggtggcggtcggctcaggtatggcggccgtcagttatgcgctgatgtgcgtgggcgaaggcggcggcagaatcatcgctcccagcaacttgtacggagcaagcgtggatgcactcggtgattttcttccacaattcggcatccataccgatttcgtaaagcacatcaacgacttggctgaagtggaatcgaagataggcccggatacgcgagcgatcttcgcggagaccgtggccaatccttctacggaaatccttgatattgagccgctgtcacagctggcgcatgaacacggcatcgccctgatcgtagacaacaccgtgcccacgccgtatctgttgcggcctatcgagttcggtgcggatatcgtcgtgcattccaccaccaaaggtattaccggccatggcaatgcgattggcggcgcggttatcgatggcggtcatcttgactgggcgaatggcagattcccccaattcaccacacggcagcaggtcatcagcgatgatcgcaacggtgaatggcacagttttgccgaaagatacggcaacgaggcattcatcaagcgcatccgcatcaaatatctgcgcacgttcggcgcggtggccagcccgttcaatgcgtatctttccttgattggtttggaaacattgcctcagcgcgtcagccagcaggttgcctccgcgcaacggatcgcagagcatttgaatcgtgcagcgcatgtgatgaaggtcaactattcaggattgggatatacaccgcaatacgagcttgtaggcaagtatttccctcgcggtgtcggtcagatcctgtcgttcctggtggatggcagcgccgataatgtgcgccgaatcatcgacggaaccgaggtattctcctatgtgccgaacatcggagacgcgcgttcgctgattgtcgatcctgcgcgcatcacgcatcgcgaggttcctttggatgcgcgtatcgccgccggagtcagcgataatctcatcagactttccatcggattggaaaacgtcgatgatttgattgcggaccttgaccaagccattgccaacgcatactgacgtgtatcgcttacgtatgcggataattgttcgttctgagaaaaacctgcgctgttattcttggggcgttgtgaatttgggttgttgtattacgaaagaaggaacaggacatggctattgacgtctatggcgcaacatggtgcggtgattgcaagcaggcgaagaacacgcttgaggagcttggcgccgaatatacgtggcatgacatcgaaaccgaggatggggcagccgatcgtgcggtggccatcagcggccagcagcacattcccgtggtgctctatcctgatggcactttccaggtcgaaccgtcggctgtggatatcaagaacaagctcaacgagctgaatatcaagtaaagacaagagttgtacgagtttgacgatctgctgcatctgtgagcgaacaatacgtcggcgtccgatgtgttattcattggtgtgaatagcactccataggcactggatataaccacgccgaaacacaggtgagcaagcgcgtctacggtaagggattgtgcttcgcgaacgagcgttgacgtgcataacagcagcgaaaagggagtatcgggatgattcggattaggggagtgagcaagagctttgccgacaccaccgtgctggatgggcttgatcttgacattcctcgacaaaatgtggttactgtcatcggcccctcaggctccggtaaatccacactgttgcgcattctggatttccttgagcacgcggattccggtaccgtcgatttcggtgatggtcttgtggatttgaccactaccaaatctgccgacattcacaaggtgcgttcgaaaatcgggttcgtgtttcagaactacaacctgtttttgaacaagacggcattgcagaatgtgaccgaaccgttggtgtattccaagggaatcaagcctgatgaagcccgcaagatcgctattgagcaactcgatcgtgtgggacttgccgattttcatgatcggtatccgagcacactgtccggcgggcaacagcagcgtgtgagcatcgcccgcgccgtggctatgaatcctgagctgttggtgcttgacgagcccacttcggcattggatccggaaatggtcaacggggtgctgggggtcatcaagcaactcggtagcgaaggcatgaccatgctgatggtcacccatgagatgcggttcgcctatgaggcatcgaatcatgtggtgttcatcgaaggaggccatgtggtcgagcagggtgatccgaagcggatcttcgaacatccgcaggaggagcgtaccgtcgagttcctgtcttcaaccaacaatgtgctgatgattccggtgactcggtagaggcgtttcacggctgttgtaattaattgtgacaatatcaagagaggggtttgtcatgttcaataatcaagtgattcgcaaggctgcggctttgctgtccggtgtcgccgtgctggtttcggttgccgcatgcggttcggcttccgcttccaactccagtgcattggagcaggtcaagcaggccggcaaaatcgtgttcgccactgagggcacctatgctccgttcagttaccatgactccaaaaccaatgagctgaccggttacgatgtcgaggtggccaaggccattgccaaggaggtcggtatcaaggccgagtttgccgagggcagcttcgactccctgcttgccggtgtggatgccaagaagtacgatacggttgccgatcagatttccgccactgacgagcgcaaggccaagtatgatttctccgaaccatacacctactcctacggtgtcgtcattacctccaaggagaacccgaagaacgtcacttcgttcgatgacgtcaaggggcttcgcgccgctgaaaccggtacctccaactggaacaagaccgctcaggagaagggcgctactatcgttcaggttaacgatttcggtcagcaggtcgatgccatcacgtccggtcgtgcagatgtgtcattgaacgatggccttgctgcgctcgactacctgaagcagaagccggatgcggacatcaagattgccgccaagtccgagaagactccggccgcctacctgccgttccgcaagggcagcgatgacttggtcaaggaagtcaacaaagccattgtcaagctgcagaaggatggcacattgaccaagatctccgaaaagtactttggcgaggacttctctcaggagtgacatgtttcccggctctcctgtaattagggggagccgggaaatatgagctggcctcgtgaagattacgagcagacgcaacatataccacacaacaaaggatgaccaatggacgcacgagtatggggaatagtcgtagattcctttgctaagctactgattcccggtatcactgtgaccattccgctgacgctgatttccttcgctctcggtttgatgctggcgattgtggtggcgctggtgcgtgtggctaaagtacctgtggcctcccaaatcgcgtggttctacatttgggtgtttcgtggtacgccgttgctggtgcagttgttcgttatcttctttggattgccgtccgttggcattacgattccggcattgccttccgcggtaatcgcgttctcgctgaatgtgggcgcctatgccgccgaaacattgcgtggtgcgattcttgccgtgcctaagggacagcttgaagctggcttggcggcgaacatgccgtatgtgacgattatgcgccgcattattctgccgcaagcattccgctccgccttccctgcattgttcaactccttcatcgcattggtcaaggacacgtctctcgcggcgaacatcaccgtggtggaaatgttcatgacggcccagcgcattgtggcgatttactacgagccgctggtcctatacattgaagtgggcttgatctacttgctcttctgcacgttgcttggatggcttcaggattactgcgagaagaagctcaacgaacacttctgatgtgtttatatggcggcagtgcttgattcaggtcgggtgtttccttggttgaaatgcccgactttgttgtttctgacgtgcaacttggctgattcaaacattagtgcacaagatgtggctgccggagtgaacggaacatgaaatctgacgttcgctttcttggacttgcctgtgagagctatcagttcccgggcgtgcgatggtagcatggatggtgttggggcgcggcacaacgatatgccgtgcttgacccttgtgagaggagttttatatgaccatcgcaagtatgttgggcggaaccatgctgttggtgctaattctattagtcgttcttatcgtgctgctgggcgccgcattgttcatcgttccgcagcagcaggcgtacatcatcgaacgcttcggcaagttcctgaaggttcagttcgccggcattcacatccgtatcccgttcgtcgaccgcatcgccatgaagaccaacatgcgcgtcaaccagctcaacgtgcagctggaaaccaagactcttgacaacgtgttcgtgaccgtcgtggcctccacccagttccgcgtgaacccgaacgacgtggccaccgcctactacgagctgcgcgatccggccggtcagctcaggagctacatggaggacgcgctgcgttccgccattccggccctgaccttggacgatgcctttgcccgcaaggacgatgtggcgttcgacgtgcagaaaaccgtcggcgccgagatgagccgtttcggcttcaccgtggtcaagacgctgatcaccgccatcgatccgagcccgcaggtcaagaacgcgatggactccatcaacgccgcccagcgcgagaaggaagccacccgccagcgtgccgaagcccagcgcatccagatcgagacgcaggccgccgccgaagccgagaagacccgtctgcagggcgagggccaggccaactaccgccgtgaaatcgccaatggcatcgtcgatcagatcaagagtctgcaggccgtgggcatggacatcaacgatgtgaacaacgtggtgctgttcaaccagtatcttgacgtgatgcgctcgttgtccgaatcgaagaacaccaagaccgtggtgctgcccgcctccacgcccggcggttaccaggacctgtacgaacaggtcaccaaggccatgctcaccgcgaccgagacgaacgacgccgcgaccgccgccggcaaatagcggtgcttgtggccgctagaccgcataatggcgtatgtatcagtgaagcccctcccagtgaggggcttcaccgcgtttgatgagcttatgacacggaaaaacaacgattgtgccatcgccggacggggtctgacgtcattgcgccattgtgtaatgggctatggcagactcgttgttttttgggcttgtgctatgcctgaaggaacgccgggatggcctcggccgccgcgtatcccttgcggtacatcatctccagaccctcgaagttcttcttcagggtgttgaggccgtacaaatcttcgggtgcgaggatcagcactttgccttccgcttcgtaatgcttggcgagttcgagttcgtcgttgtaggtcttgtagcgtatgcgcagcctctcggctgcggcagggtgggagcgttcgaggatgcgggccggagccagatccttctgctgcttgcgtacttcgtcacgcaagcgggacagaatcaggatcacgcgatcatagccgtcatccagcgccttctgtaccgggatcggatcggcgatgccgccatcgaaatacggcacgccatccaccacatacggctcgcaggccaccggcacggcggacgaggccttgatgatgtcgaaatcatcgaagcggacgcgcgacttgtcgaaatacttggtcgagccgtcttcggcattgcaggccaccacggtgaatccggtcggattggcctcgaacgccgcgaaatccaacggattctcgccatcgtgattgctcagcgtgccgtagatgtagtcgaggttggcaaagttgtggttcctgaagaagctttccgcgctcgcatactccttgcggaaggcgtatctggtgtagaaggtgtggttgcggccgtgctggcgggcgatgaacgaggtcatattggccgcgccggcggaaacgccgtagcacatgtccacgtcgatgccgtcctccagcatgcggtccataacgccgcagccgaaaatcgcgcggaacccgccgccgacatcaatcattgccgtcttcagtgccatatcagcctcctattcatcatcatgcatccgatcacgcattcagcaggtcgcgtgaaagccgtgtaacacgttcggacagatcggaattggcgagttccacgccgccggtcgcgtcttcgggtgccagtttgcccagggactccagcaccacgcccagatggcgcacggtgccctcattgccgtcgatgacagcagcccgttcgggcagcagctcgcggaagtagtcgcggtagaacacgaaatgcgtgcagcccagcaccactgaatcgatgtgctccatgtcgtactggtcgaagtagccatgcagcgtgcgcatcaccaggtcatggtcgccgagccgcccggattccacgatctccaccaagtcggggcaaggctccttgaaaatcgtgttgttggaatcgaatcgatccatcagtttggcgaacttccgctcacgcaaggtcaggggagtggccgccacaatcaccctctggggaatatgatgcgggtcggaaggcacgtcgccccggtcgcacgccactttcagggccggctccatgccgatgatcggaatatcgtagtgttcgcgcaaatcgttcaccgcggcggaagtggcggtgttgcatgcgatgaccacggccttgatgccttgacgcacgaaccgttcgacaatatcgaaactcagggccctcacctgctcaggcgtcttgacgccgtacggggcgttggctgaatcgccaaaatacagcacatgctcggccggcatatccttggcgatttggcgagccacggaaataccgccaagacccgaatcgaatacgccgattggagccgaagagctcatgcctgaatcctccctatagccatgcctgcaaccgtatgttgccgcgaccgatcacaaagccgattgttttgcggtgttgtttcgctccctagagtactctgaaagccatgagtcttccgcaacgagtaaccaagacacacgcaaccggcaatgatttcgtggtgtacctcgacaagtccggcaaattcgagcccaccgccgatgaggtccgattcctgtgcgaccgtcacttcggcattggcggtgacggcctgattcgcctgaccaggcccgatttcgtgtctgatttaagcgatgatcagctttcggacgtactggccgggggggcgaaatggttcatggactatcgcaatgcggatggatcgttggcggagaggtgcggcaacggtacgcgcgccatcaccttgttcgctcagcgcgagggcgtggccgactccaccgagccgttccgcctcggcacccgtgccggcgtcaagattctgacgccacgcggcaatatgaggccgtacggagccaacgtgttccaggtcgaaatgggggagtggaagatcggcgaaaccgacgcctacgaggtcaccatccccggcgctgagggctcggcgcgcggcacgttcgtggatatgggcaacccgcacgtggtcgcggtgatcgaggatgccttcgcgtccctgccggtggtcgaggcgctggatctggtcatcaagcccgtggtgagcccgaccatcgaatccgaccagaacgtggaattcgtgcgggtcgacgacatcgatcagaacaccggcgtgggtgaagccacgatgcgcgtcaacgaacgcggctgcggcgaaaccctgtcctgtggcaccggcctgtgcgccacaggcgttgtgctgcgggccaagaccggcatcagccactgggatatcaccgtacgtggcggcaccctgcgcgtggacgtcaccgacagcgacgtgaaactgaccggagcagccacgctggtcgccgatatcgatttgttgtaaaggaatcaggcagcgaacagggccgcgccttcggtgacgatgatgagtaccacgatcgccacgatccacagtatatcgaccatgaggtcgatgttgaggcggtaatacctattgagtccggccggcaccgccgcgacctcaacctcaccgtcgccatcatcagcagccacagccttacgtgacggcaatccctgcacggccacggtcgcatggctcaacgccatgaactggatggtggtggagaacatcagggtcaggcaccacgggcacagcgcgtgaatcacgaacagcgactgcgtgctcagccagtacgagtaggccaaagcggccagtccgcccagccacgtgcaggtcgcgaaccaacgcggcaccttcacacgcgccaaaccgatcaccgcgatggtaatgaacaccgattcggcggcgatgccgaagaacgcgttcggatagctcagcccgccgaacttcacgatttccgcctgccaggactgggccaccgccgaacaggacaccaccgagttcagatcgcagccgagcgcggactccggatgccgagccaactgcaaagtctcggcggacagaatgagcgaggcccccaatgccactgccgaggcgatcagcatgatgagatatgtccaagtggcactgtggcgccatccaatcaacggtcgcgcctccgccaagccaagcggcgtggtgttcgtggtgctggatgatgtgtcggttgcggtgttacgagtcatcatgcccctttcgatagcgctgcgctccagattagcctctgcggttgtcagctgagtgccgaatgtctggtcttggccgttggcagaaggtgacgacctgtctgcgccttgcgtgggaatgctgagatgaggttacgatggaaggtatgactggatatgtgatgcctttggagccgcccgccgtcgggtgggacatccattgccataccgtcttctcggatggcacggaaacgccggccacattggccgaacaatccaaggcattgggattcaagggcgtggccatttccgatcatgacaccaccgccggctggccggaggccgaagccgcatcccatagggtcggtttgccgttgctccgcggcaccgaaatcaccgccacggatgagaacgtctccgtacacatgctcggctaccagtatgatcccacgaatcagcacatcacggacttgttcgccgatactcgagccgcacggttgcaacgcacgcagcgcatggtcgaattgttgtctcgtgattatccgattacctggcaatccgtgctcgcccaagtcaaggagggtgacaaaaccaccattgggcggcctcacatcgctgatgctttggtgagtgccggcgtatatcggactcgttcggaagcgtttgcgaatgcggtcagcgcctcatccaaatactatattcccacgccctcgccgacctctcatgaagtggtggccgccgtcaaaggggcaggtggtgtgattctgatcgcccatgccggtgatgtgagccgtaaccgcagactgctgtccgatgaccagatcgaagcgttgatcagcgagggattggacgggctggaggtatggcaccgaggcaattcaccggagcaacgagaacggctgctcaccatctgccgccggcaccagctactggtcaccggcggatctgactggcatggcaaaggcaaaccgaacaaactgggggagaacctcaccgacgaggccactgtcgaagagatcgttcatcgcggcgtgctcccgttatatcggtgattcgcggcaatacaaagcggccttgagatgatgcccaaggccgcttatgcgcgattcacggtcacagcgtgccgaacccgacggcgtgcttggtttcggagccgatgatcgcgtaaccgagtgccttggcgggcacgatgatgcgacggcccttgtcatcggtcatatcgatcgtcgcgttgtcggccacggcctgcgcgatggcctggctcacattatcggctgattcgtcggtgctgaagttcaccggtcgtgccacgttctgaatgcccagttcgatatccatataaggctccttgttctgccgtctttgtgacgaacatcatggtaagtggccgtcaccggccgaggttctgtactctattgtgccgcgtgtctgcgtcgtcatgtgcggtgttacgcgctcggcgtggcgcggaacaccgcacacgacattatttggatgatgtggatgattcggccagcggattgccctcgctgtcatacccgtccaacccggcacgggcatcgcgcagagcgcgttcttcccgctccaacagcggaatcaccgtggtttgggcactcgaggctccgtgctgaacgaaactgtccggagtatcgtcattcaccgcatcgtcggtcggggcggcggattgagatgcaggggaagcgtcggttgacgtcgtgccgctatgcccgttcatactgaggagctccttcagcgtgatcgtcaccgaagaatgggaagcgccatgtgagggctgcggtttggtcgatcccgtaccggttgcggtgccggagacactcgcttgcgggtgattggcggtccggtcagcatcgggttcgacttccggggtaagatccacgtcgccagcggccacgatgtcagcggaaccggtgcgatctggatcgggcgtgtcgtccgagacctcggccgccgcggtaccggtttcggactgctgcggttgtgcgggtacctgcgtggcgggtgcctgatgacggtcgtcctgcaacaatgtgccgacggtgattgtggagggggaaccgggctccgtcgacgaggcggcggccgaccctgcggctggggccggtgccggagtgtgcttgatcacgcccaactggtgtgcgagtcgttcgacctgtgccttgaactgcatgatgcgattgttgtccgcacggttcaacgcctgaatgaattcgcccacctgttccatctgcagccacaggttggccctgagcatgatgagatcgtcaagtcgagagcccatcatgcggccgtatgcggaaagcacggcgttgcgatgggattcgtcgagcttgccgaaaatccaggcaaggtctcgtgccggatcgttgacctgcatatcctgccagttggtcaccgtggtgatggtggaaccggagaacaggaagtcgccgtcggagaatccgccgtgaaccgtgcaggtggagaacgaccacaatccctcggtgtccatgatgcgcgcccagctgtcggtgatttcttggggaacatggccggcggagcgtaagcggcgaatccaggcggtcagctgcgaacgaatctgaccggtggtgactaccggatatttggcattggccagaaaagtcgaaggcagacgatgaatggctccgatggaggtgccgacggccgcgcagtcatccaatgtcaacaggtcgagaggacgtgcctgaccatcacggtggacggcgatcatcacggtcgtctcgcctgtgggaccgggcttgcgcggggtcagcggtgtggactccgcctgggcctgctgccccacggcctgtgcggtggccgtctggccgggttgggaaacgtctcccgggacgaatgcgaccacacggtccatatcgaagccgaggccaccaagctcgcgcgcggctgccagtgtctgcgccgctttcacacggcgaatcagacgtgtacgcccttccctggtgtcagtggcgtatacgtcgtacaacttgcccgaagcatcttggatcacggtctgatcgatgcctttggcctcgtcggttgcgctggcctgcacgttctcgcgtacgccggccacccccagattcggcaggacggctgaggcgagtgccgccaacatataatcgctacgtttcatcacccttccacactaatacatccgtggcgattcgcaccgcagaatgacacgcaaaacgcatgattctggcgatgttttgtcgtgagcccgattcagccataggcgtgagtcgtgccgtgagcgcgaatcgtgccacaatggacgcatggaacaggcgcaggggattcttgaggggctcgatgagcggcagcgtaccgccgcgactacgttgcaagggccggtgcgcatcatcgccggcgcaggtgccggtaaaacacgcacggtcacgcggcggatcgcctatgcctgcgccaccggggcatggaagccggagcgggtgcttgccgtcaccttttcggtaaaagcggcggcggaaatgcgcgcacggttgggccagctcggcgtaggggaaggtgccggacgttccggttcgggtgcgggaactgccggagtcacggccgcgaccttccactcagcggcattgcatcagctcaacagcgtctgggcggacatatgcgaggctccattcccgcatgtgatcgaagatcagcgtgacgtcgtctcccgcgcgatcatccgcgccaccgcacgtaccgatgccgatccgctgaccgttcgcgatgtgctcgccgaaatcaattgggccaaaatctcgttggtggcggtggaagattatgcccgggcctgtgccatcgcccataggcagccgcccgccggactcgacaccgctcggttcgccgacgtctacagcgcctacgagcaggaaaagacctcgcgtggcgaaatcgattttgacgatattctgctgctcgtatgccatatcatggatgattttcccgaagccgccgcccaaattcgttccaccatcggctggctcaccgtcgacgagtatcaggacgtctcgcccctgcaacacaggctgctgaccctgtggctgggcgggggagggcctgacggcaagagcgcgatgaaccgcaacgtatgcgtcgtgggcgatccggcccagaccatctactcgtttgccggtgcttccagctgggatctgctgcgtttcgccgatgaattcgggccactcgccgccgatgtcaatctcaacaccgactatcgttcgacgccggaagtcgtgaatctcgccaaccgggtgcttgcggccgcgccgaaccgtgaggattacctgaaactggtttccgcccgcgaatccggcccgcgcgttacccgaaccgcttatgagagcgatatggaagaggcgcagggcgtggcggcacgcatcgcccggttggtcgccaacggagccaagccgtccgattgcgcgattctcacccgcatcaacgcccaacagccggtattcggtgccgctttgcgcgctgcaagactgaaataccgcgttcgtaaggattcgggatggcaatcatccgcgctcgccgacgatgccgcgtccaaacgtgcgctattggaggcgatgggtttggacgccaccggacttgccgcaaacgacgatcccggcgttacgatttccacgattcacgcatccaagggtctggaattcaagcacgtgtttctgatcggctgttcggaagggctcttgccgtacggttcgccggaaacgggggatgcgctggaagaggaacgccggcttatgtatgtgggcatcacccgagctgaggattcgctgcatttgtcgtatgcgcggaccaaggatggttatggagcgcaacacagacgcccatcacgatttttgtgacgggcgtcggtaatgaatgtgaatgttcctgaacgttcaggaacgggaattggctgaaggacggttgactatgcctgcgtatcctccgagttgccgttgccgccatcttctccgtcttcgccgagaagcttggacagttcggcatcccaatcgatatcgccggtcttgccatctgcggcagggtgggaggcggaaccgttggcatcggaagaggagcctgaaggggcgtcggatgacggagacgcgccatctgcgggcttgtcgctaggcagcgaaggcagcagatcgggatgcgaccacttggcgtcacggccttcagggccttcggcggcggtgatcatctcccacaatccggcggcctcgcgcatgcgcttggggcgcagctgcaaaccgagcagactttcgaacgtacgctcggcggggccacccatcgcgcgctcgcggcgcatcatctcacgcaactgttcgatatgaggcagatgggccataccggcgcgccacaccacgcaatccacccagccctcgaccatcgccagcagcgattccagcgaagccagcgcctcgcgctgttcgggagtgtcggggatgccgaccttggtgagattcaccgcgccggaaatcgactccggatccatcgacgtggcgtcacgcagctgttcctccatcgcatccagatcgatggagatgccgcgtgcgtacttgccgatgagcgcctcgaaacgcggcatcagccacggtaccgaggcatacaggcgggcgtgagccatttcctgcagggccaggaaggaaagcacttcggattcgggaattttctcggtggtctcgaatccggagagcgcagcctcgaacgcggcggcgtcggcggaagcatcggagccggagacttgggcggtaccgtcagttgccggagtatcgctgttgccggccgaagtgaagccaatgggattggcggaagcgtcggtggatgtggagaacggattgaccgagtcggttgaagtgccggccgtatcggcctcgggcgcaggagtctcaccgttcagcatcttcgcgtattcggtggcgttctgggcaatcagtccaccagtcggattcttcagcaatgcgatgccctgatcgaaactgccatgcacttcatggctcagattgccggccgcatgccccaactgcatggcaaaggacgtgttgcccagcagcttcatcagctgggctggatctttcatgccgtcgggaatcggaatcggcaccggtccggcgaacatgccggcaatctcgccatcgccgaacgcgccgccaagacgctccgaaatcaccgaagccaaagcgtcgttcatcgactcggccacaggagctgcgaacttcgcccactggtcgatggtgccttccacccagccggcgcgggtcagcacatccggatcgccgggcgcgggattgaactcgcaggcggtatccagccacaggttcgcctcactcatcgcgcggcgagccgcctcgccatccacggcggacacgctggacgcggaaccggaggcgttggcctgctgcaaggcaatcgacttggcgagcttgacgttgatcggcccttcctcgacagtgcgctgcatatcgcccatcgtgttgagtccgccggcgctgaacgcggccatcatctgctggacttcggatggattgggcagtcggctggggtcctgactcatcagctgttcacggatctcctcaggcaactggctgatctgctgccaggccatctcgccctgaatggggccgaagcatttgatcagccactcgtgaatcgcgttgtcgtccatgcgtatccttctttgccgcggtgtgttaccccaagtgtagggtctgcccgggcctgttcgctcgtggccgagcaatattttcggtttatgttcgttttcggctgatttcggccctccgcttacactgtagggtatgtttgcacgccacaggaatcaggaaccagacttcgtccaggagcagaagagcccgactgcggattcggaagcgggggatgggcgcatgccatcgttcgaagtgaagcatgattcgcgcctatctcgtggaatcagccgtgctcgggcctatgcggccgctcgtccgaaacgccatttcgtcggtgcattcgccgtgttgcttggtgtggtgattctgctgctgcccagcccgtacgtcatcgagatgcccggacccacccaagacgtgctgggcaaggtcgaggatggtgcggttatcgacatcaccggtaccggcgtgacgacgtataaggattccggcaagctgctgctgaccacggtgaacgcgtccggcgtgcccgggtacccgatcatcaacgcgcaggccgtctggggttgggccaatccgcaggtggaggtcatgccgcgtgaggccacggtaccggtgggccagagtgcggaccagtatcagaagaaagtcgaacaggacatggccggttcccaggattcggccagtgccgtcggtctggcgtatgccaaagcccatgcggacgaactgggcattgacgccagtacattgcaacacgccaaggtgacgatgcacgtggacagcatcggcggaccgtccgcaggcatgatgtacacgctcggtctcatcgacaaactcacccccgccaacgagagcggcggcaagaccatcgccggcaccggcaccatagacaaggacggcaaagtcggcagaatcggcggcatagagctgaagatgcttggcgccaagcgcgatggcgccacatggttcctggctcccgcatcgaattgttcggatttggccggccgcgtgccggatggtctgcgcgacgtcaaggtcgccacgctggacgaggcgtatcaggcgttggtggccattggcaaggggcaggccgacgatttgcctcattgcgaggcatgacacgcgcggccagtcgttgtttctggtgagacgactcgcatgggtctgcccacaatgcggcgattttcggccgcgttaacgcatttgttcgcgaagacttgctaatgtgtcccctgtgaatcaaacggcatcacagaacgctgaagaatttggtttcgagcccggcgatatcgtccaggagtggctctgggacgacgatgtggacgattccattcgtgcccagattgaagagctcacgggcgaggatctcgtggacgaggattacgactccgctgtggacggcgtcatcgtatggtggcgcgacggcgatgatgaggacgaattgtccgatacgatcgttgacgcctacgcggtactgggcaatgacggcccgctgtggatactgactcccaagcccggccgcccgggtgccgccagctcctccaccgtgcagtccgccgcacagaccgccggtatgaacgccgccaccccgctgaccgtcagctcggactggaacggcatccgcctgcgcgcattcggcaggggccgctgataagcctcaatcaatacgcttgactttaagcgtgttgactggcgtcgcgtgctgcgtagtgctgctgggcgtgactgaatgtcatcgcgattgagcgctacggcacgcgtatgcgacaccacgtgtcgcgcagtgccggccatacgctattgttgtcatttgcgggcaattagctcagttggttagagcgccacctttacacggtggatgtcgggggttcgagtccctcattgcccactttcatttttcatcacttcgtgcaatcccctcattccacagacatgggctgtgacgatattccctgacagtcttcggcaaggggttctgaaatctcagtgagatgcgcgcagaaggaaaccggcagtactgctacaaaatcgtgaatttcggtcttcttggtcagatgcgtctcaatagtcacgtaaagttgtggcagagtgtttatatccagcaggaggtcgaatagccgatggcgcaggaacttcgtgaaggggacggcaagtcgggcatcgcacgtgcgggcaagcgcaagtgggggtatgaccccgctcaggtggacgctttcttggagcgcgcccatgctctgtatgacagcgagggcatgaatctcacccagcatgacattcagaacgtgtcctttgatttgcgcaagaacggctatgtgatcgcacaggttgacgccgcgcttggacgtctggaacgtgccgtggtcgataagcagaccacatgggagatcgcacagcatgggcgtgtgacgtggaaggcgaagaccgagaagctgtatcacgaagtccagaaccatgcggagcgtgacgagcgcgaacgcttcaagtccggagcgcccaagcagccttcgtacgataagaagcaggtggatcgtctggtcgaccagattgtggacaaggcggcggccgcattgggcgttgacggcgtgaccgaagacgatgtacggtctttggccgatctcaatgcgaatacggtcaacaatgtgatcttcacccagcgcaagggcaagaaaggctatgacgagcgacaggtcgattacttcctgaacgcctgcgtgcagttgctgagtcgcttggaatcctatgcacgtgtggccgatttcgtgtccggcgagcccacggctcctgcccagaccgccacgaacgtgaccgttcaagcgaacggcgtctcgccattgttcgcttccggaacgcagcgcccggcaactgacgaacgttttgcgccgtctgccgttgctcatgacgaatcattcgatgccctgcatcaggccgagcagagcttgttcactgctccggctccggttgctcccgcggcgccggccgcggcggcaccgatcgcctatgcgccggctcctgcatcgttcgatgcttccacaagcaccaataacaccaatgcggaacagccggtttcctttgctcccgcagcatacccggtgcatacgtccaacgagtctgcggcgaagcccgtctccgagacgccttccgtggctcctaccgcagctgttgcggctgagcctcccgccagtgccccgtccgcgccggtttccggtgtgaccgctggcagcgccccctcgtttgctccggcacagtcgtcatacgaatccgcagctccgtcatcgaccccgtcggtgttcgcggaacagcccgtggatatggtgcaggacggttcctctctggccgctctcgcccacatggctgcggtttctcaggaacttccggcggtggatgcgccgtccttcgctcccaagatgcccagccttgatacaccgaatgcgctgaaattgaatgaggtaccgggttcggtttcatccccggcaccctccgccccggcagcgcaacctgtgaatagcactgccgacgaggctgcgtccgctgccatgccggtctcctttgctcccaccagcaagccggatcgtaacacgaactccattccggttcgcgtatccgatagtcagcctgcagacagcacggtctcccgtccggctgtggaatcatctgaatacgttgccgcctcccacgacacggaagcagctcagccgtcacaggataaggacgattccaacgattcgttcccgctgctgttcccgcttggcggtaacttcgattcggatatccccgacctgtcgttccccacactgaacaatgacgatacgaagaaggaaaagtgagcatagcctccaactccaccgtcatcattctcggatccaccggatccatcggcacccaaggacttgacgtcatctcgcgtcaccctgaacgatttaccgtcaccggtctggcggcgggcggagcacatatcgagctgctggcgcaacaggccgcacagttccatgtgcccgaagtcgcggtgtttgatgagaccaaggttccagcactgcaagcggctctcgcacaggccggcgcacaaggtgtccgcgtgaccggcggtccggattcggtcatcgccatggccggatccggtgcgaatgtcgtattgaacggcatcaccggctcgatcggcctcgaaccatcgatcgcggcgctcaaggccggttcccagctggcattggctaacaaggagtccgtagtcgcgggcggtcatctgctgttcagcgcgcaagtgcgcgagaaccagatcaacccggtcgattccgagcattccgccatctggcaatccctgcgctccggaacccacgccgaagtcgccaagcttgtggtcaccgcctccggcggcccattccgcggctggaaacgtgtcgacatggagaacatcactcccgagcaggcgctgcatcatccgacgtggaacatggggccggttgtcaccatcaactcctccacactgatgaacaagggcctcgaagtcatcgaggcgtcccgcttgttcaacgtgccgcctgaacgcatcgacgtgaccgtgcacccacagtccatcgtccattccatggtcgaatttgtggacggcgccacgatttgccaggcttcgccgccagacatgcgtctgcctatcgcgctgggcctgtccgcgccggaccgcatgaccaatgtggccgccgcgtgcgactggacgcaagccgcaacttggacctttgagccgttggacgatgaggcgttccccgccgtgcaactggcccgccactgcctggccgcctccgagaagcatacggcggtgctcaatgcagccaatgaacaggccgtgcatgcgtttcttgatcatcggctgccgtacctcggcatcgtggacacggtcaaagccgtgctggaccagatggacgccgagcttcgtggtaacccgctgttcacggacgtggaggaaatgaaccagcttgagcttgaagcccgccgacgcgccgacaacctgataaacaagcaatgatgaataccttgaatacggaaaatcccatcgaaaagccgttccgcaaaaccggtgatccggtcgacctgaccagcgaatcgcccttgcacccgcgccgcaagtcccgccgcatcatggtgggcccggtgccggtgggcgggggagcgcccatctccgtgcagtcgatgaccaacacgctcacggccaacgtacctgccacgttgcagcagatcgccgaactgaccgccgccggctgcgacatcgtgcgcgtggccgtgccgagtcaggacgatgccgacgcactgccggaaatctgccgcaaatcgccgattccggtcatcgccgatatccacttccagtccaaatacgtgttccaagccatcgacgccggctgcgcggccgtgcgtgtgaaccccggcaacatccgtaagttcgacgaagtcggcccggacatctgcaaggccgccaccgacgcgggcatctcgctgcgtatcggcgtgaacgccggctcgctggacaaggaactctacgccaaatacggtggcccgactccggaagcgctggtggcctccgccttgaaggaagcgcacatgttcgaggacgtcggcttccacgatttcaagatctccgtcaaacaccatgacgtcatcaccatggtcgaaacgtaccgactgctcgcatccaagggcgattggccgttgcacctcggcgttaccgaggccggccccgcctggcaaggcaccatcaaatcctgcctggcgttcggtgcgctcttggccgagggcattggcgacacgattcgcgtgtccctttccgcgccgccggtcgaagaggtcaaggtggggtgcaaactcctggaatacatgggattgcgcccccgcaagttcgacatcatctcctgcccgagctgcggccgcgcccaagtggatgtgatccagctcgcatccgccgtcaccgaaggcctgaaggacgtgaccgcgccgatccgtgtagccgtcatgggctgcatcgtcaacggtccgggcgaggcacgcgaagccgacctcggcgtggcctccggcaatggcaagggccagatcttcatcaagggcaaggtcatcaagaccgtgcccgaagaccagatcgtcgacacgctgctcaccatagcgaacgatatcgccgcccaaatggaggccgacggccaagtgcccgtcaattccaccggcccggtcgtggtcccaatccagcatcccggtcactgattcggccgaataggccctcggcgtaaatatcgcggtcagattacaatagcgcacgtgtcgcaagaagaagagcatcgcctgactgttcgatccaagccgtggaccagcacccaccggctgatggtcagcctgcccatcttcattatcctgatcggcgtgctggtctccatttccaacctgaccacggtgccttggaacatcgaacccaccggccagtcgatggccacgctcaccgacgataccgaagtcaccttcgataacccgtccggagaaacgctgccggcgaaaggcacgtatgaggtcaccgagcgatacatcacgctgaacatgaccagcgacggcaatctgaccaaggagcctggtgatcggggcaaggccaatgcggacggcgtccaagccatcaaggtattgattcgggaacctcagaacgcatcaggcaagcgccccggcgtggtgttcatgcacggtgccggatacggcacctgtgacaactcctttggcgatgtggcctccgatatggcttcggccggctttgtgaccgcagtgctcgacaaacccgtctggagcaccaccgacatcaaccgcgattatccggcctcagccaaggcatatgatcaggtcatcgaatacctacgagcccaaagcgatgtagacgccgccaaggtcggcatctatgccacctccgaatcgacatggatctcctcatatctgctcgaggacgatccggacgtcgccttccagattcttctgagcccgatggtgttcagcccacgccaatcactgggatttttcgtcacccaggacttcactcttgtcggcgcgaacgagggctatcgatccatcgtccaacgcgtgttcagcgcggacaccggcctgttcggactgaacaattccgacctcgccacgctcaaacccgccgcttacgccgtacccacctatgtggcttacggttcaaaagacgtgatgacggcgcaggtcgacggcgtgcgtgcgattctctacaacgcccacaaagccgataactggaacgtgaccgtgcgcagctatccggtcgccaaccatgtgctgcgtttgggggatgagtccgaagcgggcaccccgtttgcggacgcctatgtggacgatctcatcgattgggccgtcggcacttccgccggactcacgcagaccagcgaaaaggtggccggcaccaatctgtaccaatcaatcggtctgccgggcgctttgaaggcaagacgcgtcggcaccatatatggtgtgatcctgcacgtcacggtggtactgctgctgctcgcatccatcgtgctggcactggtggcgctgggccgcaaaatcgcggcggatgcccgatggcggcgcgagaaacgcgaggccaaacgtgcgggcatgctgataccggaacggcctgtgatactcggtttcgcacatggtttcggcaacgcgctgctgactttgaccctcaccactcttgccacactgctcatcttctttgccggacttggacaggtgattatgggtgtggtcaaacttgcatggggcagcgctcctaccgagacgccgggcgtcatgtattggagctggccggtcatccaagtggtgtccgtgctggtgctatgggcttggtcccgcgtctttatgcatctgatagaggtcgcttccgcccgcggactgattcagataccccctcgtcgtgaatccgttcgagacatcgtcaccggtgccgacccggtactcgcctccacccgtctgggccgagtcctgttctggctggtggccttcaccatgctgtacatactgttggtgttcgccttctggggcctgtttatttactgactacttcattgagtagagtctgccgggcgtcgcggggaaaggagatgagatgtcgctgtaccgagacgaaggtgtggtgttgcgcacctccaaactgggcgaagccgatcgtatcatcaccatcctgacgcgtgggcatggcaagattcgggcggtcgccaaaggcgtgcgtcgcaccaaatcacgctttggtgccaggctcgagccgttcatgcgagtcgatgtgcttatcgctgaaggccgctcgcttgacgtggtctcccaggctgaagcggtcgccgcttacggtgctccgatcgcggcggattatgcggcgtatgaggccgccaacgtcatcgtcgagaccatcgataaactcgccagcaccgaacacgagcagctgacgaaccaatatcggctgctcatcggcgcgttgaacgcgctcgccaaacaatcccacgccccgcaagccataggcgactcctatgtgatgcgcgccttggccttggccggttggacgccacgattgggtacttgcgtggtatgcggcaaggcggagccggcgtacctgtccatcgcgtccggcggcgtgatgtgcgaagccgaccacactaccgatgcgcgccgtatcgcgccgttcgtgttaaaccagttcgatgcactgattcgtggcgattggtcggtgcttgatgccgcgcctgtggagcgggttgtgcaggagttggttgaagattggggggagtattacctcgaacgcccgattcgttcgctgcgcttgatagattcatgagtatggcttttgagaacgttgattacacgtcgttggacattcccgcagctccgttcagcgaccttgcccgtattcccgacttccccaagaacaaggtaccccgccatatcggtgtgattatggacggtaatggtcgttgggccaagcagcgcggcatggtccgcaccaatggtcatcaggccgccgaaccggtggtgttcgacactatcgccggtgccatcgaagccggtgtgcggtatttgagc

SEQ ID NO: 3552 - DNA, 10329 bp, Unknown
  R85_18m  MAG No. k141_19942
ccggaggaggcgatcacgcctttggaataggtggcgagcacctccttatccatacgcggataacgcatgacgcgaccttcgaggttggccacggacgaagctttgatgaggttgaccaggccttcgtcgttttcagcccacatggtcaagtgggtgataagaccaccaccggagacgtcgtcacggcgctgggcttcagtgccccaatgcacgcgggatttgtcttgacgtgcggtttccggggtcacataagcttcgatgccgatgatgggcttgacgccattggccacgcagttggtgtacatctcgtaggcgccatgcatgttgccatggtcggtgatgccgaccgcaggcatgccaagttcggccgcacgcttggccaaatcagggatcttcgacgcaccatcgagcagcgaatagtgcgtgtggttatgcagttgcacaaagttgttcccgtaatcagccatgcgccccaccataccgtgtggtctgggcggctgttcagcattcccgtcggcactccgcgatgagggcggcgcacagcatgatgacctgggcgacgagattgaaccacaccagcgcgccgatcaacgccgcgaacggtgcgagcagcggattgcgggaggcgccggtcagcagtcgcgcgccgagcagctgcatcaccgaaaccgtcagggaacccgacgacgcgccgatcagcgtgaatcgtccggctttgatgtgcgcgaccacacgcaacagcagcatgaacaaggcgaaattcagcgcgacgccggtgcagaaaccggtcagctccagcagcagaatccccggcagcgagctgctggcgatgccgctccactgcaacacgcgccgcaccatgccaccggacaccgtaccggccgcggtcgaaagaatgaacagtattgcgatggcgatggcggcaagcgtatcgcgtaaccttgcgacgacgatattgagctcgtcgccgcagtcgtcgaacatggaccgtacggcgtggcgcagcgagttcatccagccggtcaccgtccaccagaacatggccaacgtggccagaccggtccatgtcaatgtgcttgacatggtgtttagtgcggaagacgtcagaaacgagtcggccacaccgggaatgacttcacgcaccgcgtcgatcagcatctgctgccaatcaatgttgccgaccatgataaggccgaacacgctcaccgcaatccagacgccggcaaaaaaggcgaacagcagaccatatgccagaccattcgccagcagggggccgcgccgcgacacataccggtcgagcacgcgcccaggcagcgaacgcgcccacgcgtccgctcccctgtcaatcgcactcttcaacccatgcatagttcaactgtagctgttgttaccgttgttgaaacagcgtggcgcgaaatcgcatttagccagctcaaacgatggcaaccatcaacgcccccactcaattgttcagaatcggataccatatgagtattcaattcatccgtcggagttcaatgtcagcagtcctcaccaaccgatgtcttgctaatccgctggccgccctagtatctactgtttcttgtggacttcgttcaacagccaggcagagcgtacaacatactgcgtagtacatggcgcgaatcccaatgaccaccatcgattgatgacggccacgaatactcgtactcagccttactgctttggctcatttctgttcacttcacgctggagtaccgagacacgttgagcggaaataccggtaattcacgtacggttaccgaccattggcctgaacggtactcagcatccgcagtcacttggggtatggtcatgacggagagccatcatgaccgatctctcattattctgggatgaatccggcgaggctggaactgaatctaaatattaaaacgcatgatgcacacgttgcggaattagtccaccagaacttcggcatgctcggcaggttcagcgggttcgatgtgacgggcacgcatggcatcgagggcggcggccaggtcggccgggtactgggaccggaccgtggtccagacgcgggtgcgaggatggcggaattcgagctttatggcgtgcagccactgccggtcaagtcccaaagcttcagacagcaccggattggcaccatacatggggtcgccgcacagaggatgcccaatcgaggagaaatgcacgcgaatctgatgggtacgtccggtctccagattcacggataccagtgtggcctcatggccgaaacgctccaacacatcccaatgcgtaacggccggtttgccggccggagtcacgcagaagcggaaatcggacactttggcgcgcccgatcggtgcctcaatggtcgctttgttctctttaagaccgccctgcacgagcgcatgataggttttctttacctcatgctcggcgaactgccgacgcatctcggtgtacgcaaggtcggacttgcacaccaacatcaagccggaagtgcctacatcaaggcgagaaacaatgccttcacgcccggccgcgccataggaagcgatatgcacgccacgatcacgcaacgatcccaataccgtgggaccggtccagccaaccgaggcatgcgccgccacgcctacaggcttatcgactacgacgacatcatcatcttcgtagacaacagccatatcagttgcgataggctcaggcccggcctgttcctccgccaaatcaaattcgacggtctcccccgcctgcaacgtgctggaccgcgcaacttcacgccctaaaacgcgcgcctgtccggagtcaaccagatcggcggctttagatcgtgaaatacccagcattttggccacggctacgtcgaaacgcttacccaccaatgcatcgggagcagggaccattcgactcattacttggcgtccgcctccggctcagactgtagggattcgtcggattgctcgataagatccttgtgggagaacggctcccccataagaatcagaatcaccaggaccacaccggcgactaccagatagatatccgccacattgccaacggaccagccatagttaaggaaatccaccactttgccgttgaggaagccgtcagcgtacataacacggtcaatcaggttgcccagagcgcctgcaaacgcgaaagaaagcgccaccgaccatttcatggagatagtgcgcaccccagccacagcaagggccacgcaagccacaacggccaacagactgattacccaagtagcgcctgaccccatgcccaaggacgcgcccggattacgcaccaaggtgaaggacagcagtccgggaatcacgcgaatggtctgaccgttggataacgcggccatcgcccaagccttggtgagctgatcgacaatcagcgcagccgcggccacacatgcaaagacggccacgcgagtgcgcagccgtccctgttggttcgtcatacgacctgtacctgcctacgctcagttggtcttggacgaggtctggtcgacgtagttgttcgactcggaaacctgcgatgccagctggccgaggtactcggtgaggcgggcgcggtattcagtctcgaactgcttgaggctctggatgttgccctcgacgaccttggactgagcctgaaggttgtcgcgcacctgctcggcatacgtatcggctgcagagcgggtgttcttgtcgtacgcatcagctgcggaacgagtgttcttgtcatactcggcggcacgctgctgcacttccttctcgtagttgtcagcgtcatcgtgctgagacttggagtagttgtccgcatcctgacgagtcttgacggagtatgcgtcggcctcagaacgggtgttctgggagtaggtctcggcatccgcgtgaatctggtcacggtaagcgtcggcctcggagcgggtacgatccgaataggtgtcggcgtcggaacgagtacgagtggagtagtcgtcggcctcggagcgggtacgctcggagtagttgttggccttggtgaccaaatcgttgtacttgttctggctggcctcggtgatttccttggccttgttcttgcccttctccacgtactgatcgtgcagctgcatagccagggtcagcatggcggtggcgcgctcgggctcggtgcccggcatggaagcgacgccagcgatcttctgcagagaaccggtctcagtgctcggctcgaccttggaaacctgggcacgaagctggttttcacgctgcttggcttcttcgagctgacgagacagttcagcgatctgagcggactgctgctgagcggcggaaccctcctgctgagcagcggcgagctgacgggacagctcctcgttggccgcgcggaactgatcacgttcctgctgaatggcggcgatctgctggccgacggcttcctggttaccggaggcctgagcggcctgggcggtgagctgatcgatttgagcgttcagctgatcgacctgacccttgagctgctcattctgggaggacagcgcgcggttggattcctcggcttcgctgagcttggcagaggcaagctgtgccgcctgatcattgccagcctgagcggcctgctgggcctgagccacagcgttcttcaaaccagcattctccgactggagttgctgcacctgaccggtaagatcggagatcttcgcattaaggttggtcacgtcagggcccagagactgagtggcctgaccgccggctaccgcctgacgtccaagagcctcgacggtttccgtgacctgatcaaggaagtcatcgacctcgtcgacatcataaccttccttgaatcgaacagtctggaaggtatgctccctaatatccttcggcgtcaacagagccataaatcttgcacctcgctttggggcattgcccgcacttacgttggtctcaagtcagaatgctatcacgaccccatcgtttcagaacattcaacgtgggtttttatgccagatatatgcctccggcgggtcaaaaacggcctcagaacactatcagaacaacactttctagtaccaccaacgcaaaatacagcacgatgaagctgacatcaagataaatcgagccgagcggcaatggacgaatatagcgacgtagccagcgcagagggggttcggtaatggaatacacaatgttgatcagctgggccaccacaccacgtggataccagtttcgtgcgagaacggagacccagtccagaatcatgcgcacgaacagaaccgtgatatacgcgttgatgagccatgcaagaatgcggccgatcagagagaacactaaggaaagcatgctgacagactaacaaccgcgcatgaaaagtttgctcggagcgcaataagaatcggccgactccttgctgggagtcggccgaataccgatataacgtcgaatgcgaaaactactgaaccggtcagtcagcgaacaaatcgtgtgccgaggttggttttgtcggctcttcgaccttgatgttcacctgcgccgggctcaacaggaacacgcgcggagtgacacgctcgagggaaccacgcacgccgaacaccacgccggcggagaagtccacaatgcgatatgccacggcttcggccacaccggtgagattcagtacgaccggaacaccgtcacgcaatgcgcgaccgaccagctgagcatcctcatatgacttcggatggatggtggtgattctgttcacgcgaccaccggggaacggcttggtagtcgacgatgcggcaggcgcggtggttgatgccagcggcgtgaccgtatggtcggaatcgaatgcggacttcggagccggcttctgctcctcgtcctcttcgatgtagtcgtcctcatcgtccacaacgtcgctcatgcccagataggacatcgcgtttttcatgaacccagccatggatcagtcctttcagcgcaggaaatcaggaatgtcgagatcgccggcgggatcgttcacggcgatgttcggatgcgaggtagtcggatcgtcaaagggcagggatgccgggtctgcggtcgtcggggtgaattccggacgcggagtggccacgggctgggcggccggagcggcggcgggctgctgcgtttgcgtggcagccggctgggcggccggtacggcaattgccggagcggcggcagagggatcctgcggtgtaaccggatcgaaaccggccgcgatgacggtaacacgcacttcgtcgccataggcatcgtccagagcaagaccccagatgatctgggcctcggggtgaatggccttgcgtacaagctcggtggcggcggaagcttcctgcagcttcagatcggtcgggccggcaatgttgatcaacgcgccgtgggcaccctcgatgctctcctcgagcagcggggagctgatggcgatttcggcggcctgggtggcgcggtcttcgccccgcgcggaaccaatgccgaacagcgcagtaccagcgccacgaagaatggagttcacgtcggagaaatcgacgtgaatgtaggaattcatcgaaatgaggtcggtgatgccctgcacgccggcgaggagtgcggtatcggccgtcttgaaggcttcgatgatgccgatggaacggtcggaaagctcaagcaggcgatcgttcgggatgacgatcagcgcgtcgacttccttgcgcaggttgtcgatgccgtattcggcggaagcggaacgctgaggaccttcgaagctgaacggacgagtgacaaccgcgatggtgagagcaccttgctgatgagccgcacgagcgacgatcgggctggcgccggtaccggtgccaccaccctcaccgcaggtgacgaacaccatgtcggcacccttcagggattcctcgatatcagactgatgatcctgtgcggccttagcacccttctccgggtccgcgccagcgccgagtccgcggctggactgatcggacagggagattttcacgtcggcgtcggagcgcagaagatccttcgcatcggtatttaccgccacaaattcaacattctgcagtccctcggcaatcatgcgattgacggcattaccgccggcaccgccgacgccaacaaccttgatgttggtcttgtcgttgaactcattctgcgcgatctcgctcacgtttggctcctgtcacttcacggttacacccaagagtagcgcaaacaggctactcttggagggaaattcacgcgcagaatggcgcgtgttgcgtgtattttcagtattttttcagtaactggcgtccattgggtcgtcaccgaagagcgcctcacgctcttcgtgggtggtggtacgcgattccaaccacccatacggcaagtgcaccttcttggcgaaacgcacgcggccgcgcggtttgtcgaccacgcgtggcgggtattcgatggtcgggtcgagcttgccgatctcgcggtccacatcggccaggctctcgcattccataaaggccttgcgggtggacccacccaccgggaaccctttcagataccaggcgatgtgcttgcgcagatcgtggacggccatcatctcatcgccctcatagaactcggtaagcagctcggcatgacggtgaatcacccggcagacctcgcccagattcgggttgagccgttcgggattgccctcgaaggcgtttttgatgttggcgaacagccacggccggccctgacatccgcggccgatggccacgccgtcgcagccggtctcgcgcaccatttcgagcgcgtcctcggcgccccagatatcgccattgccgaataccggaatgttgaggtgttccttgagctcgccgatgcgggaccagtcggaatgaccgccatagtattcggcggtggtgcgggcatgcagggttacggccttgcagccctcctcctgcgcgatgtgtccggcttcgaggaaggtctcatggttatggtcgatgccgacgcggatcttcgaggtgacggggatgcccgccggctcgcatacggcgaccacgcgctggatgagctcggtgaagatgtcggttttccatggcagggccgagcctcccccgcgacgggtgaccttgggtaccgggcaaccgaagttcaggtccacatggtcggccatgttgccgtcgaccacgattttcgccgcctgttcggtgatggacggattcacgccatacaactgcagcgaacgaattttttcgcttttggcgaaatggcagagacgcagggctttcgggttgcgcgccacgagggcccgcgcggtgatcatctcggccacgtaaagaccatcgggaccgtattcctcgcagatcacgcggaacggccagttggtcacgcccgccatcggcgaaagcaccaccggggtcggcacggtaatgttgccgagctgcacgggggcgatgtataccggagtctcgggccgtgccggcgcgtccgtacgcgggtcgagattgttggtctcgtgagtagcggtgatggtggtttcggtttcagattctgccatgtggttcctgttctgaaatagttttggctcccctcttttgaggggagctgccgccgtaggcgactgaggggagtcgcctcagcaagagccccctcagtccacttcgtagacagctcccctcatagaggggagcctctatacagacccgtctttagtacagaccgccggcttcctgaacgccggactcaggccaagcctcgccgcccatttccacaggcttcaggggcacgcgggtgcgcttctcgccgatgcgggcggccacgtaatcggccaccttgtcaagagcgacgcgctcctgggccatggtgtcacgctcacggatggtcacggcgtggtcctcgagagtatcgaagtccacggtaatgcacagcggggtgccgatctcgtcctgacgacggtaacgacgaccgatggcaccggactcgtcgtagtcgatcatccattcgttgaagcgcaggtcgtcggccaggttctgggccacggtctgcagttcaggcttcttgctcagcggcagcacggcggccttgaccggggccagacgcgggtcgagacgcagcacggtgcgcttgtcgacgccgcccttggtgttcggggcctcgtccacatcgtaggcgtccacgaggaagcacatcagggaacgggtcagaccggcggccggttcgatgacgtacggcacgtacttctcgccggtggcctggttgaagtagctcaggtcttcgccggagtgcttggagtgcgcgctcaaatcgtaatcggtacggttggcgatgccttcgagctcgccccagtcggaaccttggaagccgaacttgtattcgatgtccacggtgcgcttggagtagtgggagagcttctccttcgggtgctcgtagtggcgcaggttctccggcttgacgccgaggtcgatgtaccagcgggtacgggcgtcgatccagtactggtgccattcctcatcggtgccgggcttgacgaagaactccatctccatctgctcgaactcacgggtgcggaagatgaagttgcccggggtgatctcgttacggaaggacttacccatgttggcgatgccgaacggcggcttggaacgggaggaggtcatcacgttcttgaagtcgacgaagatgccctgtgcagtctccggacgcaggtagtgcaggctgttctcgtcctcgaccgggccgaggtgggtgcgcagcatcatgttgaagtcgcgcggttcggtccactggccacgggtgccgcagttcgggcagacgatgtccttcatgccgttttccggcatcttgtcgccgtgcttctcggcgtaggattcctcgagcttgtcggcgcggttgcgcttgtggcagttgaggcattcgacaagcggatcgttgaacacgctcacgtggccggaggccacccacacttcgggaggcaggatgatggaagtgtcgacaccgacgacatcaggacgggtgacgaccatggagcgccaccattcacgcttgatattgtccttgagagcgacgccgagggggccgtaatcccaagcggaacgggtgccgccgtaaatttcgccggcggggaacacgaagccgcgacgcttcgcaagggatacgacttcatcgagtttggactgagccacaatgcaccttctggtttgaacggtttggggtctaataacaaccgcttcaggatagccgtatatggtgacaggtcaggcggcattgtccggtatatgttccgcgtctcacgagcggccgttcgcagcgattcctatatcgcaacacctccatattgttcctgttgttttatccttcccgaatttgtaccactgacatcgcgtcagcgtcacaaatccgggagatattgctcggcggaggcgtc

SEQ ID NO: 3553 - DNA, 5490 bp, Unknown
  R85_18m  MAG No. k141_20190
agcacttccttggtaaggaagaggtcgtgagtccaattctcactcggggctctctggcggggtagctcagctggctagagcgtacgactcataatcgtaaggtcaagagttcgagcctcttcctcgctacaaatcgcgcccgctaaccggtgggcgcgcactatacctaagaacacagaggtgaatgacaatggctaagagcgccgacatccgtccgggcatcacgctggcctgcaccgagtgcaaggagcgtaactacattacgactaagaaccgtcgtaatacgcccgaccgtcttgagctcaagaagttctgcccgcgctgcggcaagcagaccgtgcaccgcgagactcgttgatcgcaagcatcacagctttacaaaacccggcccattcggccgggtttttgcgtattgactccagagccgagtggtagggtgcggaatcagtatccgcatcgcgtgagaaatggcagaaatcccgcgtctgaacgaacccctcgcgggcgttctgccgtttcagccgatgattgccccgatatcgcacctgcgccactaagataggaagtcatgacaagctttgcagacatcaccaccatgggcgtgggcggccccatcgcccatttcatcgagccgaccacgcgcgtggggctcatcgaagccgtggaggatgccgattccaaaggcctgcccttggtcgttatcggtggcggctccaacctgcttgtttccgataagccttttgacggcgtggtggttcgagacgcccgacgcctcatcactgtgccggacgaggctgcaccggtagagggcgaggatcgcaccgtgcatgtcaatgccgaggccggtgccaattgggatgatttcgtggccttcaccgtagagctcgggctcgagggcgtcgagggactgtccggcattcccggcacagtcggcgcttccgtggtgcagaacatcggtgcctacggacaggaagtcgccacttcggtcgaatcggtggaagtctgggatcgagacaccaaaacaacgcgcgacctcacacccgccgatcttcgattcggctatcgatactccgcactgaaggccagcatgtacgccggtcccggccagccggccgaccgattcttcccgacgccacgttacgtggtgctctccgtcacctttgccctgacccactcggccgaaggcacggtaggttacggacagcttgccaaagcgcttggcgtcgaagtgggcgaccgtatggccaccgccgacatccgcaaagccgtgctcgcagtacgtgccgccaagggcatgcttgaggatcccactcgctacgccttgcccgacatggccaccgccaagcgcgaggccaatatcctgaccgatctggagcgtctggcctccctcaatgaggccgccggcgttcccgttggcgatgacggcctgcctgctcccgactacaatcgccacagctgcggctcgttctttatgaatccgattctgaccgccggccaagcggcggccctgcccgaagatgcgccgaagttcgacgcgactctgcctgacggcactcccggcaccaagacgtccgccgcctggctcatcgaccatgccggctgccataagggatataaggtcgatgcgtacgcgccggccagtctatccacgcagcacacgctggccttgaccaatcgtgggggagcgagcgcggccgatatcgcagctttggcgcgtgcggttcagcaggcggtcaagagcgcgttcggagtggacttggtgcccgaaccggtctgcgtcggcgtgctgtaatcgcgctattgatcgatggagtggggtattaatcccatatattgcggactctaagtcttattaatagacaagacacgcgggctcttctatactcgattgtcggtattgtgcgcattcggtgcgcaaacaacagagaaaaagaagagcactatgcaactgttccgtacgaaatccgtcgaacagaccattgccgaaacgggtgaagagggccgcaagctcaagcgcaacctgacttggtgggatctgtcaatcatgggcgtggccgtagccgtgggcgccggcatcttctcggtgggcgcgcaggccgccgccttccacgccggcccggccgtgatcatcagcttcctgatcgccggcatcgtgtgcggcgcagccgtgatgtgctacgccgaattcgcttcgatgattccggtggccggctccgcctacaccttcacctacaccacggtcggcgagatcatggcctggatcatcggctgggatctgattctggaaatgctgatggccggctccgtgatttccaaatattggggcgtatacctcaacgatttcatgcgcctgatgggctggaacgccaacaccaacctggcgttcggctccttccatatcgatatcgccccgatcatcatcgtggcgttctttaccacgctgctcgtattcggcaccaagatcggtgcccgcgtggacggtgctatgaccgtgctcaagatcgccatcgtgttctttgtggtgatcgtcggcttcttctacgtcaaggcctccaacttcaccccgttcattccgccgagccagccggcctccaccgtggaaggctcctccgccgtcaccggcgtgatgacccagccgctgtggcagttcgccaccggcatgaccccatccgtgtacggcgttcccggcatcctttcgggcgcggcgctcgtgttcttcgcgttcatcggcttcgacgtggtggccaccgcctccgaggagaccaagaacccgcacaagaacgtgccgctcggcatcggcgtgggcatgctgctcatcatcgtcatgtacatgctcgtggccgtggtgaccaccggcatggtctcctatgccgatctcgccaagcaagacagcccctcgctggccaccgccttcgaactggtgggtgccgactgggccgccaagatcatcagcttcggcatcgtgctgggcctggccaccgtggtcatggtgctgttgctcggcctgacccgtatcgtcttcgccatgagccgcgatggtctgctgccgcgcggcctgtccaagaccggcaagcatggcaccccggccgctctgcagatcgtcgtcggcgcggtggtggcgctcgtggccgccttcttcgacatcggcgtgctctccgacatggtcaacatcggcaccctgtccgccttcacgctggtggccatctccatcccgattatgcgcaagaagcgccccgacctgccgcgcgccttcaagatgcccggcgacccgtggattccgatcctcatcgccgtggccaacttctggttgatgctcaacctgtccgtactcacctggattcgtttcgtggtgtggctcgtggtcggcgtcgccatctacttcggctacggctactggcatgcgcgcctcggcaagggcgacctgaccgaaacgctgtccgccgaaaccgataaggccgttaacggctgagagcgaggagcgtcccaacgggcgcgtaccctcgtaccagtatctgttaaggaggattccatgccatatgtgatcgctcagccttgcgtggatgtcaaggacaaggcttgcgtggacgagtgccccgtcgactgcatttacgagggttcccgctcgctgtacatcaaccccaacgagtgcgtcgattgcggtgcatgcgaaccggtatgccccaccgaggccatcttctatgaggatgatctgccggacgagtgggcttggtacaaggatgccgctgtcaacttcttcgctgaagtcggcgatttgggcggcgcttccgccaatggcccaatcggcaaagacccggaacaggtcgccgcgctgccgccgcagaaccagtaagctgatttgcggataagcgctgcacacagcgcatagttcggattgaaccctcggtctatcacggccgagggttcgtcgtatcttaggaacataccgtccaagaaaggggttctcatgggcttccacgcatattcgtcgccatacgactggtctcgtatcgccggcttcaaagccaccgccaaaaccgtgccgggtggcatgatcgacctgtccgtaggctcgcccgtggacccggtgccgagcagtgtccagcaggcgctggttgccggcgcagacgcccccaacgcccatggatacccggtcaccgccggcagcgccgaccttaaggccgctatcgatacatggttccgcgaactgcgcggtgtggatctgaagtccatcaacgctgccgccgtacccaccgtgggttccaaggaggccgtggcactgatggccagcctgctgcaccttggcgaaggcgatgtggtcgtccaaccggccgtctcctacccgacttacgaaatcggtacccaacttgccggcgccaccgtggtcaaagtcgatgatgtgaccgacgtcgattcctgggtgaatattccgaacgtcaaggccatctggatcaactcgccgtgtaatccttccggcgaggtcatctccgctgactggctgaccgacatcgtggctgctgcccgtcgcatcggtgccgtggtgctctccgacgaatgctatgcgttgatggactggcgttcggtgcgccgcaatacagcctcgtcctctgcgcctgccgcgtctgcatctgctgcgtctgtgcctgccgcaccggtggccgaatccaacgagcccgcctccgataccgcattcagtctctccgccacgccatgtgccctgaatccacatgtgtgtgaaggttcggcagctggcatcctggtgctctactcgctgtccaagcagtccaacatggccggctaccgtacggctctggttgccggcgattaccggctggtcaaggaaatggccgaataccgcaagcagatcggacagattatccccggcccggtgcaggccgccatggccgcaggcctgaaggacacagccgctgtgcacgagcaatgggggcgttaccgtcgccgcctatccgcgctggttgacgcactgaaggcatatggttattcggcacaaatgccctccggcgcgctgtacgtatgggtcaaggccaagtccggcgactgctgggccgatatggccgagctcgccaagatcggcatcatccccagccccggcgaattctacggcgctcccgcctacctgcgtttctccgccaccgccaccgacgaggccatccgctccgcctgcgaacgtctcacggcgtaatgagatcgtaagtggcgttgagccgttcacgccccaaactgggcggccttgctgccaaatttgcggcgcacagcgtccagtgcggcctcggcatcatgcaaacgtgcctgtgaggtctggccgcgggcattgtcggcctcttcaagcatgtcatccagtgaaggctgcacggccgtagccgccgcctcactgagcgaagacgtgctcataccggccaagcgaatagttttgggcaggggagtggcagactccgccgaggctggcagccccaacatgactttcagctgccg

SEQ ID NO: 3554 - DNA, 5824 bp, Unknown
  R85_18m  MAG No. k141_20506
agtccgatacctcttcggacgaggagaggatgccgtgcgagagcagatattcaaagcattcggtgcggcggtcaaagcattcgcggcgggtcatgcggtgttcggggttcgagcattcgtcgccttcgttgcaggtgaaaacatccaagtatgcacagtcgagcttgatgccatgcgcggcaatttgggtgaaattgcggcgtacgtagtccggtgcgagctcggcgcacaggtaggtctggtggccgcccgcccagcgtgcgtgttcgggcatcgtaccgtctgccagccgaatcgcattgttggcatcaaaagtttgtgcggtgaagtagtaatcgcggtactggtcatgcgtgccgaaaatatcgccttgctcatggcaggcgtcgaccagcgacttcatgccttcccagccgcccgcttcctggcaagccggcagatagtcggggtgcgcattgtcgtatccgggctgcgcccaaccatccaagtgcatgtacagtcggcctgcacccatgccgtgcagtgtgcgcatctgcttctcgcgctgcgcaaaggtgaccaatgaatcgttcttttcggggtggtccttgtcatagtagaacgagtcgggctgcactttggttttgatgccgacgtgcacccatgaacgaccaatcaggtcacgcacggagggattgcgcgccgccttttcgacgagcgtacgcaaacgacctcgttcattgacgtacgaacgataggccttgcacaccgccgtgtgatcggtgtggtcgaggaactggtagcgtaccacgcggcgataattcattgtgccgaggcttggctcaaaccaagtattgatatgggtgtacgagccatcgctgggatggtcgatgccgtaaccggcattccatggagtttcgcagatggcgatatacccgtgtccgtctgcgcggagctgcgcgaaccacggcatgtaaccgccagccgtttcgaagcggccgtcgaaggcgatatctttggtgctcacggcggtaggccatgtgttggggatcatcacaccttgctcatgggtgatgagtgtcgtgtcatggtcgtcggcgcaatcgaagtccatggctgcgggccacgtcacattggtgatgttcaggccttgctcattgagcggaatccattcgaagagcacatcgcctgaggcacgctccacccatacataggtttcaaaggagtatgcgctgtgcccaaagccggtgaagatgctgcgaatgccggttcccgtgccggtttcacgctgctcatgggtgatggaagtggcatccgcgaacgcgaaggtgccttgcgcgcattgcagggtcggcttgaaatcagcgcaggtattccattcggcaccgtcgcgcgtaaaagcgaactgcattgttcgttcatcgaatcgcacggtagtgccggatacggtgaattccatagttaatgtgctcctgtatgttctcgattgctcccgcttacgggagctcgctcatataacaagataggggtggtctgctgtttgagaccacccccagtcggctttgccgacagcccccgccagcggggggctagcgctgtctgtttattacttactgcttactgcttcttggtcagtgcggtgaacactgggccgccgccgtagtcgaatgcgacgccggagactgcggaggtgctggctgcggtggcattctggttccacaacgggatagccggaaggtcctgcagcagaatctcctcaccttgctgataatacttgtcggcttcctcggtggacggggcggaaagagccttgtccatcatggcatcgaactcggggttcttgtagttgccgctgttgccgcccttgccgtcggccgaactggaatcgtacagctgtaccagatagttgtccgcggatggataatcagggccccaaccgctgcggtatgcggaggtcatcttgcctgaatccacattggacaggaattcgtcggaagtggacatcgggatgctcttggcatcgatatccagcgtgttcttgatgtagttgcagattgcctcaacccagttcttcgcagtgccatcagcattgtatgcaatgccgaactcaccgctccacggggagatggcgttggccttggcccacagttccttggccctggacgggttgtacttcagtacttcatttcccttgagttccttggagtaggcgctgattggggctgcaaggaagtcgacggcgggcgtggcggtgccgtggaagatcttctcggcgacggtcttgcggtcgatggacatggaaatggcctgacgacgcaggttgccttcctcgttctggccgaagtgttccagccattcaggaatggtgaaggtgagcgtattgccaccgggctcgttgtatgccttcagcgacttgtcggattggaaggaggtaagtgcggtgtcaggaatcgtgttcgtgaagtccaggttgccaccgcgtaggtcggcgtatgccgaatcaggcgaggtatagatcttgaagttcaggccatcgttcttggcgacacgattgcccttgtagtcagggttcttcaccatttcgatgctgtggttgtgctgccaggacacgaacttgtatgggccgttgctcactgggtgctgaccgaacttcttcgggtccttgaacgcggattcgggcaacggcatgtaggcgtggctgccggccttgaccgggaatgccgagtcgggctggctgagcttgacatcgatggtgttgtcgtcaacgacggtcaggccgctcagcgtggccttggggtccacgtccggcttttgcagatcatcatagccttcgattgtgctgaagaagctggcgctggcctgcttgttggcactgttggcggtgtaattccatgcgtttacgaaggagtgcgcggtcaccggagtgccgtcggtgaacttccatccactcttgagcttgatgacgtaatgcgtggcgttgtcgctggaggtgatgctgtctgctacctcgttgtggatgccgcccttcgcatcgtaggtcaccagacctgcgaacagctggtctacaaccttgccgccaccggcctcagtggtgttgccggggaatagtgggtgtgccggctcactgccgtacacggaaatgatattggaatctgaagcattgctggaattggaggtaccggtcgatccgcagccgctgagcagcatgacgattgccgcaccggccgcgaccagtgaagtgacatgacgtgtgttcatgaatctctcccaaatattttggcgtcatctttttggcgacgaaagacaccataggagcttcatgttaaccatgtatgcaatattctcgaaatataaacattactgaagactcaaggcagtaattaatcccagaaacgcaaaaatcccctcatgaagaagggattttcatgtttctgtttggaaagtattcagcgaggcagcatcatcggacgctggctggccttgatcggggccggcagctcgctcttttccttggagaggtactcgtccacggctgcggcgcaggagcggccttcggcgatggcccagaccacgaggctctggccacggccggcatcgccgcacacgaacacgccatcctgggaggtggcgaacttgtcattgcgagcgatgttgccacgtttgtcgagttcgacgggcagctggtcgaggatggtctcggtgtccggatgcaggaagcccacggagatgaggaccagatcggcgggcagcacgcgctcggtgccaggctggcgagtgaacggaccattttcgccgggagccacggagacgaccttcaagccggtgacatgaccacgctcatcggccacgaagccttcggcggtggtcgagttatcaatggtgaccttggccttctcctcttcggtgccctcgaagttcacggagtcggtggagtagatgtactcgccgccctcttccatggaggaggtcttctggtaggtgcgggcgaaggtcggccacgggctgttgtccggacggcttgacggctctttcggcatgatctgtagcacggtgacgtccttcgcaccctgacggatcgaggtgccgaggcagtcggaaccggtgtcgccaccgccgatgacgatgacgtgcttgtccttggcggtgatgtcgtgcaccggcttgacgccgaagatacggcgcgtggcgtcgggcaggaagtcgagggcgaagtggatgccgtcgagctcgcggcccggaatcttcatatcgcgcggcacgcgggagccgatggccaccacgacggcgtcgtaacggtcacgcaggtcatcccacgtgatgtccttgccgatttccacgttggtgcggaagcgggtgccttcggcctccatctgcttgacacggcggtcaagcagacccttctcaagcttgaagttcgggatgccgtaacgcatcagaccaccgatggcgtcgtccttctcgtagacgacgacggtgtggccggcgcgggtgagctgctgtgcggcggcgaggccggcagggccggagccgacgacggcgaccgtctggtcggtcagacgctgcggcggcagcggcttgacgtagtccaaatcccatgcctggtcgatgatggtctgctcgtcaagcttgatcatggtcggcggctggtggatgccgagcacgcaggcctgctcgcacagggccgggcagatgcggccggtgacttcggggaagttgttggtcatggacagacggttgtaggcgtcttcccacttgccctgacggaccaagtcgttccactcgggaatcaggttacccagcgggcatccggtcatgcagaacggggtgccacaatccatgcagcgggccgcctgcgtttgggtccacggttgcaggccggtttcggcgtgaacgtcgaaccagtccttgatacgctcctcaacggggcgttcagccagctctcggcgggtacggaccttcaggaatcctctcgggtcgcccatgtcagcgcgctccttccataacctgctcgtacaccttttcccaggcgccgggcgcattgaaatctacattgttggccttggcttcttccatggccttcgtcatggccacgaactgcttcggcaccacgtgagtgaaccgcttgacggtttcgttccagtcctccagcagggccgcggcgaactgggaaccggtctcttcggcatgctgcttgaccagtgcgtacaccagcttggaggtttcggcatcaagcgacttgaagagcagtgcaccggacttgatggcacccgggttgaccttcttcatatcgaggtcaagcacataagtgttaccgccggagaagcctgcaccgaaattgcgtccggtggggccgagcaccacaacagtgccaccggtcatgtactcgcagccgtggtcgcccacgccttcgaccacgaacgtggcaccgccgttacgaacgccgaaacgttcgccggcgcgaccggctacgaacatctggccggaagtggcgccgaaaccggtgacattgccggcgatgacgttgctgtgcttgtcgaaggtgacggtgtcttccgggcgcacgatcatgcgaccgccggacaggcccttgccggcgtagtcgttgacttcaccgtagatgcgcatggtctcgccgcgcgggatgaacgcaccgatggactggcctccggaaccgtgcagggtcatgtcgatggtgtcatccggcagaccttcctcgccgtagcggcgggtgatctcgtagccgaccatggtgccgaccgtacggttgacgttgcgactcggcatatcgatgcgcacgggttccttgtgttcgagggccggctgggcaagttcgatgagcttgttg

SEQ ID NO: 3555 - DNA, 9299 bp, Unknown
  R85_18m  MAG No. k141_20868
cggcagattggccaggtgggtcttgaagcgccagtcggagctggagtcgaagccggcggaggtgaacgcgcccttgatgccgagctcgtccttgcgggcctgcatgtcgtcggccacggccttcagggtgtcgaagttgtcaatttcgtccatggacgtggccttggcgccatccagcgcgaagtacttgttgaggatgtccttgttgtagatcaggccgtaggtttccatcacgtacggcacgccgaccaccttgtcgccatccttcagggccacatcttggttggtgagctccttgtacacatccgtattggacatatcggcggtgtacttcttccagttctggtagccgaccgggccgttgacctggaacaaggtcggggcttcggttttggcgatttcggacttcagggtctgctcgtaggtaccggaggccgcggtctgcaccttgacctcaacgcccttttccttggtgtattccttggccagagcggtccactgatcagccgcttccggcttgaaattcaggtagtagaccttgcccttggcgtcatcgccggaggtcgagcttccgcaggccgccaaagcgccgagggacatcgcagcgacagccgccatcgcgactgctgacttgactgtacgattcatcatcgaacctttctctttcatcgtcgacccggccgtccccggtcgggacaggtacgctagcacgcacctttacgactatcgacatgcactattgtgcaacggtttgcttctttttgcaaacgatagcaatatcggcgcgtcataaatcatcattttcaggccattgtcaacaaatatcccattaattcagtcatttttgcctcattatcgcaatgcaagcgttcgcaactatgagagcgctaacacatctttcatggcaatcgattgccacttattcccatcaaaaaaacaacacgccgacgctatcgtttgcaaatcatttatcgacataccgcaattcccgccacaaacaataaaggcccgcccgcagtagcgggcaggccagcgcaatcgcagcgcaaccggggctaggcgttccaccgttcgatgacgttatctcccttatagacgctgagcaccgagtagtgcgccgtatccaaacgcagcaaccgtgcgaaatgcgggtccacgcccagccattgcgaggtgaggatgcgcaggatgtgcgcatgagccaccaacagcacattatggccgtctttcagcagcggcgtaatctcgtcgatggcgctcttggcgcgtgccgccgcttcttccagcgtctcgccaggcccggcatggaccggcacctgttcgcccgaaggcaaggtctcgacccagtcgccctccagcgtgggcgtcagcgagcgcggcccgtcacgccacacatcccattcaaaaccgctggcctcactcacctgctggcgcgtacgcccctcggctcggccgtaatcccattcagcgatgccgtccaacacaccgtggtccgcaaaaccagccaattcagcggtttggcacgcccgcttcagcggactggaaaacacacagctctggctgaatccttcggggaaggcctcgcgcaggcgccttccggcatccgctgcctgctgctcgccgaccgcggtcaacgggatgtccgtgcgcccggtatgctgcccggattcgctccacacggtctggccgtggcgcagcaacaccaaaaatccattgccgccacgagagttctcgacggcaacggtgccgttcacgttctgttcgctcatgcctccactctagtctgcgctcgttcatgactccaccattaacgcccatcttttgcgctgagatgattgagatgctattagactgagagtcatgagcgacgaaacgaacaccgacttcccctccagcgccgaccgcgcggtcgacagcctgcaccgcatcgacgagaaggtcaacaggctgcgcgaggaccggctcaacgaccctgattctctgggcgacaagctcatcaagtcggcagtcccagcgctggcaggcttggttgccggcaaagcattccagatgatatgggacaagggcacaagcaaacgcaatctgcgcaagggactggcggcagacgcgccgcaaagtctggcaatgagtctggcattcgccgccgtttcggccgcgctcggcgcagtggtttcgcagctgtcggatcggggctccaaggcgttcgtcgaccaccgccatcgcaagcccagccgctaatcccccggttggatgatggtttctgttggctgactgatgactcatcgctggaatttcgtcaaggaaccatcagtcaatcgacaggaaccatcagtccagcacagttccgccacacaatatcggcatttcactgtgaggtaatccaccgtggcgtccggcgtctgccgtgcgacaataaagccatggttaccaacgcaacaatcgaggctcttctgggccgccgctccatccgtaagttcaaggacgaggccatcgacgacgatacccgcgccacgctcgaaaccgtcgcccaacatgccgcgtccagccagttccttaacgactggtccgccatccgtatcaccgacccggccaccaaagccaagctcgccgaattcggccatcagccgtatatcgccaccgcgccgctgctgtacgtgttcgtcatcgacgagcaccgcaacgcacgcatcgccgaacgcaagggtatcgatcccgcttccgacgaattccatctcaagtacagctatcgcttcacccaagctcagaacgacgccgtgctggccctgcacgccatggagaccgccgcctattcgctgggaccgggctgcgtgattctcggctctctgctcaacaacatccccggccttatcgacgtgctgaatctgccggaatacacgtatccggtgctgggtctggccatcggcaagcccgatcagaacccgaccgtcaagccgcgcatgccgcgcacgatgcagttcttcgagaacacctacccggctgacgccgatggcgtactcgaccagctgcccgccttcgacgaggaagttcaccggtactacgatctgcgccaagccgaccgtccggtggacgctttcagcgatcaggtcgccacgatcagtcggcaggatgtcagccatcagacactgctcgacaaggccgccgctcagggcttccgtctggatcagtgagaccagaaccaacgagatagcctcggataggctcgtcactgagtcgtctcggtctcagcactgcgacgactcagttccaacacctcaacatttcatcaccggataccggcaaaattgcacagccatcccgccggtgtcgcaccatcaacaaacgttcacatatcagtcccattatgcggacaaccaacggccagttttgcaagaaaacccgccaaaccagcagtatccgcaccagtggtgggaatagactgcatgtggccgcaatgactacgaaccggaaaagagggactggatgcggacggtttggcaagtctttctacgcgattgcagacgtatcttacgcaatcccgttgccgttgtggtgacgctcggcgtagcaatgctgccctcgctgtacgcatggttcaacattctcgccaactgggatccctattcagccaccggcaatctgcaagtggccgtagccaatgaagaccaaggcaccaccaacgatctggtcggccatctcgatgcgggccggcaggtcgtcaagaaactcaagcagaacgacgaactcggctggcgcttcgtagacaatgaggaacaggccgtccacggcgtggagaccggcggatactatgcagccatcgtgctgcccaaggatttcagcgccagcttggtcgaatcggtgaccggaacctccaaacagccgaaaatcaagtattacgtcaacgagaagaagaacgcgatcgcgccgaaaatcaccgacaccggcgccaccaccatcgatgagcagatcaactccgccttcgtcaccacggtagccaccaccgttgcctcggccatttccgaaaccggagacgatctcggccaagccactggcaaagtccagcacgatacgatcgatgatctcaatacggtgatgtccacgctgaacaccgttcaggattcactcaccgacttacaggacacgctggcccaatcagacacgattctcgccgacgccaaacagaccaccgcctcactcaagcagaccgtcgcggccgcgcagaatgcctcccgccagtccggcacactgttggcggaaacacaggccgggtcacaagccttctccaccacactggtcggcgcgctcgacagcagttcagcacaactctccggactggccgtccacgtcaacaacgccgccggcagcatcaccggctccttcaacagcgcgcagaactccgtcgacaccatcaccaacacactttcggccccactgaacgccacccaaacgtcaatcagcgatctgaaagacgcgctgaccaaagccggcatcggcaaagacaccaccgacccggtcggccagaacatctggaaacaaatcgatgcgctcgactcattgatcagcaaacagcagacacagctcaacaccttccataccgacaccacacagttcatcaactccggcaaagacgccaccacgaacctttccggagccatgaccaacaccaccaccggcggcatcgcggcgctgaataccgcgcgcggctcgctgaccggcaccgtaatgccgtcgctcacctcatcattgaacagtttcgccgccctgaacggcacgctggatggcacgttgacttcgttgtccggcaccttggatcaggccgacgggctgttcgaccagcttgtcgataccctgaaccaaacgaaaaccaccatcagcagcacgcaggattcgctgcgccaggcggccagcgatgtcgccaccgtacgcaccgatatcgccacgctcgatagttccgccgcttaccagaaaatccgggatacgctgcatctggatgacaagggattcggcgagttcatgggcaatcccgtcaccctgaccacgaaagtcgtgtacgccaccgacaattacgggtccgcagtcaccccgttctacacgaatctggcactgtgggtaggcggtttcgtgctgattgccatctacaagcttgaggtcgaccgcaagggcattcgccgtatcaccgctacgcaagcatatcttggccgctggctgctgctggtcaccatcggattcctgcaagccatcatcgccaccattggcgatctggtgctcggcatccaatgcgagcatccgctgctgttcatcttggccggaatcttctgttcgttcgtctacatcaacattatttacgcgctggccgtggcgttccgccatatcggcaaagccatcgccgtaattctggtcattgtgcagatacccggtgcctccggcctgtatccgattgaaatgatgccgaacttcttccgcgaactgcacccatggctgccctttacctacggcatcaacgcgatgcgcggcccgatcgccggcctgtacgcgaaccattactggctcgacatgctgcacctgttctggtatctgccggcggcgcttttcgtgggacttgtcgtacgccggtatgcgatgaacctgaacgcgctgttcgaccatcgtttgggagataccgacctgatgatcaccgagcacaacagcatggtgaacgaacaggtgagcttgaactccgtattccgcacggtgtccgacagcaaggaactgcgcgatatcatcgctcatcgcgcgcaccggttcttcgcgcggtacccaaagatgatcgttgccggtctgacattgctgaccgtactcccgttcgtattcctggtactgctgttcgtcacccaagagaaaatcgccatgctgacctcctggattctgtcgattattcttatcgacgcctatctcattgtggttgaatacgcacgcgaagcctacgccatgcagcttggcgtcagtgccatgagtgccgacgagttccgcaatgtgatgctcaacggatatgtgtggcggcgtttccacggccacggacgtcacgaagcggcgatgggcagcaatccggatatcggcgaaaccactgaacgactcacactgttcggcgatcaggccgccgagccgactgcgcacaccgcacagttcgagcagtccggtcagtccggtcagtctgggcaaggaggcgcacgatgaagcttatctggaaaatattcgtacgtgacgtgcgccaagccacccgcaatgtgatcgccgtaatcgtggctatgggattggtgattgtgccggcactgtacgcctggtacaacatcgccgccagctgggacccgtacggcaacaccaaggccttgaaggtcgccgtggcaaacgtggataagggctataagtccgatctgatgccgatcaccatcaacgtcggcgaaaccgtgaccaatacgctcagggccaatcatgaccttgactggcagtttgtggatcgtgctaaggccatcgatggcgtgaactcaggcgaatactatgccgcgctgattattccaaagagcttcagctccgatatgatgacgctgttttcaccgaagatcaagcacgccaagctcgaatactatctcaatgagaaaatcaatccgatcgctccgcatatcaccgaccagggtgctaccaccgtggccacgaccatcgaccagacatttgtgaagaccttggcgagcgtggcgctggatttggtttccaacgtggccgattacgcgcaaagcccgcaaatggagcagtacgtcaacaacgcctccagtcatattgccaccatgtcgtctcgtttgaccggcactgcgtcgcagatggattcctatgccaatctgctcggggccgccaacagcatcattgattccaccgataagctgctgggatcaacaggctcagctgcggccataaccaaaaaggcgttgaaacagacccgcaacggcgtctccagcctcgacaaggcattgtccggagccaccgatggcgtcggtacggcattgcagcaggccagctcatcctacgacaccattgccaagcagatcgatgccgcttttgccgatgtgggctcacaatcctcacagatatcaaacaagctgaccgatatgcaatccaaagtggaggctcaggccgacagctttggaaagtatgccgccgctttacgagatctcgccaaacaagcggcttcactgcccgtgggtggagataccgttgccgctcaactgaacgcggctgcagaccaagccacaaaggcgcagcagagcatgcagcaagccgccaccgcgctaggcgatgcggccacgcacatagcaaatggtactgccgatgccgatacagcgcgtcgagatctgaaatcacaaatcgccgccgccaaacaatcgattactcaggcttcagacacgtacaagagcacgctgaaaccgcaactgaacaatctgacctcgtccatggacgaagtggccacgcaggcaagttccgtaatcgacgggcttgcgtcgaccgtcagcagcgtgtcaggtctttctggcggcgtttcagacagcctgacggatatccagtcggccttgactgacgcagctagcgctttgacccgttcggcgaagaaactcgacaacttgtcttcccaactcgcctctatcaccagtggcggcaccaacgacctgtctgtgatttcctctgcgaagcccgatgccattgcttccatgctggcggcacccgtagcggtcgaccgcatcgcgctctatcccgttgccaactatggttccgcgatggctccgttctacacgattctgtctatctgggtcggtgcgatcattctggtcgccatgttgaaagtatcgatttccgaccatgagaaggcccgtatcttagggttgggcaatgatctgccgctcggttcgggagtgggtcttcgcgaggccatgattgccgggcggattgccggaccggccgccgcgttggatgtgctgaagaagccgcgtgccgagtcttccggcaatgcgcggcagttcggtttacgcttgcaccacgaatatttcggccgatacatgattttcggtttccttgctttgctgcaaggtacgctggtgtgcctgggcgatatgttctatctcggcgtgcagtgtgagcatccgattcagtttttgatggtcgggtggttgtctgcactggtgttctcgaatattgtgtatacgctggccctatcgttcggtgatatcggcaaagccattgccgtagtactgctggttatgcaggtagccggttccggcggcacattccccattgaaacactgccgacgttcttccaggtcgtttctaaatggctactgttcccctatgcggtggatgcgatgcattcggccatggcgggctcattcggcatggaatactgggtttccatgggcaaactggcactgttccttgttccctcattgctgttgggacttatgttgcgcaagccggtaattcgcttcaacgattgggttatccgcaaccttgaaagcaccaaggtgatgtgagtgttggacggagtgtgtccgagcgccctgaacgcttagcagcctacgacctggcgtgtttggaccgtaacctgcctcagatacggcgttggcgaggcctgtggagcttctgacgctaacgtctacgtggcttgtagccctttttacgactgtgtggcttgagttgctggttcagcggcacatgccggtaactggattgcggatcgcgatgtgtgaggtgccagcatccgcaatattcgcaacggtacacccatagctcggctccacgctcgatcaggctttgatcagcggcacgctgagcctgcgccttatcgtggtacatgattttattcgacgtggcgcaacgtttaggggtgaagtaatgcatagcagaagccagtgtagagcgaccccataaccaagccagtttctggctcccctctggaggggagctgtctgcgcggcggaccggggggcccgggcgtcgggctcccacggtcgcggacgcgccgcgccgttcggcctcgccgtcggggctggccgggaatggtcccgggcgtgggtctcatgggtatgcggggaggtcccggtgcccgtgcgggttcgggccggggccggttccggatatagggaaagccccggtacctttgaggggtatcggggcttcctgtacgtgtggtgcggcggcgtgctactctcccacaccctgtcgggtgcagtaccatcgccgtgccaggccttagcttccgggttcggaatgggaccgggcgtctc

SEQ ID NO: 3556 - DNA, 22935 bp, Unknown
  R85_18m  MAG No. k141_21053
aaggaagggaatacagtgaaacccatcaggttcacggcgaggatgattgccacactcgtcgccgcagcgacgctgtccagcgttgcgattgcgaccacgacggcttctgcagatgaatccgtaccggcagcgtccacggtcggtatcggcggcatcgccgccagcggcgccacggatgcgttcagtgaaaccaagtacgcggccaccaccgaaggccgttacgaagcctcggtcgacgcgaatgacgtcaccggctatgcagccgttccgcagacgcgtgcggccaagccgaatcttgtgcagctgcttggcgaatatgacagctactggcagccggccaccgaaaccgctggcggcaaggtgctcaacaagaccgtgctcgatcacgatgacgcctacatccaacagatcaacaacgccgccgccgaagacggagacggcacgaccgctaccgcacagcagcagcgcgctctggtggacgcggatatgagcgccgatgagaccttgccggactccctgggcccggtgctcggcgaatatttttccgccggtctggccgacggcagcctgaagaaggtcgcggacatcttcaagtacgatacaatctccacctctaccgccaagaagcacttccagcatcctcgtcctttcgaggatcgcaccaatggcggcaagaacgacatcacgaacatcaacgagaacatcatgcgcgtccccgactggactgacgcccaaggcaacgcgcattccgccgaatacgacgggctggtcggttccggttccttcccgtccggccacaccaccggcgcatactcctggggcgtggctctggcaggcatgctgccacaacttgctccagagatcctgacacgcacctccgaagcgggcaacaaccgcatcgtgctcggcgtgcactatccgctcgacatcatgggcggccgcatcgacggcgaagtggcaaacggctactactggggcacttactacgacaagtacgtcaagccggcatccgaccagctgcagtcctatctggcagccaagtgcgtggcggacggccacgccaccaaacaggacaccgattacgcgactgtgaccgaatgcgtgaacaaccttggcgcgaacgcctccaacggttaccagaacgcctttgtggatgccgtgagcaaggagcccgtcaccgaccgcgcctcggcgttgcgcgtctacacgaaccgtctgacctacggtttcggcaagaccaccgccggcaccgcattcaccgcgcctgaaggctctgccgacttgttgaagatcgcgtacccgaagttgcaccgcgaccagcgcgaagccatcctcgccaagaccgcgattgacggcggctacccgctggattcctcatccgacggatggcagcgcatcaacctagccgcagctctgagctccaccgtgacgttgaacgagaacggcgatgtcgtcaaggtcgagcccggcgcagccaccccgtccgtgatcggcgaggaatacgccgacaagggcaaccacccggattccgacaacggtggctccggcaaccccagccaacccggtaaggacgccaagcaagtgaccgtgttcgacatcaccgacttccacggacacatcgaaaccggccagtgggtcgaagccgcttatcagaagcttgccgtgcagcacaacccgggcaacagcgtgttcgtctccagcggagacctcgtgggtgcttccccattcgaatcctcctatttccaagacactccgacgctgaacatggcaaaggcatgggatctgagtgtgagcgccttgggcaatcatgagctcgacaaggacactgcagacttcaacaaccgcatcgccgaaccgaagtacggcatcgactgggtcgccgccaacatcaccggcggctcgctgacttccgaccgtctcaagccgtataccatcaagaccgtcaacggcaaaaaggtcgccttcgtcggtgccatcacctccgatctgaagaacgtagtctcccccagcgtgatgcaaggcgtcacggtgaccgacccggttcaggctgtgaacaaggtggccgaccagctgtccgatggcgatgagtccaacggcgaggccgatgcagtcgtggccctgatccatgaggatggcgacaccatcgcctccgacggcgacggtctggacgctaacgtcgatctggtctacgcaggccacagccaccgcaacgagtacggcaccaccaccaagtccggagcgccgatcatcgaggccggcaagtacggccaggatgcagctgtccaggatctgtacatcgagggttccggcaaggattccaaggtcaccgtgcagaacgcctcccagtatgacgtgacgtacgtgaccaacaaggacggcaccgctccggccaagggattcgagggtgacgacaacggcccggccgccaaggtctacaagcaggctcaggcggattccgccgaggctggtaagaaggtcgtcggcaccatcgacaagtcagcgaatttcgccaagggcaactggagcgccgaaacccagctcggcacgctgaacgccgatgccgcactcgaatccgccaagaagacgcccgtgggcgagaaggcctccatcggcttcatcaatccgggcggcctgcgcaccgacaacctcgatcttgacggcgacaagcagatcaccgtcaaggaggcgtacagcatgttgccgttcggcaacgataacagcgtggtcaccctcaccggcaagcagctgaaggacgtgctcgcccagcagtggcagatcaaggacggcaagtccaatgtggtccgtctcggcatctcctcgaacgtgaccttcgtgtacacgctggtcgaggacgccaacaccaaggcaccggtcgccaccgtctccgacgtgttcgttgacggcaagcagatcaaggacaccgacaccgtgacggtcgccggcaactccttcctgctgaccggcggcgacggcttcaccggttttaccgcgcagggtcagccgcagctgaccggcacggtggatgtgcaaggtctgatcgactaccttgccgatcacaaggatgtcaaggccgatgactcgcctgcaggcatcgagctcaagtcctcctccgttgaaggcaccaaggcatccctgaccttcgacctgccggtctacgcgaatggccctaagccaatcgccctcggcctgtatgtcaacggcgtggacttcggcgtgaccaagctcggcagcgccaagccgtctgagttcaccgtggccaagacgctgagcgccgatgaagccaagacgttcggcggcaccgtctccaccgtcaacccgcagctgctttacacggacgccgagatcgccgccgccgaaaaggagcacgccaacggttccggcgaacaaggtgggaacaacaaccaaggcggcaacaacaaccagaacggcaaacccaacgccgacaagaagccgacggccaagccgaacaagaccgatctgccgggaaccggtgcttccatcgctggaatcttagccgcagtcagcctgctcgccgccgccggtggcgtgaccatcgtgctgcgccgtcgccagcaacgctgaacgattgtccgacgcctgtacaggtacggcaataaccgataactgaataccgaggaatagccccgcacgtcatagcatgcggggcttttccatgcctgttgagcctatttccactgaggacgacaacggggaaaacgacaagcacatacaccagctccggcagccgccgcacactgtaacgacactcacatcggcggtctccaaatcgttcacagtacgctggaacctagcaataatcggtatctcacgacgaaggagattatgtatggccgatgatgcgatggacgcgcggctggagcaggcactgctcggcatgcaggcgaaacacgcacatgatttcgatgcgcctgaaaacggcccggcggctcagggcggcaacgaactgcatgactttgacgtgaacgaattcctccacggcctcgacgccatcttcgacgcccacaacgccgcagaaaaggcgggcccgtatcttgaacaagcggcggtcgacgcggaaaacgccggagacgaagccggactgctgaccgtgctcaacgagacgatggggttctaccgctcgcaaggccgtcacaaggagaaccagtggatcgtgcagcgcgcgcttgagttggccctgcacatggggcttgagggtaccgaaagctgggccactacgctgatcaattgtgccactgccatgcgcgcggccaagcggtacgatcaggccgaggatctgtatcatcaagcgttggattgcgccaataagaacttcgctcccaacgaccgacgcctggctgcgctgcataataacctctccatgttgtacagcgaaacgaaccgattgccacaggcggaaatcgagctcaggcaggcgttgcacatcgtcgaggcggcgagcgtgaatcctgatgccgacatcgacgtggcctcgtcgaacaccaatctggctctggtactgctgcaggagagcaagctcaaggaagcgcacatccatgccaccaaagcgttgaccatctatgagactggcaagctgacgcactcggcgcattatgcctccgcattggctggctgtgcgcaagtgctgtatgtcgaacaccgatatggcgaggcggcctctcattaccgcagcgctttggcggtgatcgccgaatgctatggcaaggacaccgattactatcgcgtcaccgaggcgaacctgcgcgaagccgaggcgcaaatcggtaacgatgacgtgcatgcagcgaacagcgccgatgcaaccagcaccgaaactaataccaacatcgatgctactgccgaaatcgctgtgtccggtctcaaattggcacgcgcgttctggacacaggtgggcaagccgatgattacggcacagtatccgcaatacgtgggccgcattgccgccggactggtggggcatggttcggaatgctatggctttgacgacgcctattctcaagaccatgattttggcccacgcttctgtctatggcttaccgatgatgattatgaggcaatcggcgagcagctcgaggccgattatgaagcactgccacgcgggttcacgatggacgcgcaaggccgtgtgacatttatcgatataccgttctcccccaccacgccccgcgcacaaggtgccaaccgccgcgatggcgtgttccgcatcggtgacttctttgagtcgatcaccgggtatcgcactgcgcccgcgcagaccgcgccgcatgagtggctgatgctggctgaatcgactctggccgcagccaccaatggcgaagtattcgcagaccccactgggcagttctccaaaacacgccaagggttcaaggatatacccgacgacgtgcggcttgccttgatttccaagcgattgggcatgatcgcccaggccggtcaatataatctgccgcgttcgttgaaacgcggcgacggcgcggccgcatggctgtccatccacgagttcgtgcaggccaccgcctcgttggtgttcctggttaacgtgccgatggtggtgggctatatgccgtattacaagtggcagttcgcagcattgcgcaagctgtctggctcgatgttcgcgctgttgccgaacgtgggcgaacagttggaaaccgtgatgcgattgagttcgacagcctgctatggcggggccggattcggcgaaggcggcaagggcgcggctccagcaatcgagaaaatcaacgatgttgtggagcagattgcggtggatatcgtcagggaactcaaacgcgaacacctgaccacgtccggcgagaccttcctcgaatggcagcgcccgtatgtcgaggaccacatcgtctccgatgatccggtgcttaaaagtttgtagattcaagctccctctgtcacggcttcgccgtgccatctccctcatcagagggagatattagtgaaaggaacgtcgatgaccaacgaactgactgatgatgaactgcgcgaggctattgtgcgccatgaatgggatcagttccagcgcaccaacaatgagggtggacgcgcggcatgccaaggcaactggccggtgttccaccagatgcggctggcccagttcctcacatgggagcggccattactcaccagctatgccgctgatcttgacgcggccgaccacgtgggccgcaacctcgtgaccgaaaaatacggccgcatgatggcctccaccgcgccggaagatttcacgaagaacatagagccgtatattccgcgtccctctgaagagcgcgtggcccgtcaggaacaggtcatcgcccagcaggtcgcctgggccaaggatttccgcgagcgctaccccaagctcggcgaggcgatgcgcgtactcaccaccaccgaagacacaccatctgccacctcattcgaaacctatctgcgcggcgagcttggtacgtattccgaacggaccttccagctctacgaggtgatgattagcgagcgcgccgcagccagcccgcaacgcaatatcactgaggaaaccttgttgcacacagtccagctcggcggtttcgacactttggatgaggctgaagccgctcagcgctgacgacagtgcctccacgccgtcacgccccatccaccttcccgaatttgtgacgctcacggcgactcagtggcacatattcgggaaggagccggtaacgaccgtgaatatcacagactgaacaacccccagaaagacaatatcgtcaatgtgacaagtgcagccagtgtcaccatcacgcaaatgacacgacgcacgccgataatgctggcgcgataccgccacatacgttccagttcccacgcgaacagcacgaccaacagcacggtcagcacctgcaatgccctccacccaagggaaaacaactgcggttgaggcataaccaatacagccgatacgcctacggcgctcatatagccatacaacagcacggtaatcaccattaccgctgtgccgataccggcagataagccggcaatgccgtgcaacgtacgctgttgggcggctcccagcccactcggcgtcgcatgcatggcccgcacagtcgccacactacgtcgcccggccagcaacgtctgtagccaagaaaacacagtcaagccaatacctaatatcgccgccatcacgatcagcacgggccctgccaccatcagaccggccagcacgccgagcgagccgacgataccggatctggtacgttgcggcgcggcgaagcgctggtgaggtgtcgcaccggcgacttggggcgttgcccatccatcggctttggttccggcagtcacaccgttcacccaattttccagcgcttgcgtatagccttcggccaatggcaggttcggggtgaataagccctcaccagcccgcatctgatggttgccggcgaaatagcgtacggtgacgttctcgttgccggacttgttggccgtggcgatgatccgctgcgccccctgttcgatgggcatggccgtatcgtaggtgccgtagttcaccagcaccggcatggtgagggatttcagataccggtcggcatcaaagtcggcataggccagatcgaatggcgcgtagtccagcgacatcaatttggccatgtctttgaccacgggcttgggcgcgccggcctcatgcgtataggcgctgacagccatggccatttgctcacgtccattgaacaccggtgcggatgtaagtatggcaaaggcaatgtcttgccgtttcgaggttagaatcgtggcgatccaggtgccttcggattcggcgtagatgccggttttggcggggtccacgccgcttatgccacgcagcacgtcgagcgaacgcccgtattcgcgagcaaaacgcgggtagtcgcgatgcagcacggtgtagttgtcgttgcgcttggccggcaccaaggtcacgatgccggcagaggccatggcgttggcgatatcgccgaaatcctcggcaccgctggtaccggacccgtgaatgaacagacaagccgggcgtggcccgggagcgtcgaccggttcacgtagtacggcgggtagcgtgacgccgtcgccggtcttgatggatagtcgggtttcacgcgtacgatatcgcccctcgtggggaatgttcgcatgggcaggggtgatggtggtgtcggcagaagcgatagcgatgtgcttggtgtagggccgtgtgttccattgcggcatcatcgcccagccaagtgtggcgaataccagcgtcatcgccatcgcggtggcgatgacgctcgctacccgccgcgccgaaatccgtttcatagttactatgcctcccccatcagcatagaacggtcggctcttatcggtcggctcccgtcataatgtgcttctactgggaccgtaatgcaatggttgtaacgctattttctcttcttgacggcaccgactatggcccatacaacggccactattaccagaataagtcccactacggcgcagataatagccgtcagcaattgcggattcggcgagaacagcgaaatcatccgatccggagatatgcacccgaaaaccagcgcgatcacgccgataatcacgcctaatagtccgaataccacagtaagcgcgctgatgctctgtttctggatgttcttggcactcttgacatccttagcattctggacgttcttggcgctccccccaggctggcatggtttgccggcggtctgagactgctcataggaaggttgcgctgaagatgctgcgtacatcggtacatcatcggcagatggaatcggcccaccatccccctccacggcatcggcaactgcttccagggcaatccgatctgtggatggttcgatgggcgatggagaggcagctgttgcctgcgtatccacatccgagaccgacgcatccgcatgatcgtcggggacgggtagcacagccgttttgtcatcatccgctgcggatggcagcaccgtggtatcggttcggtcatcgacggtcaccatggttgtggtctcggtggtctcgtcggtttcggaaggtatggccgtggtcggtgtcgcatcctcgatggaggcgaattccttggtttcatcagtcatgattccatctcctggttgtaacggcttgatcattccgattgcccggttgtgttcttgcttgtgctgttgccgtcgtatatatcggcaagcggctggaacgtggagcctttccaatcggaggcgtacaccacgttgacacgtgcttccactgcatagggaatattgatttttaattctgggccgttgtccggcatggcggatcccttatccaaccattcgtaatcaggcccattcatgggattggtggcgctttcagctccgaagaaaacaaagcttagacccatgtagttgttgtataccatctcgtatttgccgccgacgtcactcgaagtgaagtaggagtcggcggtgccgaaggcgtaagtgcaggaatccggcagaacgatatgcacttgcgcctgtgttgcggctatggtgatggtaccgaccgggcaattactgatggaggttttgccatccagcatcttcactgtgtgcggtccatgtgtcttgtcccaatcggaccaatcaatgattgcctgatcggtgttgtagttttcaccgttgaacgccacaccttgctgcaatgtttcgaacgtggcatcgctggcatcggcaacgaagatgccatccttttgcacatcgttcatgccgtcgctgtttctcgcactgacagattggctcagtgaaacaacagtattgatgccgctggcaccaagatcacggtagtgcacgccatacgtgcctgaaacgatggtcatgcagagcgcgcatccaccggcaaccagtccgagaggaatcagaccaccggtacgccgccctctgaatccgagaatgatgaccaccagccccatcactatgcatactgcggcaatccagatggtgctcagacgcataatgccgataatgcccatgtcgtttacccaaatcagtcccatcagaccggcaaaggagaggaaggtaaggcccagtatgctcaagaccacgattgggcccgccggcttgcggcgcttggactcggtgggggcataagccgtcgcattcatacggtcgggggcaaacggcccgttgggtactgtgccgggcatcgcgctgggcactgtgcccggcatcacgctgggcatcgactgatagacaggctgtgaaacaggttgtgaaacactaggcgcggttcgtgaaacagattgtgaaacaggttgcggagctgaatacaaaggagatagagggaccggttgcgcggctggatatgaggcaggctgtggagctggatacgacacaggctgtgaaaccggtcgcggcgcagatgccccgaatccgtacccttcctgctggcgaatgccgcttttggccaacaaccatagcgctaaggcggcgagcgcaatacaaacccaccccgcacctggaatcacgattgccacggctaggaacaggaagcatccaagacaattccagtcccattggccggcaatgaggtcctcggccaagatgtgcccatcgcgtacatccggcatcagaaaccagccgagtgcgtacagagctgcgccaaaaccgaagaacaatgtacatacaatcaccaacgcacgtactagtgtggggctccagccaagccgtaaagcgatgccgctgcatacgccaccgatccaccggtcgtcgccgcgaaccagtccactggatcgcacccaagtgaagaagcgtcgcgatgtcttgtttttttgcggaccaggctgcggctgtggctgatacggattcgcgtttggattgctcatgattccattacaccgcccgaccactgccacaacgctcggggaacaccctgattgttccctgaacaccgggtaaaaccccggccgcaacgccctgagcgcggcacaataggagtatgacgtcatctcccgaaccattgctgcctgcgcgcatgccgttgatgcgcccccggcagggccgttggctcaccggtgtgtgcaagggcatcgccctgcacttgggcatcggcgtggcatgggttcggattgcgttcatcgctctgaccttcctctacggcgcaggcatcatcgcttatgtattcctgtgggtgttcatgcccgccggagacccggtggcggctgcggctcgcacagtgcccgttgatcaggcgccgcttgcgcgaggcaatcagccacttgccgctcatgacgacgaatcggctgccgcaccggaatcattgtccgaggccatccaacgtgctccgaaaccggccgtcgtggcattggccggtttcgcgttgatggccaccggactgctgctcaccagcaccggtgcggatgcccagattgtgcttccgctgctggtagggttgggcggcatcgcactggcatggatgaatcttagtccgcgaggcacgcagctgttgtctatgttgggcggcatcgcactgattttcatgggatgggcattgtatgtgcataatgtcagcattcctgggtggggcacctctcctcgacgcattgttgccagcggattcatgatgatcgtcggtatcgtggtggcggtgatgccgtgggcgaacgcgatgctgcaacgactcacccacgagcaggcattgaaggaacgcgaagaggagcgcgcggacatgaccgcccatctgcatgatggcgtgctgcaaacgttggcgctgattcagctgcactccgaggaaccgaccaccgtattcgccctggcgcgtagccaagagcgcgagctgcgcgaatggctgtatcaggaacgttccacatcggatcgttcggtgggagccggattgaagcagatcgccgccgaggtggaggacgagcacggcaagccgattgaggtggtcaccgtgggcgacgcgcggccgagtgcccagaccgatgcgctgctggacgccacccgtcaggcgttggtcaatgcggtcacgcatggcggcgagccggtgtctttgtattgcgaggccagcgacacgatggttgaagtgttcgtgcgcgaccatggcgaaggcttcgatatggacgccattccgcccgaccggctgggcatccgcgaatcgattatcggccgcatcaaacggcgcggcggtacagtggagatagtgtccagggccggctggggcaccgaggtcagaatgcatatgccgatcgcgctgaaagcggcgcagggagaacatcgatgagcgagaacgagacagccaagattcgtgtggccgtggtcgatgaccatgagatgttccgtgcgggcgtaatcgccacgttgcgtgattccttcgatatcgtcggccaagcggcggacgtgcccggttcggtggcgatgatcgcacagaccaagccgcaggtggtgttgctggatgtgcacgtgcccggcggtgaaggtggcggcggtgccgagatcctcgccaaatcgcggccctactcccctaccactgtgtttctggcgttgtcggtttcggatgcgccgcaggatgtgggggcggtgattcgcgccggcgcccagggctatgtgaccaagacgattaccggcgctgatttgatttcatccatcaagcaggtgcatgagggctatgccgtgttctcgccaaaactggccggttttgtgctttcggcctttcagggtgtgccggcggcggggtctgatggcggcgctgatggtgcggcacgggctcatgatgaggagctggaccggctgtccgcccgcgagcaggaggtcatgcggctgatcgcacgcggatacacgtataaagaggtggcggccgaactgttcatttcgatcaagacggtcgaaacgcacgtgagctcggtgctgcgaaagcttcagctttcgaatcgcaccgagctcacccgctgggccgccgataggcgcattgtgtgataaacgacagatgagctccctcatcagagggagctcatctgctcatatcactcggcgtcgcggaaaccgttggggttcttggtctgccagttgagggaggaggcggccatgtcgtcgatggtcagctcggccttccagccaagctccttctccgccttggaagcgtcggcgtagcaggcggcgatgtcaccggggcgacgcggcttgatcgtgtacggaatcggatgaccggcggccttctcgtaagccttgatgacctcaagcacggagtagccgtggccggtacccaggttgtagacgaacacgccttccttgtcgatgtggtcaatgacggccacgtgacccttggccaggtcgaccacgtggatgtagtcacgcacaccagtgccgtcgggcgtgtcgtagtcgtcgccgtagacctggacttccttgagctcgccgaccgcgaccttggccacgtacggggtgaggttcgccggaatacccttcggatcttcgcccagcaggccggactcgtgtgcgccgaccgggttgaagtagcgcagcagcacgatggtccaggacggatcggccacatgtacgtcgcgcagaatctgctcctggaacagcttggaggtgccgtacgggttggtggtaccgccggtcggcgtctcctcggtaatcggcagttccttcggcgtgccgtacacggtggcggaggaggagaagatgatcttcttgacgttgtgcttcttcatcaccttgagcagcacaagcgtggagtacaggttgttgtcgtagtattcgatcggcttggccacggactcgcccacggccttgagaccggcgaagtgaatgacccaatcgatgttgttttcggtgaagacgcgttccataagcgcctcatcgcgcacgtcaccgtcgtaacgcttgaccggcttgccggtgatctgctcgacgcgctcaagcgccacgggagacgagttgccgtagttatctacggaaataacgtcgtagcccttgtcgagcagttcgatgtcggtgtgggtggcgatgaatccagcaccgcccgtaaccagaacagtagtcatatctcctcctttggaaggacttgccttcggttttccttcagtattgagcttacttcacttgacctgtttcacctagcggcaaaaccaagactttcgaggaatgtttgcgtggtggctttctgcttgaagacggccgtgttgccgaggatgcggtagcagacgctgccgagctcgtcacgtacggcttggtggatggcctcgcggtcgcggtttccggccaatgtttcagcgagttcgccccattcgagactgaattcgctgacttcatcgggcaaatcgcggccttcggcgagcgcctcctcgacgatgccgagctggtcgacgagccgtccgggcaggatgaacaggccttgggcttcgatcagtccaatcggctcctgcttgaccggccagtattcggggtgtgcatggaaaataccttccgggtactcgtcgctgatcgcattgttgcggaagatgagactcatctcatagccacgttcggtgatgatcgcgctgggcgagagggcggattggcggttgccgtccgcgtcatggctggcgatgccgttcgccgcgtcgtcataaccgacccatgcctcgcggatgatgtcggatacgtcgatgatgctctggcggtttttcgacaccacacgcacggcggtaccgggccagtcgaggatttcgaccacggcgtccggatagtcggcgagcgtgaaggcggcccaagtggcggccttgtgcatcggcagcagttcgccgccgccctggtagtggtcgtgggcgagcaccgagccgccgatgcgaggcagcgcggcgttgcatccgaggaagtatccggggaagcggtccacgaagtcgagcagatggccgaaggtgtcgcggtccacatgcatcggcgtgtggtcggtgttcacgcagatgccgtgctggtcgaagtagccgtagggcgagaactgccagaaccatgactcaccgccgagcgtgaccggcagggtgcgcagcgtgcgcttgtcacgtccggcgaagccctcgttctcatggcagatcgtgcacttcgggtagccgccggacacggcgttgccggccgccgccttcttcatgttcttgaattcgggtttggcgaggttgatggtcaccgtcagcccgtgcgagtcgaagcgcgggttccggtcgagctgggcacgcttgacataattgttggccacacagtagtcgtagaaccattgcatggcggccatgccgccgtccctgtgctcgatgagcaggaaccggtcgtcgagatcggcggggttggcggagaggatgcccatgatggtgtcggcgtaggccgggccttcctccggatcgaagaggccggcggttgtggcggcggcgcggaaggcggcgagtagggggtcgggggtcttttcgtcagagggggcctggcttcggctgccgacaatgtcttggactgcgtctgacactgacgccgccgacgttgtggttttgggtccggggtaggaatccaggtggaagagggcgaagatttggttgcgggtccagtctgcgttgcgtggatcgaggtcgagatgatccaaggcgtaatcgactagggcgtcgatgctggcgtatacctcggtcagctgatcgctcattgctcggcccccatcatgctggttcgggtatggttcgactgacggctcacttggcagcctccatgatgtcggctacgatggcgtgggtttcactggccttctgctccatctcctgcacgagtttgatctgggtgcgggtgcgcaccagattgtgctcggggtacttggtggcaaagtagatatcgccttccaagtagtcggcgagaaagcgcatgccgcattccatggtgagcaggttgccgctgaacggcagcagttcggcctcgcgcgcggtgatgctgccacgtagttcgcccacgaatccttccgtgtaggcacggaacagctcggtgctgaaatgcaccttgctgaggtccttttcgtcttccagagcagtggacgcaccaaagcgtatggaatcgccgaagtcgaacagcatggagccgggcatgatggtgtcgagatcgatgatcgcacgcgccttgccggtggtggcgtccatgaggatgttgttgagcttggtgtcgttgtgggtcacgcgcaacggaatcgaaccgtccctgagcccatccatcacgacggcatactggtcggcgtggctcagatagaagtcgatttccggctggcatgcggcggcgcggccgagcttgtccgcggcgagggcggccttgaagtcctcgaaacgatgcggggtgtcgtggaagcgggcgatggtttcggtcagctggctggcgtcgaattcggacaggaagttctggaagtcgccgaatgcgctgccggcctcgcggaacacgtccgggttcggcacgaggttgtacgacacggtgtgttcgatgaacttgtagacgcgccatgcgccgccatcgatctcggcccaggtggcgccggaggtggtgggcacaatgtccagcgtctctttgccctgagccttgagagtggaggtgaccagttcgacattgcgcatcagattcaccgtatcggggaagatgctggtgttcatctgttggaggatgtagcgggggccgtccgtggtcaccagataggtggtgttgatatggccgtctccgtaaggttcgatgccggtcacggcaccttccagcgcaaaatgcgaggcgatgccgaataaaacttcattgctttcggtcatgatgggtccgttctccaaaacgcgggaatcaggcttcacgccatgcgatgccgctgtcgggcaggtcgaagtcctcggtggtgccatcggccagagtcaccgtggtccgctgcggctgatcggtgttgttgattacgcagtacaacccttgctcggggaagtgcgccacctcgcactccgggttggacgagctccaagccgcatacttgtcttcgttgtgggaggcgtagaacagcacgcgttccagcagtcgggcgttggccgccgaatagggcagaccggagatgtacacaccgcggccttcgccataatcattggtcgcgagctgcacctgcccgccgtccgcgcgcagcagggtcacgttttcattgaccggatacgtgttgagcacgggttcgccgaagtcgatgccgcccaacggcttgatggactggccaccgccgcaaccgctcagcgggatgcggtagccggcctgttcccaagcctcgcgggccgccgggtcgaccggcacatcggcggtgatgaagtggtccggcaccaccggtgggaagtacttgtccacggagagggtctgatagcgctcctcgtccacgccaatcacgtcggccagctggaagaaccggcccgcttggaagcgcggtgccgagctcggctcgcccacgcccacgaacgcgccgccaccacgcacccaggcgcgcacggtttccacgagcttcgggttggtccacacgtcgccgccggtgaatgcggtgtcgaccgggccgccgttgatgattacgtcgatatcactatcgatgccatgcgcgagtacgtcgtcgaagctgatgaaccgcacgttcacgcgcatgccggacagggattccagaatgccgtagtaggagtaggtctgcttgttgggcagggcgtgtgccacggtgaacgccatccaggaacgcatcttgccccaggaattcagaatcgccacgttgagctcgccttcggcggccaccccaccggtgcggtcgtggatgtcgcggaattcgtcggcgatatgggtcaccgtgtccacgaacttcgggaacttggcggccaaggagaggtagccaccgtagcccatacggccgatcggcgaacgcaggatcgcgcggcgggccttacgccagttgtcgaggccttcgatgctcgggtcgttgccctcgtagaacgtgtcggggaagaagtacggcaggaagcgtccttccgtgtatttgacgcccggaatgtccgcgatcatgcgggtggtggtgccgtctccgatggagccgacgaccgcatccaaacccagcttttcgaacccgtccttatacggttcggtaccgatccactggtcgccaaggaacatcatggcttccttgcctgccgcgtgcgacatgtcggcaagccgcttgacgttctcgcgcacgaatccggagaggaagtcaatccagtcgcgttgcgccttgcggggcacgcgccacgcggagttgtaggcaccgccatccacgaaatcctccggacgcagacggtaaccgtactccttctcgaaatcgtccaatgcgcgcgggctcacggtgcaggcacaaccgaaccagtcgaccaccttttcgcgacgcttggcatcgaacaggagcgtgaactggtagaagaacgtggtgaaacgcaccacatccacctgcgggctgtccttcagccactgctcgaacgtatcgaacacgaacttgcgggtggccggatggtagatgtcgaacggaatctcgtgttccttgtctccccaatcattggtcaggtggttgtacatctcgaccgggtcccagatgatgtaggccaggaaactcaccgtgtattcgtgcatcggcacggcagcggtcacgtgcacggtgtcctcgcccgggtcgagcgtccagccggacgggtccacgacctcgcccgtggtgcggtccacgacttcccagtacttatgagggtcggcgtcacggttaggcttgagctgttcctcgaagaaaccgtccatcagcggcacatccaccgcgttggactcggccaggatacgggcggtcagcaggtagacctgcggggtctcgtccatgtgcagggtgatccactcgttgtgggcgcgggtcgggaagtaggcgctgtagattttcttgccaagagcgagcactgcctcgtccagatgcgtgccgtcggagttacggatggcgtccgcaccccacaattcggcgagttccttggtcttttcggcaaaattctcttcactgggcagcgtgaagcggccggtgctggtcatgagtgctcctttgtggggttggtcatcaaaaaactacaaagcgacgaatttgtcgcatacaaaatgaccggcgtcatcgcgggccctgggaccctgactgcgtagatccttgacgcttacggtgacgccggacgattggaatcgtgtcactgaatatgggagggacgttgcccggcaccggaaggagtgacacgacatgccgggcagcggattggttagcccttgacggcaccggcggcgaggccggactgccagtagcgctggaggccgaggaacagcacgatcacgggcagcacgccgagcaacgcacccatcatcagggcgccgcgatcggtgaacgtggccagcgagaccatgccgtacagaccgagggtcacgggcttcaaggtgtcggaagacaccatcatcaacggcagcaggaagttgttccacgtggccacgaacaggaacaggaaaatcgtcaccatggccggggccaggagcctcagcacgatggtgaagaagatcctcgcctcgctcgcgccgtcgatgcgggcggcttcaagcagttcgtccggcaccgaactctgtgcgtacgtgcggcccaggaagaagccgaacggcgaaacgcagcacgggatgatgatcgagagcatagtgttggtcaggtgcaacgtgtggaagatcgagtacatcgggatggtcagcagggcggacggcatgagcatgcaggccataatgatgccgatggccgcgttcttgccgcggaagttgaattttgcggtggcgtagccagccatcacagacacgatggtgccgatcaatgccgagacgcccgagtagatcagggagttcagcacccagcgccagaagttgccacgagtccagccaagcagcttggaatagttagtggcgatggcattgggcagctggtcaagcggcacagcaaaccacatgccgttgctaccggtcatctgggccggcgtcttggtggacgcgatgatggcccagtaaatcgggaacaggaagtagatcaacaccagtaccagcagcaccacggtgagggtcttcacggccgcggacggtcgcatggagcgaggcaaatcgtgttgcgcagcctgacgctgcttttcgagcttgcgctcggcctttttgcgggcgcgttcttcaacggttgcggagctcattactcgttcaccttcctttcggccaaggtgtacagcacggcaagcacacctgcgatcagagccatgacaatggcgatggccgaggccggaccgtcaccagacggggtaatggtgccctgagaagtgttcatggccatcatcatcggtgtatacgacttggaaatacccggatcagccgtagacatgatctgcggttcgttgaacagctgaatggtgccgacgatggaaagcagcatggccagcagggccgcgccacgcacgttcggcagcttgatcttcgtggcaatctgccaaccattggcgccgtcgatacgggcggcctcatagaggtcatgcgggatggcctgcagtgcggcaaggaaaatcagcatgttgtagccggtgaaggtccatgtggtgatgttggccatcgagccgagcacgatgttcttgttgaagaagtccacattgacgccgatggcggcaagtcccttgacgatcggcgagatttggccgttgtacaggtagacccagataatcgaggccacgacgccggggatggcgtagggcaggaagtagcccagacggaaaccggtgacatgcttgaccacgaacgagtcgatgacgatggccaacgccagtgcggcgatgatcatgatcggcacctgaatcagggtgtagagcagcaccctgccgacgccggaccagaagttgccggaagtaatagcatactggaagttctggaatcctacgaatttattgaccagctcgccaccgccgtatgcgccaccgccctcggtgacctgacggaagaagctggaatagatggcccagatgatgggcaagatgaacacgaaagtgaacaggacggcgaacggtgccatgaacgcccagccggtgcggttctcgcgcttctgagcgccggaccgcttcggcttggcggcggcacgcctaggtgctttgcccttcgcctgagtagtggatgcagtcataatacaaaacctgtcttcgcaaagaacagtaaaacaaatgacaagggccacagcgcccctgcagcaatacccccaaacaatacggaaggccggagtatgtgccccggcctttcgctatggtgatgcgaggcatcggaggtcttggacggccggctatttcaagccggcccgttgacaagacctagtgaggtcactccttgacggacagaccgaggttcttcagcgtatccaccgaggtcttctgagcggtgtcgaacacatccgaaaccttggcagaaccatcggcagccttggcggcggtctgtttcattgcagcgccgactgcggagaagccaggcatgtaggtgaagtcacccatgttgtcgttcgcggtcttgaactcagccatgacatcctgtccgctgaagtagtcggaccacttctgcggggtcttggcatccgcggtggtggcggccacgacaaggccctgggagacaaggtcatcaacctgggtgttgaaccagtcaaggaactccatggcttcggccgggtgcttggaacccttgagcacggccacaccggaaccaccatcggcgccggtcttggtgccattgccgaaccagtcaccgagctgggtgaccttccactcaccagcaccagtgccaccggcggaatcgatgaacagtggggcttcccaagcggcggccacggtgccgatcagctgaccggactggatggagttatcaaacgatgcatcccaacgcgggttggtgagggcggccttgttgtcgatcagctgctggtagacatcggccacggccttggagcccttagtctgggtgtcgacaacccaggagttgccgtcgaccttgtaccacggaccggaagcgccggcctggccggacatcatcatcatggcctcatcaggttggaaggtcatgatgtacttgccttgggcagcggtcttcttggcggtctcaatgagctcgtcagcggtcttcggcacggtgatgccgagcttctcaaattcagcggcgttgtagaagtaagtcagcgggccggtgtcctgcggcagaccgtaggtcttgccgtccacctgcatcagtgcgaacgggccggaagcgaaatcgtccttgtacttggcggcctcatcggtgacatcctgcagaaggcccttggtgaagacctcaggaacctcggagtaaccgacctgagccagatccggcgcattgccagccttgacgtcggtctcgagcttcttgatcatgtcggcggcattgccatcgaacttggtggccttgacctgaatgttcgggtgctccttgttccacttggccacaatgtcgttgaccaaggtcatgccttcggaatcgggcagacgatgcatataggtgatgttgaccacaccgccatcgctgccggacttcgtgtcgccggcagtgtcgctgccgccgcaaccggccaaaccaatacccattgctgctaccgcggcaagagcagccacgatgcgcttgttgtgcgataccatatctctactccttcctagtgaaatcatcacctcagcgtgatgactgattgctaatttaggcctttgctcttttattgtcaacttagctaacaattaccgcgcgtcccgttgaggtgagtggcgttaaaccgattcgatgctcgattgtgcgggtttgttcatttcattaactccccttacaaagcaacgtacttttggtccaccggtagacctaatgagatattggatagcggcaacaatccaag

SEQ ID NO: 3557 - DNA, 7036 bp, Unknown
  R85_18m  MAG No. k141_21291
agcgccagcgtccggttgcgacatgacggcatcggccatggacgcagccgctgactcggttgatggcgacggcgattggccggaatcggaggtgaccccaaattcgacggggccagattccgacgaggtcgcatacgggtcaatgcccacaccggatgcggcaccgtccacactatattgcgttggcctcatgtgcggtgacgatgctcgttgcccgtttccgccatccatgccttcggcggcaccattggcattgccgttaccgttgccaccattgcctccgttcccattaccggcacgctgtggcttgatcagcgacgtggtgccgaaggtcaggtcatgcccaatgttggtggcttcgagaacggttctactgcgcggttcgccttgctcattggtccactgctcggtgatgagtgagccgaccacaatgatgcggtcaccgcggcgaaccgaactggcggcgttcacggccaaagcacggaacgctttgacgcccacccatgcggttccgtaatcctcccattgtctggtagtcgggttgagtcgactgcgggtgctgcccatacggaatgtcagcacgcggaaactctcagttccgcctagtgtcggatcaccggccacaaagccggtgacggtcactgctgcttgttgatttgccatgatcggtcctttcctcggcctgctggcctgttgtttggatgtggaccgccggagcctgtctccggcttcattgccggcttgcacgccccagcggtacctccactgtgaggcatgacgtttgaagtgcacaagggcaactggcaaatgtggatactgtgacgcagttgaaattttaagaatgtggataagtttcggttatccacaacaaagcgccattctgcgactgggcagaatggcgcttgatgcgattaacgccgaggctgagtaagtgggactcaactgagggcggcgaagcgctcggcgagcgcgtcggcggcttcggcggcgggcacggcgaccttgttttcgccgttgcggtcgcgcagttcgatggtgccgtcgttgacgtaatcgcggccgaccacggcgaccagcggcacgccgatcagctcggcatccttgaacttgacgcccggagacaccttcttgcggtcatcgtaaataacctcaaggcccttggcctcaagctcggcgaccagcttctcggcaccttcaaacgccgcagcgtccttgccggtggccaccacgtgcacggcagccggggcaatcacggacggccaagccaagccggcttcgtcgtggtgtgtttcggcgatgcaggccagcacgcgggaaacaccgatgccatagcagcccatccacaccggcacggccttgccgttctggtcgagcaccttcaggtccagtgccttggagtacttgagacccagctggaacacctggccgatttccacaccacgctcgaagctcaacggaccggaaccgtccgggctcatgtcgccgtggcgaacctcaacggcttccaccacgccgtcggccttgaagtcacggccgtacaccaggttgtagtagtcgacctcgttctcatcggcaccagtgaaccaagcggaacccttgaccacgtgcgcgtcgaccaggtagcgaaccgggttcttcacgccagcagcctcggcctgcgggccaagcaccatcggtccgatgtagcctggcaccagttcggggtgctgcttcaggtcttcttcagtggcctcctcaagctcggcgggagcgaactgggcttccagtcgcttcatatccaccgtacggtcgccgggcacgccgacgacaatcacttcacgccacggctcgtcatgctcttcatcctcagggtgcttgacggtaatcaccacgttcttgaggatgtcggaagcctgccattcacggccatcagtacgcgggtggtcggcgttggcacgctcaatcatgttatcgatggtcttggcatccggggtggcttccttggaagcggcgggagtggcggaagcatcgatttccggcagctccggagtgctcagggcctccacattccatgccttgccggaaggtgccagcgcgaaggtatcttcgccgatcggcatcggagccaggaattcctcggatgcggagccgcccatcgggccggacatggcgaacacaggtacgtacttcaggtcgagacgctggaagatgcgctcgtaggcgccgcgctcgtcatagtaggccttgcgcatgccttcttcatcgatggtgaaggagtaggcgtccttcatgatgaattcacgaccacggatcaggccggcacgcggacggaactcgtcgcggtacttggtctggatctggtacagggtgacgggcaggtctttgtaagaggagtacatgtccttgaccagaagggtgaacatctcctcgtgggtgggggccagcaggtaatcggcctcgtggcgatccttcaaacggaagatgttgtcgccgtactcctcccagcgatgggtggcctcgtagggttcgcgcggcagcagggccgggaagtgcacttcctgggcgccgatgccgttgatctcctcgcggatgatggcctcgatcttgttcagcacgcgcagaccgagcggcagccaggtccagataccgggtgcggccttgcggatatagccggcgcgctgcagcagcttggccgaatcgacatcggcatcagcggggtcctcgcgcagggtgcgcaggaacatggttgacatacgaagggtattggaagtcatgtgttccaagatattcgcgtgaaccgacaagcccgcctgctattcgcactattccggccttcatcttggcattcggactcattcgtacaacaatgatggctagaagggtaggagggcacgatgacgcagccgaccgagcaacaggggaatcagccggaacccgcggagcaaccggtgtatcaaccggcccagcatgggccccgcaattttctgctgcaaccccgcaattcccaacggcagttccgcgacaaccggtatcgcaacagccaatggccatgccaccatttgcgcaatcgcctatgtcggtcccggaacaatcggcctgtccggagcggccgcgctgattgtgggtgtgcgtttgctgcaagcaccgttgatctacggcacggtgattcttatcgtcagcacggtgactgtgctgtggccatggcgggccgaattctcccgccactaccggtgggtgtggcttgctttgggcggcatcattctgattgtggcagccgcgcgctatgaggcgagcctcaaatcgatgaggacgatcgccgcgcgtattggcgatctgcgctaaatcgcgcgggcgacctgaggcagattaccaacgtccggcgatagcagtcctgcatacggggcagtgcccattgccactgtatccggcagataaacggttggcaatgattcgataccaatcgcgttccacgagcttggccctgcattcagggtttgggcaatatgtggtatcgccttcacgatcatgcacgttgccggtgtacacataattgagtccctcttcgagggcgatgcctcgggcgcgggtcagagtctcgtgcggggtgggcgttacgtccatcatgcggtaactggagtggaatgcggaaaagtgcagcggcacgtccgggcccaagtgctcgcgtatccatgtacattcagcatgcagctgggcgtcgtcatcgttgagtccagggatgagtagcgtggtgagctccacccacacgtgttcgccttctggtgtgcgtgcctcgttgaccgcatagtcgatggtttcgagcacatcggccagatgcgtgccggtcactttccaataaaattcttcggtgaagcctttgagatcgatgttggcggcgtccatggcggcgtagaagtcgggccgggcttcggcgctcatgtatccggcagtcacggcgatgggatgaatgccgagcgctcggcaggcttcggccgtgtcgatggcatattcggcgaacacgatcggatcgttataggtgaacgccaccgaatcgatgccccggtcggccgcgacctgcgcgattttctccggactggcttccacgccgagccggtcgaaactgcgggctttggcaatatcccaattctggcagaatcggcaaccggaattgcagccagccgtgccaaaactcagcacgctggaaccggggtggaagtggttgagcggcttcttttccactgggtccacggcgaagccggagctgcggccgtaggtgtcggagacgatgagtccgtcgtggtttgagcggacgaagcaaaagccgcgttggccgggcttgaggacgcagcggcgcgggcatagttcgcagcgagcgcggttggtaccgtcgtggaattgcgtttgccagcgggctatggcggggttacgaacatctgtgactgacgccgtatgaccgcacgattcccggtgaccaccctctgattctcggtgaccaccctccgtcgcttcgcgccacctcccgccagcgggaggggacatggttgctgcgttagtgctcggcataggcggtcacctcgtagcgttgacagtcgatttcgccatcgttccagtcgtagtacgggcggataccggctttggcgagcaggtgagcgacgaaatcgcgcgaatcgggcagctcatcccacacttgtggcaggaatgtggcgctgcggccacgacggtcggcgagaatcagaccgtctttgccggggcgtaatacttcctcaagttcagtgcgcgaacgtaccgggcgttcgacgttactgccgtcccgtttgacggcgtcggtctgaggtccggattgcagcgatgccagagtcgcggtcttcgagccggtatcgcgcgaatcggcgtcacaggagttcacggtaatcggctcgggctcgcccaagacggatatctccacattgagtaacgggtattccgcggcggtgaccgggttgaaacgtgggtcacgggtggcggcgtccaccgcatgtgcagctatgtccttgccgagcgagcggtgggcggccagcgaaccgatgcacccgcgtagccggccaccctcggtcagggtaacgaaacaggcaccggactcgttcagccatgggtttgcggcaagaatggacgcggtcgaatcggcggcggtcggatgctcgatatgcaaccgttcccggatagcggcacgggcgagtttcagcagcacatcaccatgggctgttcccgattcgcctaagtcatctgcaccggctggagcatctgcttctggtttggattcccacgcggcaaacgagacatatcccactaccggctcgtcggcgtctcgcattgcggggcgaggttggccggcaagcgccaccacgccgtcgtcgccggaagtggaacagccgagctcgaagagcttcatgtccttgcggccttttaacacatccagaaggccgttgatcgggtatgcgccacaggcccggcgagggtgaatcggcagatgcaaagccgcaatgtccgcaatggtctggtcatccaacgcgcgggcgacttcgtgcggatgatagtgcgagagatccgaactaatcacgatgacggtttccgggccaccccacaaagcacgcaacacatcacccgcctcttgtggcgtggcatcgcccgcgttcaacggcacaatagtgaggtctgggccgagcacggtttgcaggaacggaatctgcacttctaccgcatgttcttgtgcgtgggttgggccattgacgatcattgcgggagccgacgcgcccggacgggcatgtgtaccggagcgcaatggctcattgacagacaggcccagagccttacgctcggctgcaatgtctaccggcacagtgcccagcggcgtttcaaacgccgctgccgtggaacaggcgacgcctcgcacggccacacggtgagtcggtcccacgattaccgcgcgagtcacactcccccgccctcgttcgagcaaagcataggcaagcgcggccgccgtgccggaatacacataaccggcatgcggcacgattacagcctttggcactcccgctggaagcgtgggctccaactgttgcagaacctctcgactgtaatccaattgatggttaatgagttgcttgagcgttgtgcggtcagcggggtagaacgaaccagccaccgctggcggacgtattgcgccagtgattttgccgctgccgtctgccgcgcttgctgcatctgacgcactagccacactaaccgtatcgatttgcacaccggcccgggcggcctcgcgaacctcattgtttccacgaaatatctcggatagcaccataactaccacctcttattccatggtagccgttcagttcctcaatgaagacaagttcgcagtgtcttcttcggcttcaaggggccgattccgcctcttggagacatctacttgcatttcgaggggctggtcatccgctcaatctcacatagaaacggcttcataccaacgtcattccgccgtttttaagcgttgtctacttggacatcagccccttgaaacggaagtagatgtcccgaaaactcaaaatccgcccctcgaagtgcagaaacactcaaattagcggtcgttcgatatatcgaccgtcagaataacgcgtcctgggcgaagtcatcatagggattgaaaccgaattcgtccggctcggcgggtttgaacgagctagcaccttcatcggccaactggtcggaagccgaggccgaggcttcgcgcaggtcgccgtcgagcaccacggcatcgggcgagacgaggaacatgcgttcgttgacgccagccaaatacagtccacccagcgattcgactcgtgacagcgccacatatcccatgcccggcgcgaaggtgcgcttcagatccatgaccgcacggtcaagcgtcatgccttgcgacttgtggatggtgatgccccacgcgcaacgcaacggcacctgcgagacggaggcgagcacggtgtcgccgtccatcatttcccatgtggcctgtttcatggtgacgatgttgccgttttcg

SEQ ID NO: 3558 - DNA, 5556 bp, Unknown
  R85_18m  MAG No. k141_21325
gtgatggaaggtgagtcgttcagcaatgacgtcgatgatgtcagtggcagacaccatgccgattttcaccgcgaccggcggaatatcctcaaacaccatgttgatctggtcggcgagaatgtccggtttggtgtcctgaatagaacgcacgccggtggtgttctgggcggtgagtgcggtgatggcgctcatgccgaacacgccgcaagccagcatggtcttcagatcagcctgcatgccggcaccgccggacgagtcggagccggagatcgcgagaacagcgggaagtgtagatgttgcaatttgtgccatagtgttcattctaagtggggcccatgatgtttttcggagcggttttccttgatgttttgccgctcctgtggtgagatgggagggtttgctgattgcgattgattcatgaaatgttcgggaggggacatggctgataacgatgtactgcgccgtgacggcgtcttggtacgcatcaccggttttgacgatgaacgcaccgcatattttggcgtaatgcctaatgggcacaccacacagctcacatttccgcgtcaggaggtgttcgatgtgggcgacgtgttgctcgtcggcacggatttctatcgtaaagtgccgcatgatgtgtggccgttgaagccccgtgtgggcatcgtgcgccgtgcgctcaacgaaggcgtggtcctggagacttccgacggcctcgaactgcttgaaggcgattacccgaattcgatcatgcccggcaacaccgtgcagttcaccgacctgttcggcatcgaacgagtgctgtggcccacggccatccgcccaggcgaatccgatcacgatgacgacatcaagcagtaccgcatcacgccgggcagcgatccgtcgcttaccttcgattcgttcggcggttatgagcaggtgatcacgcgcgccaaggagcttatcgaaacgcagctgggcaacagtgcgcagatgcgtgcgatcggtgccaagcccatcaagggcgtgatcttcaccggtgctccgggcaccggcaaaacgcatctggcccgcatcatcgccaatgtggcggacgcgcagttctatctggtgtccggcccgaccatcgtgagcaagtatgtgggcgatagtgaggaaacgctgcgcatgattttcgccgccgcgcaggcggacaagcgcgccatcatcttctttgatgagatcgattcgattgcgtcctcgcgcgagaacgataccaatggcgtcggcaagcgcttggtggcgcagttgctgacgttgatggatggtttcgagtccaagggcaatgttgtggtggtcgctgcgaccaatcgtattgaggacgtggatcccgctttgttgcgtccgggccgtttcgactggcagattcctttcccgatgccgtctgagcgcgaccgtttgggcattctgcaggtgcaggcccgttcgttgtcaatcgagggcgaactgccgttggtggatatcgcacagcggaccgaaggctggagcggcgccgaagtgtgcgccatctggaccgaggccgctctggtggccgccaaggaccgccgcggcgcgatccgtgctgccgacctcgtcaccgccttcgagcgagtcgagcgtcgtcccgaattaagacaccaccgggcataataattggctcccctcagagaggggagccagagaggtttactcctgggcggtggagtagagcttgccgccttgggcggtgtacttttcgctcatcgcatccatgccggcgaggatttcttcggggctgagcacgttggcggacaccacgtcgttatcgacattggccttggccttagccagtgcctcggagtcgatgccagcagcagcctccttcacgatttgctgctgagcggcctcgccaccgaatgccttgcggatgttctgggagatggccatcgagcagaacttcgggccgcacatcgagcagaagtgcgccatcttggccggctcggcgggcagggtgtcatcgtggaaggcgatggcggtgtccggatcgtaggacagattgaactggtcgagccaacggaactcgaagcgagccttggaaatcgcattgtcacgatccatcgcgtgcgggtggtgcttggcgatgtctgcggcgtggcaggcgatcttgtaggcgatcacgccctgcttcacatcatccttgttcggcaggccgaggtgttccttcggggtcacgtagcacagcatagcggtgccgtaacgaccgatctcggtggcgccgatggcggaggtgatgtggtcgtaacccggagcggtatcggtggtcagcggtccgagggtgtagaacggggcgttgtggcacacggccttctccagctcgatgttcatacgcacggtgtcgaacggcacgtggcccgggccctcgatcatcacctgcacgtccttggcccaggcgcgctcggtcagctcgcccagagtcatgagctcggaaagctgcgcggcgtcgttcgcgtcggccagggagccggggcgcaggccatcgcccagagagaacgccacgtcgtacttggcgaagatgtcgcacagctcgtcgaagtgcgtgtacaggaagctctcctggtggtggcgcaggcaccagtcggccatgatggagccaccgcgggagacgatgccggtcacgcggttggcggtcagcggcacgtaacgcagcagcacaccggcgtggatggtcatgtaatccacaccctgctcgcactgttcgatcacggtgtcgcggaacagctcccagctcagcttggaggcatcatcctcgaccttttcgagggcctggtacatcggcacggtgccgatcggcacgggggagttgcgaagaatccactcacgggtggtgtggatgtcgttaccggtggacaggtccatcacggtatcggcgccccacttggtggcccacgtcagcttctccacttcctcgtcgatggaggaggtgacggccgagttgcccatgttggcgttgagcttggtcaggaaggcggatccgataatcatcggctcggcctcggggtggttgatgttgcagggcatcaccgcgcggccggcggccagctcggagcgcacgagctccacatcacagttctctcgggtggccacgtactgcatctccggggtgatgatgccgtggcgggcgtaccacatctgggtgatcgggtggtccttggcgcgcatcggctcatgcttgcgtccacgccattccttggtggcgcggccgcgcttgatggcgcgcttaccatcatcctcaaggttgcggcggcggccctcgtagtcttcgatgtcgccgcggtcgcggatccagtcgagacgcaggggcttcaaaccttccttcgggtcgcacttggggccttcggtgttgtagtcgtggaacggcgggttcgggcccacgccgggcgtgtcgctcagcttgatttcggtgtacggcacttccaggtcgtaggaaccatactgataggtgaacggtacggacttggtcttgcggatgtgcgccttgtcgcgctgcttggaaccacgggcggcgatgtccacgcgctgctgcttggcgagcttctgggcatccttggcgtccttggcgttggtgaacttcttctcagtggcctcggagccaggctttgcggccccttcctgagcagcctgagtatcagcagcgggggtgtgggctacgacgcgcggcgcgtagccgtgcttcttgtcgccgcggacggccttccagccttcgaccatggtgcgcgcggcctcttccgggttctcggcacccgcgatggcggagaccgcgaaccagccggcggccttggtgccggcgagcatggccatatcggctgcggtcacgccgccgcccacgaccaccgggaattcgctggcagcgcagatggtgttgatctgggcggcgtccagtgtcttgccggagccgtcgttgccgcccacggaagcctcgggcttggtggtggagacgtgcagagggccggcgccaatgtagtcgatgcagccgtcgggcagctcgttgatgagctgaacgaggctttcggtctcagccgacagacccacgatggcctcgtcgccgagcagggcgcgggcttctcgcggctccatgtcggtctggccgatatgcacaccgtccaccttgatgcccttgcggcgggcctgccacaccacgtcggcacggtcgtcgatcacaaaggccacggaatcggacttctcattgtcctcgatgatctgcgcgatgtcgcgggccatgtcggtcagctcagaggcatcggcctccttggcgcgcagttggatgaaggttgcgccgccgcgcagagcctgatccaccacgtcggtcagcggacggcctttgcagtcctccggccccaccacgaagtacgcggacaagtcgaagttgtctcgcatggaggcgtatgggtattcattactcattattattcctacctttgttgtttcttgtggaagtcttattgggaaaaactgttatgagctccctcatcagagggaactgaaactactgcaccaaaatctcggattccgccacctgttcggcggtaacattccacagcgcgtcaaggaacgcgacctggaacgagcccggcccgtgcgaagtcgtatcggctatctctgccgcgcggttgtacagcagagatgcggacagagcggcggtcaacggatcggaaaccgccagatatgtggcagccacgccacccagcgagcagcctgcaccgatgatcttggtcatcatcgcgctgccgcccggcagtcggtacacggtttcgccgtcggtcaccagatcggcgatgccggacacagccactgcacagcgggtggaagcgtcatgggaggaatgcttggcgtgctgttcggtcagatactgtgccagcgccaccgccgcaacggttgcggactccacgccatcgacagattccactccggcggggcggtgctcggaagcgtcccccacggtttcggtattgagcccccacatgttcgccagcgcgattatctcggaggcgtttgcgcgaatcatggtcgggggagcggccttgaaggcctgaagaatggcggtgcgggtgcggccgatgccggcggccaccgggtcgagcacccacggcttgtccaagtagttgagtcgctgggcgatttcgggcagcgcgtccttatagaacggcagcagcgtgcccacgttgatgtagttcgcgcccgcgattttcgcggtttcgatcacgtcgtccggcaggaaactcatggccgcagtgccgccggccgccagttgcgcgttggcaaccaaattgatggtcacaaaattggtgaatgactgggccaatggagtcgtctcgcgtacgcggcgaacggcatcggcgatattgtcgcggatgggtgaatcggctggaaccggagtcccggcggtacaaccgctggacataccggtaaacgatgatgcgctattgctcatttactgctccctacgatggtcttaaccaacaggttctaagggtcaggctcaggcctttctcaactcgcgaaccacatgcgagtccccctgca

SEQ ID NO: 3559 - DNA, 13169 bp, Unknown
  R85_18m  MAG No. k141_21448
acgaggttgatggtgaagaacggtccgatcagcgggaaggtgatcttccagaacttctgccagggattgacgccgtcgatggcggcggcctcgtagatttcgtcgtcgatggtctgcaggccggcgaggtagatgagtaccgagtaggcgatgccctgccagacggcgaggaagacgattgggatccagctgagttgctcattggtcaacagcgaggtggacagccacttgatgcccagcgccttgccgagctcgggcagcgggttcatgaagatgtacttgaacacgtagccgatgaccagcacggagagggtgtaggggatgaagaagacggctcggaagccattcttgaaggcgatcttcgagttcagcagcaccgacaggaacagggcgatcacattaatcagcaccgtgatgagaatggcgatgaggaacgtgaacaggtaggcgtggcccacgcggttgtcttggaagagggcgatgtagttcttcaggccgatgaacttgtaatcgccgtagccctgcgagttggtgaaggaatactttacgccgtcaagaaatggcaggtacaggaagaaggcgaaaatgatagccgccggaaccaccatccagtagtaggcggggtccaccttgcgggtggagaaggcggagaccttcttcttggccggtttcttggcagcggtcttggttgcggttgcgtgtgacatgatgttctcctctcctaccgatcactcgaaggtcctggcttggaccttgtcccattcggtctgcatctggttcaggaagcggtcggtgttgccggaggtcaccatggtctgcaggtagccgccgatgttgatggacgaaggaatgtagtggtcgcagaagtcggccagtcggttttcctcgaagaacgggcgcacggtttccagcgcatcgttgccgaagtaggtgtccttcagcggcgtgatggcggactgggcgtcggcgtaggcgtcaagctgatccttctgcatgaggaactcgacgagcttcatcgcttccttggggtgcttggtgttcgcaccgatggtgagcatcacgtcgtcgccggcggtgaggatctgctcgctggcgtcatcggtggccggcatctgggcgaaaccaagttcgatatcggggttgatcagcaggatctgcgggatggcgtaggtgccgagcgggatgatcgcggccttgccttgggcgaagttctgcgtgccctgctggtaggtgacgccggtgtccgcagtggagtaggtgaagagctcggattccttctcgactgcggtcttccacagttcctggaacgtggtcttgccttgcttgagctcggtgtacttcgattcgggaaccagcgtgccggccagggaggcgagcggtgcctgggtggtccaggcgtcggccacggaaccctgcagcgggttgatgccggcgtccttgaaggtgttgagcatatcggtgaactcgctccaggtggtcggcggattctccgggccaaggccaaccttgcggaacagagccttgttgtagatgtagccggaggcgttacccgcgaagggcaggccatacaggcgcttcttggaggaatcggtggtctgcaccagattcttggcgatctgcaccatgccggggttgagggtgtccacaatgggttcatcggtgaagtcgtagaacacaccggaggcggcgaagttgccgaagctgatgtcgccgttgaaggtgatcacgtccggcacacgattcttgacgaaacgggtgcgcagatcggtctgggcgttggcggagttgttgatgttgaccttgatggtcgggttctgcttctcaaagtcggcgaccatggacttgaactggtcggcggcctcggacttgaactggaagaaatccagcgtgacggtgcctgcggtgctggagccgcagcctgccaggccgaacccgacggcgatcgcgcacatcacggcggcggtgcgcacggccagacgcttcagtctaggcgttgcatgtggggaatcggacagcataattgttgactcctttatctttcttttcctccggcttcggtgccggcggttcttccactttccaaggtaacggttcggccatttcattcccagcgccagcgagcccacttgcgcaagcaacaaaaagcgcggtattttgtgattaacgcaataaatacagcgaaggggcttgcatgtctgatgtcaacgcgattccacagtggttttccggatccgagcatacgcatcgcgtggcggcggcaattgcccaatacgggccgatagcccgcactacgttggcacagatgctgggactgagccaaggggccttgtcccgcatcaccagcgatctgatctacgccggggtgatcgaggagcttccggccgaggccggcccgtcaggcaagctgcccgagcgattcacgccaagggaaagttcggatcgtcgcggacgcccgcagacttcgctggtgttgtgttcgaacgcacgcaccttcattggtgtcaaggttcatgggatgtcgattgtggccgctgcggtgaacgcgcatggcgaggtggtgtccggccggcacgaggtgccgatcggggcggatcagtcggctgagtatgtggtgtcggccatcacgcggctggtgcgcgaatgttccgccgatatcgcctcttccggactgccctcccccactgcggtgggcgttgcggtaggtgggcatgtggtcgacgattcgattgtgacgttcgcgccgttcctgcattgggacggggccacggacttggggacgatggtcacagaggcgaccggcctgccgtgcggggtgttcaatgatatcgattctctgctggtggatgcctcctggttcgggccgggtgtcggcgtggatatgttcgccgtggtgaccatcggcgtgggtgttggttattcgctggccgtgaacggcaagccagtgcagtacccggataagagctatggtctggtgggccacgtgcttatcgatccggaggggccgcgctgcaccagcggacatatcggctgttcacaatgcttgactgacgattcgatcgccgaacagtactctgcgattgtgggtcgcgcggtcagttttgaggactttgcgcgcgatgccaagggacgtgtgccgcaggccacgcagttggtgaaccggacgtgtttccggttgggttcgctggtggctacggtggcgaacatcgcgatgcccggacatgtgatgattgccggggagtccgcgtttttggccaagctcggcaccgattcgctgcgcgatggcattcgtttctaccgtcacagccagacccagccggtcaagttcacgattatggaccacgactggcagctctgggccaaagccgccgccagtcgcgtaatcgtgaagcatattgggtaggccgttcttggctcccctcagagagggaagccaagaacgttgcttcgccacagttactccgccacgaccagcaattacggacttgcctatcggcaaggctcaatcccaccttcgctcagctgtcgcttcgctcaggccgtggctactgacagcctactaggctgtcagcttaacgccacagccttgagcaatactgcctgctgggggtggagggacgggggacggatgccgtaacgctgcagggcttcgccggtcaggactacgccttcctcgttccaccagccgagagtgctctggccgttggccagaccggtcaaatccaagctcgggtcgagcgggctgacgcggtaggtgcgctcggggtcaagtccgggcaggtgcacgggcgcggccggataggtctggctggtggtcagctgggtgaagcggtagatggcggcgtcgcggttcggcatcaccatgccatccaagcgcacggccggatcgttggagtcggcgtgcacgcaggtgtcgatggcgaaccagtcgcggtgcttcttgaattcggccacccacacggccagcttggcgagcgcctcgtccggctccttcaacaggttccattcgatgcccatgtggccgaagaacgccatggccatgcgcagttcctggctggtggcacgctgggtggagtgcgcgggactggcacccacgtgctcgcccatcatcgccggcggcaccagcagcgaggtgtagcgctggatgtccgcgcgctcgaccgggtccacgcagtcggagacccagatacggtcagcgtgctctaggatgccgaggtccacgcggccaccgccggaggagcagctttcgatctcaaggcccggatgtgcggtcttgaggcccttgaagatgttgtagacggcgagggtctgcgcgtgcacggccgggcggccggagcggcgggaaccgggctcggtgacgagcttgttgtggtcccacttgatgtagtcgataccaagctcgccgacaagctggtccatgcagccgtagatgtagtcgaacgcatccggattggtcagatcgagcacctgctgagtgcggccctgcagcggcagtcggccggtggtgggcgaaagaatccaatcggggtggttgcgggccacgtcggaatcggggttgaccatttccggctcgaaccacaagccgaattccatacccttggcgtgcacgtagtcggcgagcgccttcagggacttcggaccatcgggccagacgtcctgcgcaatctgccagtcaccgaggccggaggtgtcgtcgcggcgggagccgaaccagccgtcgtccaccacgaatcgttccacgccggagtcggcggccttgtcggcgagcgccttcagcgtatcgaagttgtggtcgaagtacacggcttcccatgtgttgaggatcaccggacggccgtgcgagaacaggcgcgggtgcagggagcgcacgtaggagtggaagcgggcggcgatctcgttgagaccatcgccataggagccgaacagccacggggtgtcgtaggagttctggccttcgccagggccagcgagcgtcacttcgccgccgaacaggagttcgccgccgccgatcacgccggttgtgtagggcagacgttcggcggacagcacggagttgccgctccagcccacgtgcaccgaataggcgtcgccatgctcgaagccgaaaccgggcacgccggcggtcaggagcagggatgcgtcgaagtcagggcggccggcgagctgcggcttttcgaaacggccgacggtcagcggctggcgctgcggactgcgttcacgtagatggtgaccggtggtggtgaggatttcgccggcggattcgggcagcgggaagccgagctcgatcttgccgatctcgagcggggctccggcgtctgcaccgaacaggttggttacggtggccttctgacggaccaggccgccggggagcagttcgaggtgccactcgacttccacgccctgctcctcatcgcgcgcggtgactatgacgccgggcacgcggaccggaccggtggcacgggcatggccggccacatcggtgtagctttcgccggacacggcatcgagggtggcttccagcacgccgccggcctcgatattggtcacagtgaacttggggaagagctcgacgccggcgcggcgcagcaccacgcgctgctcgccgatccagctttcggcctgggtgggcaggatagacggccaggcggtgtcgtcgagcgcgccggacacgcgctgcggcttcagggcgtcataggcggccagcagggtgtcgggcttggccagcgggcggccccagtggacgatgtgcggcaggtcgctgccggcaaacaccagaccgatcgccacattggcggcgggctgggtcaggtagacggcggtgagtgcggtgccgtcagcggcggcgccggtgaaagtggaggtgttctcggccatattgtctccttcgacgtgtgtggatttgcattgcactactggtttcgatggtagaagaaatggaatatgttgccttggtgccgcgtgttggttgcgtgaggtaagtaatgcgtccgtgtctatcgccgctgggcgaagaaatcagtcaggatggactgacactcgccttccagcacgccgccgtgcacttcaggactatggccgatatgcggatcgcgcggaatatcccaaatcgaaccgcatgcaccgagcttgggatcccaggcaccgaacgcgatggtgccgatatgggtctggatgcaggcacccgcgcacatcgggcacggctcaagtgtgacggccagcgtgcaatcggcgagattccaagcgcccaaggcttgggccgcctgacgcatggcgatgatttcggcgtgggcaagcgggtcgccatcagcctcacgcgtgttgtatccgcgcccgacaatctggccggccgcatccagcaccaccgcaccaaccggtacgtcaccagcggctgcggcctgaccggccagttccagtgcacagcgcatcgcctcgtcatattccataccaacgagtgtatgcctttttctcatatcgtctcatgatgtgcataatcggccgcaatcttaacgttttcttcatggttcccatatacttttggtggagaaaaaatacgagaaggcggcaacatggcggtatttgagctcatcctatgcatcattgcggcggtggtggtgagctcgtttgccagtcgcttcgtaccgaaggtttccacaccgctggtccagattgtgctgggcgtgctggttacgtatctgccgtttttcccggatgcaaagctcgacccggaactgttcatggtgctgtttatcgcgccgctgctgtatctggaagcgcacgaaatcgataagtcggcgttgctgaaaacgctggatctgagcctatcgctggctatcggactggctatcgtcacgatggcggcggtcggattcactttgcatgccgtctggccgtccatcaccttagcctcagccttagcactcggcgcggcactcggcccgaccgatgcggtggccgtcagctccctaggtaaagaagcctcgctgacgcagcgtcagcgcagcgtgctgaaaggcgaatcactcttcaatgacgcttccggcatcgtcggcttccagttcgctctggccgccgccttcactggcgaattcgccgtggggcaggccgccggcgaattcgtgatctccttctttggcggcaccttatttggcctggtgatagcagcagcggccaactggctattcgagaccgtgcgatccctcggttgggaaaccaccaccacacgtattctgatggaactgttcctgcccttcctgctgtatttgggcgcggaggaattcaatgtgtccggcattctgtcggtggtggccgctggcctgttcatccgattcgaccgtaccggcgtggggccgaatgtggcacgtacgaatatcgtttccacttcagtatggggtgtgctgagtttctcgctcaacggtgcggtgttcattcttctgggcatgcagctgccgcgcgccatgagggccagctggtctgacccgtatatcagcaataccgtgctgatcggcattattctgctggtcactctggtggtaatcgcgcttcgattcttctggattgcggccatgctgcgcgttgcgcgagatacaatcaccggccagcgccgcaaaatgacacccgaacgctggcgctcggccgcagtgatgacctttggcggccccaagggaaccatcacgctgtcattgatgtttaccatcccgtattacattgccggcggtgcgccgttcccgatgcgtgacgagctgattttcattgcgtcaggcgtgattatcgtgaccttgctgctggccaacttcctgttaccgctattggccccgaaccgtggcaaggatcccagcgcggaaatgattccggtgaccatcgatgtgttacgcgccacggtggaggaattgaccggacgcatcacgccagagaatcgccgtgcgattctgatggtaatcgaccaatacaccaagcgcatcggacgattgcagcagcgcatcggcgataccgatcctcagggattcgagcaattgcagatcgaagcgctgcattgggaaaaggaattcgtgcgcgaccgacttgccgacaccaaggcgcatccggcggcggatacggccacgcaagagctgaacgtcgaagcctgcgagcgcatgcttgaccagattatgaatacgctgcgtcacacttccactgatccgacttcggggcatgcggtatcgcagattcgcggtcgcttacgcatgttccagcggcagatgagcaattacgccaaacgcacggtgtccaagattcgccataccacaccattggtgagcgaggatcagattttcgcgcgcacccgcgaactgcaggtcgaggcgattcatcatgttatcggccggcttattgacgagatgggccaggatacgtacaacaccgagcattgttcggcgctgttgctggattatcgtcgcgctgaggcttcattgcaggcacgtccgaatatgagcggcactacggaaaccatcacgcaggtcgaggacgtaaagcgcgagagctacggtatcgaactcggtgtgattcaggacatgtacgaagccggcgacatcaaccgagcccaagcccgctccctgaggcgcaacatctacgttatgcaggtcgatgccgattccggcatctagtttccttggctcccttctctgaggggagccaagttggggattgctatttccgtatgattctcttcagtatgtgcagtagtgcttgcagtgctcacttcgctcatgggagaacagtctatgaccgcgccggccacaagcgccctcgatgtccgattgctgtgacggccgcgccaattccagtgatggcggctgactacagcacgccagaggtaatgtcgttgtcgagcagccactggcgcaaatcggcgaactcctcaagactcacattgtgatccagaccgtggtagctcttggttttcagccacgtatgctcttccaaccaagcggcggtggcgaacagttcgtatttcgggattacgccatcgttcttgccgtacgtatagaacacggggatatcgtaatcggccaggcgagagtcggcgggggccgtgccgggcacctgaccgggtgtgttgaagccggacagggagacgacggcccggtaccgctcggggttgatgcgcaacaaatgcacggcgaccagtccaccttgcgaaaacccaagcggcaccacgtcacggtcggcgggaatgttgtcggccacccatcggtcgactgctgtggcggcggcatacgcgtcgtagtcacgatcatcgccgataggcagggcatcgtgaaaccacgcgtagttgccggggtcgggactgccttcacgggccggcgcgagtgtcagcggcccgcgcaatgccacgaagtcgttatatggagcgatgaggcgcatgatgtccgccatgtcttcttcgctggatccccatccatgcaggcacaggaacagcggatgcgtggcatgctggtcgaagccgccgcgcgaggtgacgctgtgttccacggtgagtggctcgccaaaacgtccaggcacagtggtggattcgcggccgatcagaggctggctggcattcgcttctttgctcataccaatccaatatagaggtcttgcgcgctgtgcggaaaacgatggaccatgatttcagtcacattgggtaatccgcgccgaatcgccttgggactttccaggggataccggcaatctgtcaggcattaccgctgtttgcggctgcggtgtctgtggctgcggtgattgtctcaagttcgccgccccactgctgctgcagtgcggtcatcttgctgccctcgccgaacaccatccagcgtttgccgttcagcaatcgccaatcacctttcgtttgctcattatcagcgtattggctcagcagttcggaaatcttgctttcgataggtgcccggctgatggctgcggacgattccgattcaaaggacacgaaggccactctcggatcagtgcacatctgtacggtggtgatgcctggcaaaccgcccgtatcaagcccctgccatccttctttgcacgcgccggcagcttgttctatgccttgctccatctgtgcggtatcttcgacgggtgccttgtcgttcgactgctgaatcagtccttccgggaacaatacgcccatggccacgccgataaccaagcaaactatggcgcacaccagtgcgatgatgccgcccgcgcccactcccccgtgagtggcgtaccgaggcatggtgactcgcgcagcgatgaccagaatcagggtgatgctgataagcaccgccgccgtcaacgcaatgtatcgtcctggcactgccgtcataaaggaaatggcgtaaggcgcgatttcatgaaccgccgaggtggccgataccacgacggctagcagtccgctgacaacggcaagtctgcggcacaatatcgacgttgggctgctggcttttgtagcggcgaatcgccggccggcattccgcctggatgggcgtcgattctgtgcacgacgtgagctgcgcgaatcgtcatactgaccatcgccgaagaaatcgtagtcctcatcgttgcgggccatcggtgcccccttcctgccgattacacagccagtgtaccgctatggcttgggaatggcggtcattcgggggaatgattcagggcaaaaaagaaccccggcggttgcccgccggggagagaaaggagagagaagaagaaagggggttcaattgtcgggaactgctgcggctcctgatcagctttccgctgacatcatttatataaccactgctttctgggtctacctctaagtttctctgagaaaaacctgagaatacttgcgattgatggaccgcggaagcgtgaggagcctctcacgtttccgcccaaggcgctagacttgaaggcagtatttatttgcccaaggagtttttcacatgctgctgtccgatcgcgatattctcgccgcacagtccgcaggtcatatctcacttgatccgtggacccccgaaatggtgcagcccgcttccatcgacgtgcgattggatcggtacttccgtttgttcaataaccacgcctacacctatgtcgatccggcggaaaaccagggcgcgctcaccgaacagttcgaggtggatcccgacgaaccgtggattttgcaccccggcgagttcgcactgggttccacgtgggaatacgtcaagttggacccgtccattgccgcccgcttggaaggcaagagctcactgggtcgattgggtattctgacccattcgactgcgggcttcattgaccccggtttcgaggggcatattacgcttgagctgtctaatgtgtcgacgctgccggtcaaactatggcctggcatgaaaatcggccagatgtgcttcttccagctgagctcgcccgctgagcacccttatggctccaagggcaccggctcgcattatcagggccagcggggtccgacgccgagccgttcctacgagaatttctaccgcgcgcacatcgacgactgagcgttgcgacgtaccattcggccggcggatgccggccatttgcttaatcccaaggagatgtcatgaccaacagcgatggtgggttccagttcgacttccagcagcacgaaaagccggtcaagccaacggttcctccgattcccgggcaagagacggcagcatatagcacggaacccacggcacaggccacaccggctctgcagttcccgcagtctgtgcagtctgtgcagccgacgcagcccatcgatccggccatgacgcaaccgttctcgccgcaattcccggctgcggttgccgcacaagcaccacagccggcggcagccacgcagccagtagtatccgaaacaccaatcgccgctgcgcccggccagcagcaatacgtttgggatcagacgacgcaaagcttccatccggtggaaccgacagtgccggtgacgccagccgcaccagcggcaccggcgacatcgcctgtttcggcagcttcaaacgccgcgacacaggcgttccagcccagtcaggccgagcagcctgcggtagatgccgaggcaacacaagcattccggcctaatcaggtcatggcaacacagcttttcgaagctcaggccatgccgaatgccgaaaccgcggccacacaggcattccagcctaattcagctgcggccacacaggcatacggcgcatcatccaccgtatccggtgagaccgttgccatgccggcaacgcaagtagcgtctgccgatgatgctgcagccacacaggtgttccaaccggccgccctggctgcttcggcacaggctcagcctgctgtgatgcctccctccattccgttgaatcaggtctccgatgaggacgattccgatggcgccgagcctcgtcacggcggtagcggcaaaaagaacacccgcaaaatcgtcggcattgccgtagcagtagtcgccgtgatagcgctggttgtcgccggcctgctctggtggcattccaacagcagcaaggcgagccaagccgtggcattggccgagtgcaaggtagcggccaagcagtacacgaatgctcagaagaagctcaccaccgccatatccaatggccagaccagcgcgcaaacatccaccagcgatgtggccgatgccaatacgctcaccacgctgaatcaggcgttgcaagacgccggcaatccgaccgacaccgccaagtgcgattccagcctcaacgccactgagctgaagtctcacactaaagagctgcagaatgatgccagcgacatggctgacaagacggatgccatcaacaatgcgatcaaggccgttaatacttcaaaggcgacggccgataccgacacactgaaatcgaacctgagctcggctatttcgcaggcgcagggcacgctggataattccgcgggcagtgtggccgatgaaaacacccgcaccgcgctgcaaaacgccatcaccgaggccaatacggtgatgaacgggaccagtccgtccgaatccgacgtcaacaatgcgatttctaaactgcagaaggccgagtccgacatcaccgcctcgatgcaggccaagcagcaggcagatgccgccaagcaagctcaggaagaggctcggcagaaggccgaccaagaggcacagcagaaggccaagcagcaggcacagcagaagtctc

SEQ ID NO: 3560 - DNA, 7483 bp, Unknown
  R85_18m  MAG No. k141_22082
cgcagcaatacgcgatgagtgacgccgcgctgtgcgatgacgatcgcctcagattcccgctcgcggagtttgaccgcacggccaagtttgcgttcaaagtcaggatacgcaaacggtttaacgatgtagtcgagtgcgtcgacctcatatcctttggccgcgaactgggccatattggtcacgaagatgaggatgacctccgaatcgactgcccgcaaccggtgcgccgcttccataccgtccatattcggcatctcaatgtccatgaatacgatatcccatactgttttgtatgggtcaagaaagcttgtcggctcattgaatacggtgacatcgaactgcactccggcatgagtcgcggcgtattggtccagacaagcacgcagcttcgccaccgctgtctcgtcatcttcgaccaccgccaccgtgaacatgcgttttacactccttcgccgttcataccgaacttgcttttagcttagtggacaatcgtggcatatcacagcacacacagtcagtgtctactgcaaggcactcatcagatgtgtgaattcttcggtcggctcggactcgaaggggtcgaggagcacggcttcgcggcgctcgggagccgtcacggtcagatgggtccagtcggcggagaactgggctccggcggcaagcgctgccctgacgaattggccacgcagggctgcacgagtgtcggcaggcggattgtgtacggcatattccacatcgtcggcggtcagcagttcgcgcagctggttgcgggctacgagcgaaccgtacaggcgaccgttggcgatgtcgtggtagtcgagctcaagctgttccatctgggcgaaggtgacgtccgggcgacggcgtttgagcgcgtcgaacagacgcttcttggcggcccagtccacgcggtcggcgagcgcatcgtatgcaccacgctccagcgcgtccagaacgcggctccactcccccataatcgtgtcgatcgtggtggccggcagcgaacttgccagcgcatcgccatgggtttcgatgaaggccttgaccgccgcataataccggcgctgcagacccagtgcggacacggattcgcctgattcgagcgtcagttcggcgcgcggattgtcaaggaatcgactgaccgtgcgattggcggcagccggatcagcaaaggcatactgctcgaatccggacggaacgccatggcggaaggcgtcttcgatcgcgcacagcacaaggtgcgtgatggcaagcttcatccatgtggaccattgcgaacggttcgagtcgccgatgatcacatgcagccggcggaaggagtcggggtcggcgtgcggttcgtcgcgcgtgttgaccatcgggcgggagcgggtggtggccgaggagacggcctcgtccaggaagtccgcgcgctgggtgatctggaagccgtccggggtcatgcggccggcaccggtgtacagctggcgggtgatgaggaacggcagcagctggtgttcgatggtctccaacggcacgaagcggcggaccaggtagttttcgtggcagccgaaggcgtggccggcggagtcgacgttgtttttgaacacatggatcgtggcgtgtgcgccgtaggattcgcgcagcttgcgctgggccttcagggctaggttgcgcatcacgtgttcgccggcgaggtcctgggccagggcctcgcgcgggtcgcgcgcttcggcggtggcgtattcggggtgggatccgacgtccagatacagacgtgagccattggccagatacgtgttggtggagcgggaacgggagacgatgggctggaacatggtcatcgccacctggccggcgtccacggggcgttcggcaccggtgaccgccacgccgtattcggtttcgacgccgaaaatacggcagaacccgtccatctcggcggatggtacgggttccgtggcgtgcagggagcgggtgccgctgtcacgcagttggggcatcactcgccgcctttttgcacgaagctgttgacgtattcctcggcgttggtttccaaggcggattcgatgtcgtcgaggatgtcgtccaacacgtcggcttggtcggtggactcggtttgggcggcggcctgcgtggtggcgagggcgtcgtcttcctgggtcgcggcctgctgtgcttgaggttgttcgaattgttgtggcatgttgtcttctttttgggctgtcaaactcccctcagtcagccttcggccgacggctcccctcacccgaggggagccggaggagtcaaaaaattatcgctggttgatggagtcgagccacggatactgctgcaggtaatgctgcagttcgcggatgatgagtccattggaggccactacatcgttatcgtgacgccagtggatgcgttcgccgtcccaacggctcagcgtgccctgtgcctcccagaccactacggtgccggcggcgatgcccgcgatatcccacacgtgcagcatcggctcgaagtaggcgtcataggtgccgtcggccactttgcacaggtcgagcgagacggggcccacgcgcttgatgtcggccgggcgtccggcgagcgaggaggccacgtcgagcgcacgctgcgattcgctggggatgaaggacatgccgtagctcagcacagaaccatccagcgaggaggtcatcgacggcacgaccttgtcgcgcttctcgccgaccgcggttttgtggatgcgcacggcacccgctcccctggcggccaggtaggtcaggccgagggccggggcgtgcacgatgccgatgatcggcttgggctcgttgtccgggccgaattcgaacagggcggcggtcaccgtccattcgctcatgcgacgtacgtagttgattacaccgtcgatcttgccgatgtaccagtaacgctggccagggcggctttcggcggggcgggtggtccagaagccgtcgaagtgggcgatgtcggcgattctggcgctcatgaagcgcatgatcttgttgtccacttcaagcttgtagcgggggccacggtccgcgttctcggtgctcggctgggcgaggttacgcggattgagttggtcgtggagggcatgctggccggcttcttcgagcaggccggcgactttgagcgcaaggttgcgcaggtcctgtggggtctcttcgcgtgtttcttccatagctaccaagtctatcgttcggcgttgatggccagcgacttcagcagatcgatggcgtgttcggctgaattgagttcggtttcgcagtgcgccttggtgaaggcgagcggatcggagatgtcgagggagaacaggtgatggtcggtagcggccatatggccggcattgccgtagaattcgaccgcctcgccctcgtctgcggcgcgcgggtcgcgaacagtgagtcgggaccagctggcggcggccacctcatcgccgaattgcgccacgagttttgccctgagccaggcgcgggtgtcttccggcggttcggtggtggcgcgtgcgatgtcggcggcgctcaccacccgttcggtgcggggttcgagtttggtgaagatgctgtccgcggggtcgagcgccgcccatttcaggtcgatgaccttcagtcgcggatcattccatccgttggccacgccgggtgcggacgttgtggtgattttgcggcgcagtttttcgagcagctgccatttgagcagccattcgatgcggctggcctcgccggtcatggccagacgttcgtcatcgtcggcggcatggcggatggaggcgcagtcgatgagcgcctgctgccacatcgccataatggatgtggtggatttgtccggccaggcgggttcgccggcggtgtcggtaccttcgaccagtgcggcaacctggtagacggcttggcgcagtttgagctggataagccatgcgttggtttcgccgccgttggccagcggcaagattgcccccagcgtcaggtcgcgggaaacggtgtgtatggcctcgactgggtcagacagttcgagttcgtcgaggaaggcgttcaggtcgaatccggcctcgtccgcatgttcgagcagccacagcagcatgctcgtggtgccgagtttcagtgcctgcggcacctccatgcgattggcgtcgccgacgatgacgtgcagacggcggtatgcatcggtggagtgggattcgtcgcgcgtattgatgatcgggcgttcgaaggtggtttgcaggccgactttggcgtggatgtagtcggcgcgctggctgagctggtagcccgggatctcgctgttctcgccaatccctacgcggccggagccggcgtagatctggcgggtgacgaagtggagggtcatcaggcgtgtgaccaagtcgaatggcaccgcgcgggccatcatatagttctcgtgcgtgccccagcaggagcccttgccatccacattgttgcgatgcagggcaatgggagtgccagtctgtttgcgggcgcgttcggtggcggcctgcatgatgaggtctccggcgtggtcgtatcggaccgcttcgaacgggtcggtggtttccggcgccgagtattcggggtgggcgtggtccacatagacgcggccgccgttgggggcgatcacgttggtgatgttgagctgcggggcgtcggtgagcatgtccgggcgggcggcggcgcgttcgagacgggtgccgcgcgcgtcgttgaccgggtcctcctgccggtagtcccagcggatggatttgctgtggctgtccgcggcgccgttcaccacgtcgaaggacagttgcaccggattgtagcggtccggggtgttcagggataccgcgtattcggtttcggtgcccatcactcgtttaacggtcatgtagtgctccttgagcttgagctattcggcggtgcggatgcggcggatcgggtccatgccgttgatgcgcgaccattgttcggggtccacgtcggccatggaatcgcgggtctcgcggtattcgtcttccacggcggcagcgagcagcggcacggtgagtgccacgtccaagccggtttcgatggattccttgaccgctcgggtcttggcccggtccacgatgttcttgagcatcgcgccggagaccacgtcggccaggaacaacgcatgccactggccgttctcctcctgcacgtcgcatagatggcggcgttcggaggttccgtagatgtcatgcaccagcacggcggacaaggcgtgcgcgtcgacgccatcttccagaggcaggtcgtcggtgaggtaatggtccacgatggcgatggcctgattggttttgggccggccgacgcgaatcttgacgtcgagacgccccggtcgcaacacagccggatcgatcatgtccacgcggttggaggcaccgattaccatcacattgtcgagtgattccacgccgtcgagttcggagaggaactggggcacaatcgtggtctccacatcggaggagacgccggagccgcgggtgcgtagcagcgaatccatctcatcgatgaacacgaccaccggattgccgtccgcggcgcgttcacgggcgcgctggaaaatcaggcgaatcagtcgttcggattcaccgacgtatttgttgagcagttccgggcccttgacggacaggaacacgcccttgacatgggtttcggccggactgattgcgccgtcgccattcgaatcgtaaccaccctcgcatagggcgttcgccacggccttggcaatcatcgtcttgccgttgccgggcggaccgtacagcagcacgcctttcggcggcttcaaatcgtagcgctcaaacagcgcacgatgctggaacggcagttggacggcgtccctgatacgaccgatctcactatccaggccgccgatgtcggcgaacgtgacatccggggtctcctccagcaccagatccttgtcgccctcggcgggcagcacttcgatggcgaggcggacggacggatcgacgataatacggtcgccctgattgatgcccgcatacgcgagcgcgccggaacggcggatgagcacgggattgccggaggcgtcggtaacgatcagccgaccgtcgtcaagtacctgcttgacactgcgaatctggcccacggtgtcagcatcgcgctgctcgaccagcacgagcttctcgttgagcatcacggtggctccggcggtcaggcgggcggcgttgacgttggaggccacaggcaccaccatgcggcgggtgccggaaatgacttcggccgacgcgtgctggatgccgtcttcatcggtgcgggtggaatcgaccttgaccatggtggcgaaggtgagcggcggctgagcgagctgggcgagctgtgacttcgccttggtcagttccttgccggcgcggctcagcgcttcggcgagcgcatggttcttggccatcaggcgatcgttcagcgcggcgagatcttcggtgtcgctcatgcgggttcttcgcttcccttctatccgggattttcggcaacttatggcagtcggcagaccctattcgttgccgtcggcggatttcctgttacgtataacagtacgcacttttcgcaccacgaaccatacgatgaccacaatcacggccgcgatgaccacgtcctcgaacacgccgagcgcgccttgaatcgagcaccactggtcgccgagcaggtaaccggcggaaacgaggatggtgttccacacggccgagccgagcagggtccagccggtgaagtgcaggaagttcatgcggttgaatccggcgggaatcgaaatcagcgagcgtaccacgggaatcacgcggccgatgagcaccgaccatgtgccgtatttggtgaaccagtcgttggctttgctcacgtctttgcggctgacgccggggattttgtctgccgcgagattgatgcgatgcaggcccacccagcgggagatgccgtacaaggtccaggcacccagtacggagccgatggtggcccagatgattgcgcccggcagactcagggtgccgcgtgcggcggtgaagccggagagcggaaggatgacttcggacgggatgggcgggaagatggattcgagggcgatggccaaggccacgccgataccgccgatggtttccatcagcatgatcagccagtcggtgatggtgccgatcaggccgggttcggtggtggtgcagatgggtgtggggtcggtcgcaagaatagtggcggctgccatggaaaaactcatagagggcattgtcccaaggttttcccagaatcagaagcatgacgcaagaagatgtgcattttgttgacaagtccgccgagagcgaagttgggagcccggctggttctgcggtttctgtgccgacgctgagcgagcccggcctgctggttatggatgtggactccacgctcattgacgaagaggttatcgacgagttgggcgtggtggctggctgcggtgaggagattgccggagtgaccgcacgcgccatgcgcggcgaactggagttctgcga

SEQ ID NO: 3561 - DNA, 17057 bp, Unknown
  R85_18m  MAG No. k141_22442
cgcgcgctgatcttcgactccgtctacgatccctaccgcggcatcgtcacctacatccgtatggaggacggcgaactgcgcgaccgcgaaaaggtccacatgatgggcattggcatgacccacgatccgatcgagatcggtgtgatcagccccgatatgacccgtaccaaggcactcggtgccggtgaggtcggctacatcatcaccggtgcgaaagatgtgagccagtccaaggtgggcgacaccctgacctcggccgtccgaccggccaccgagccgctgcccggctaccgcgaccccaagccgatggtctacgccggtttgttcccgatcgacaacgcgcaattccccgaactgcgtgatgcactcgacaagctcaagctcaacgacgccgccctgatctacacgccggaaacctccgtggccttgggtttcggcttccgctgcggcttcctgggtctgctgcacatggagatcgtcaacgagcgactctcccgcgaattcggcctcgaccttatccagaccgccccgaacgtcacctacgacgtgacctccgaggacggcagccagcaccacgtgaccaacccgagcgaattcccggacggcaagatcaagaagatcgtcgagccgatggttgccgccgacatcatcacgccgaaggaattcattggcgcggtgatggatctgtgccaggaccatcgcggcattatgggcacgatggagtacatttccaccgagcgcgtggaaatgcattaccgcattccgctggctgaaatcgtgttcgatttcttcgatcagctgaaatcccgtaccaaaggctacgcctcccttgattatcatgaggacggcgagcagtccgccgacctggtcaaggtggacattctcatccagggtgagaaggtggacgcattcagcgccatcgtgcaccgcgacaaggcctacagctacggcgtgatgatgaccaagaagctgcgtggcctgattccgcgtcagcagttcgagattccaattcaggccgcaatcggttcgcgtatcatcgcgcgtgagaacattcgtgcgttgcgcaaggacgtgctcgccaagtgctatggcggcgacatcacccgtaagcgtaagctgctcgaaaagcagaaggccggcaagaagcgtatgaagatgctcggccatgtggaggtaccgcaggaggcgttcatcgccgccctgtccaccggcgaggactccaacgaccgcgacaccaaagacaagatccgcgccgctcagaagaccgagggctagtgttcgaggtctacatccacgtcccgttctgcttgcggcgctgcggttactgcgacttcaacacctacacggctacggatcttggtgcgggggcctcgcgcggcaactatgccaatatggtcattcgtgaaatggccctgaccaagcagtggcagctcgaccacggcatcgaggagccaccggtctccaccgtgttcttcgggggtggtacacccacgattctcgccgcccgcgatctggtcgccatgctcgatgccatccgcaagatctggagcatcgcgcccgacgccgaaatcaccaccgaagccaacccggacacggtcaacgaatattacatcaatgagctcgctgccggcggcttcacccgcgtttccttcggcatgcaatctgccgtgccgcacgtgctcaaaaccctcgaccgcacgcatacgccggccaacgtggccgcaggcgttaatgccgccaataaggccggcctgcgctccagcgtggatctgatttacggcgcaccgggggagagccttgacgattggcgcacctcggtcacgaccgccatcgacctcggcgtgaaccacatctccgcctacgcactgaccgtggaacccaccacgaaaatgggtcgtcaaatcgcggccggcactctgcccaaacccaatgacgatgacgaagcagccaaatacgaaatcgccgacgacctgttcgccgccgccggcctcgaatggtatgaggtctccaactgggcccgccccggatacgagagccagcacaacctcggctattggcgcaacgtcgattgggccggtctagggccaggtgcccactcccactacaacgcggtgaccgaggctgaccacccccagtcggcttcgctgacagcccccgccagcgggggcaagtccgaagccattgcctctgcctcagctgatggacaggccaacgccgaacttggagaaaccaacgccgaactaggtatgatcaacgcgcatgggaacaactcccaagaaattcatgcccccgctggcgggggctgtccggcggatgccggactgggggtggtttctgtctcacacggtctgcgcagctgggacatcgcgcacccgcgtttgtggggcacggccatcaacgagaaccgtgtgccgtgggccgatagcgagacgatcactcccgaggaaaacctcgaagagctcatcatgctcgggctgcgcctgcacgagggccttggcctcgaccgcatcaaccgcgccatcaacgatgcaggtatgagcagcacgccccagactctccgaaccgtttcggttgaccaactcgcccccatgatcagcgaaggcctgattaccgtatccgataatcatcgagtggtgcccactcgtcgtggccggttgctcaatgactcggtaatcgaacagttcttcgattacgtcggtgtatgagtcggtggtatggtgcgcggcagtcgccattacctgttcgctagttgtggttacaccgtcagagggagcttttttgttttaccggcgggggagggaaccgcgtaggactacgtccggggcgctttgcacgtagatcaggcggttggcagtgccgccggtggcctccgcgtcatcgcggttggacaggatgctgtccacggcggcctggcccatttcggccagcggcaggtgcacggtggtcagtggtgggaacacgtcggcggagtaggggatgtcgccgaaaccggtgacgccgatttcctgacccggctcgatgccgttggtgcgcaacgcggtcatcgcaccgatggccatcacgtcgttgagcgcgatgattgaatcgatgcctttgccgtcgtacagtgcgccttcgcccggcttcagcagtccggatcgggccatttgcatgacggccgcatagccgtcggtgcggctgaacttaccgtttgccacggctttcgggtccacggtgatgcctgcctcgtccaacacttccatcacaccggccagtcgttctttggaggagcggtgtgcgtcatcgcccttgagaatcgcagggcgcgtatacccggaatcgacgataagctttgcgatggcacgcgcgccgacgtcgttcgccacgtccacggccgggaagggcaggttgcggttgagtacgaacacggcatgtccgccggacgattcgtactggatgagttccgtctgcaacgcctggcgttccggcgcgtcggtgtattcgctttcggagatgatgatgccgcgcggcctggtggatacggacttacgcaccgcctccaactcctcgtgcggggtggctgccacgccgatggtcacggagatgccgcgttcggccgccgccttgaccacgccttgcgacacggatgcgaagtagggatcggagatatcggagaccagcagcacgatgttcggtgcagtgcctttggccactgcctgagcataggcgttgggacgatagttgagcttggtggctgcttccatcaccttgacatacgattggttgcgtaccttgcgggtgctgccgttgagcacacgggatgcggtggcgatggagacctgggcttctttggcgacgtccatcaatgtcgctggcgattgcgccttatcgttctgtacggccacgatcgaatcggtccttttcttccctgaaacggaaaacatgtctaaacgcttaccgcaatgatatcgcagttttgcttgcaatagtagcattgtggattggaaagcctgaattttgaacaaaaataatcacgcgaattacggaaagcgattaccgttccgcgtatcgtgcggtatgctcgaagcatgacgcgatacttatgtgcccctgactccttcaaagagagcctgaccgccatggaggcggcccgggcgatggctcaggggattgagaatgccgaccacgatgccgaggtccgttgcctccccatggccgacggcggtgaaggcaccgcacgtgcgcttgtcgacgccactggcggatcgatgcacgccgtgccggtccacgacccgctcggccgacctgtcgaaggccacttcggcctgctcgccgacggcacgaccgccgtggtcgagacagccgaagccagcggcctcgcactgcttgaagccaaaaaacgcaacccgttgattgcctcctcctacggcaccggcgaactcatactcgccgccgtccgttccggagccaagcgcatcatcgtcgggctcggcggcagcgccaccaacgacgccggtgccggacttctgcaggccctcggcgttcgtcttctggacgggaacggcaacgaccttaagcacgggggagcggccctcgctgatctggccaccatcgacatcagcacgatggacccggctctcaagaacgtctccatcaccgccgcctgcgacgtgaccaacccgctgaccggtcccaccggcgccagcgccgtgttcggaccgcagaaaggtgcctcccaggccgacgtcgccacactggacgccgcgttggcgcacttcgcgcaggtcatcgaaagccggctcggcgtcgctgtgaacgacgtgccgggcgcgggcgccgccggcggtatcggcgccgcgctgaaaggcttccttgacgccgaattccgtccgggcaccgccatcgtcatcgaacaatccggacttgatgcggccgcgcaatgggctgacgtggtgttcaccggcgaaggctccatcgacttccagaccaagttcggcaaaaccccggccggcgtggccgaaaccgccaagcgccacggcaagcccgtgatcgccgtcgccggacacatcggcacgggcatcgacgaactgcatgaggtcggcatcgacgcggtattcggcatcgcccccggtgccgccagcctcagcgaactgctggccgacgcggccgccaacgtgacccgcaccaccgaacaagtcgtacgaaccctacaactgaagcagcttcacaagctccctctgatgggccgagccgtgaaggaaacgccggagtcgtttccaggcgagggcttgacgacagtcaacccagccgaaggctccataattgcgggacgagctgccgcggcaaagccgtgactgagggggagacttgtggcgcagccgcaaaaaatggcatcggctttcagccgatacagtcattcgtctgcttctctccctcagtcagctgcgctgacagctccctcgtcagagggagccacacaattcggaaaggaagatatgcgcaccatgctgtacaccaaggtgaccagcatgctgagcaccacgggcatcgccagcgagaaatacgccttcggaatcggcgccttttcgaagggttcgttatccatttccgtcccttggtgttttcgttcttcagtcactgcgcgggatgccgttcggcgtgcatcacaggcattgcagaggcaacagtgtggacaacgggcggggaaagtatctcatgatgcggtgagggcgttgatgatgacgcatcgtgtattggtggccgtgtgcatcgtatgtgaacctgtgctggcacggcgtacacacgatgggaaaagaaagaatatatggaccccgttgtcccggttattgttcagttattactgtgttgaattattgcgttattcaattattgtggtgtgccggccgattgcggcctgcgggggattgccttcgtatgtgtcgtgcaatctcatgaatgggatcgttcgctagattcagcgagcgtccttgttggcggcgttgatgatgtcggcgaacatcttggagtcggcgtagccggcgcgggcgatggcgtccataccggagagggtgaaaccgcgaatcatggaatccatgaatgacataatgtgttccttgtcttgacttgcaaagccgtgggctttgcgatgtgttgttgtttacgttatgagacgggccgtgtgtgagcggcgagtcagggaagaggctcagcgagcgttcttatcggtgtcgttgatgatgtcgagaatcatctgggagttggcgtgaccggactgggccagggaagtggcaccgtacatagccagaccgcgaatcatggaatccttgagagacatcatgtttcctttcgttggtcaaaaccttgtggctttgagttttgtttatcggtttctttctgaaaccggtttcagaataacgcagtccgatgacaaacgcaaggggactattccgctctcggcgtttctggcggaatatcgccgttctatagataccgttcggtagttaagaggctgtctagtcgactttctgacggtcttgttctgggcgcatggttttcacgaaatggcctcatgtcgcggaaatcgtacgctgagtcgtcgtaagcgtacggtcttcacgaaatggggtctcatctcgtgaagaacgtacactgagtcgttctgggcgtacggttttcacgaaatggggcctatcttcaccggattttgggcacaccggccttgagcagcttggtctcaagattgatggggcgtagcagatcctcatagaacacatggacgatttcggtgacgccctgttcccggagatgccgatcacgtctgcggtcgtactccattttcgcctggaggcttgcgcgattcttgttgctggtgtcggcgtatttggccatgccgtcgtattctgccacgatgatgcggccgtctgcgagcttccaacagaaatcgacgcgatatggcattgcgggattgtcgggattcatgaactgcacctgcagcaggggaatgccgaaagacaattcggtgatctggccacgcatcaatgattcgccgccgttttcgctcaggggatccgcgtacttcagcagcttggtcacggagacctcgtcgcagacgctttgaatcatcagcgactgcacctcttcgatggtcgtcagggactttctcagagccgaatcgtatatgggcagcgcctgtgggaatgggaatgccgcgcagtcgagcagcgttcgcgccggagtcgtcaagagaatgccattatgcttccgcgtcggaatccgattgatatagatgcggttgagacgcgcctcgtctccgccgccgatgccggacttcgaggcgatgtgcactgtgccgtcgtgcagggaatagttgtgctgcagtccgtatacgcacgccgcactcaaccccgcaaatacccactgagggtggattgcggacagcgcacgtatgacctgcaatgactgttgctctctggtcatggtgttccaaagtattcggtcggcgtacaggttcttatacggtgacaccagctccccggcatgcaggcgacgtttcagggcgcgccgttgcgcatcactggtgccatagcagcagcgacgctcctgcttcgcctgctgcagcagtgcagaaacttccttgtgttctttcatatctcgacgctaagggtgattttgattgttgcacaagctcaaccggcaaatgtgaatactatgtcacgcgaattgttggtgtggataacttgaatcgacgtcgacggctttgccgacggtcttgtcggaggcgatattagcctaggacaccttgctgcgccgccttccataccgagaacagtcatcagtgacaccgagggcatcttcagcgtatgttcttcacgaaatcagctgccatttcgtgaaaaccgtacgctcagaatgactcagtgtacgttcttcacgagatgaggccccatttcgtgaaaaccgtacgttgacgacgattcagtgtacgttcttcacgaaattagggatgatttcgcggaaaccgtacactcaccgcaactcagcgtacggttttcgcgaagttattgatttggatataggttccccgtcatgaactacaatgaatcgcggcgaaaaacggggaaccgaagtcggagcgcggctgaacggatatgggtgtgactggatgactgccatggtgatgccggttctccttgacgtacgcaataacaacaactgacaacaacaggggagacaaggatggcgagaagtgcgggccgcacccgaccggtgatcaaggacgtggccagactggccggagtctcggcaccgaccgtctcccggtatctcaacggcaccgtcaatgtcaccgaagacaagcgtgaacgcatcgccaaggccatcaaggagctgggctatgagccgagcattgtggcgcgcgccctgtcgaaccgggagatggactccgtggtggtgttcgcggccaatccttccgccttctccacgtccgaaacgaaccatggggtcgaggccgccgcccgtaaacgtcggttcctgctcaatatcgtttctttggatgagtccgacatggactccgtcaaggctcgtgtgcgcatgggtttgtcgatcaggccggcgggcgtgatcgtctacgagtacgaccgggccggcatcgccgcactggaatacattcccaaagatatgccgatggtcgtggtgggtggcagcttcggcgacggcgaataccagatcatcaacgccgaaagggatggtggccgttggatgaccatgcatctgctggatctcggccatcgcaccgtgttccatgtggggcgcccggaaggaccgaccgataacacccgcaccaatgggtggcgtgacgcgctcaaggagcgcggcgtcacggtacctgacccaatcatcgtgcccgacgatgatttggaggagtcggtcaaggctgggcgcaccttgggccgtcgtggtgatgtgactgcgattttcgccggcaacgacgagaccgccatcgctgtgatccgaggtctaagggaggttggtcgccgcgtgcctgctgacgtgagcgtcgtaggctttgacgaccgcaacttcggtgccatgtggaatccggcgctgaccagttacacccagaacttcctggacatgggggagcggtccttccggatgctgttcgaacagattcaggccaagcgtgccggcgatgacgcgccgccctcgcaggtcgaagtggtgcaaggcaagccgtgtctgcgtgcctccgaacgcgcgtacggcgacggcgaaatcgcgtagtcgatggggcgtgcgtatcaatcgatagtgactgtagcgcattcatatcgtgacgaggagtctcccatgccgaactgtaagcgcttactttaaatagttcgtaatgtgatttacgtcatactaatagatgttctgaatcatagtgttatgcaaggattccttgcggaaaatggctatttatcaacagttttcgaaaagtccgcatgatgggcgactgcgagcacgctttatggtaatcgctttccgtagtgttattgttacagtgtgacttttgaacaatcggtaactctgaagactcagccccagacctcgggcactatctcagcggcagacgccgcgatgcaatcggcccgcgacgaacgcatccccggcaaactcatctgcgcgatcgtggccgtcggctcactcgcattcttcggcatcctgaccgaaaccgtgatgaatgtgctgttcccgcagctgatgggcgtgctccacatcagcgaggccaccatccaatggctcaccaccggctatctgctggtcgtgtcgattactgtgccgctcagcgcatggctgcgccgtcgcttccgccagcgcagcatcttcctggcggcaacgcgatgttctccacgctgcagcagttcacgggtgcggccggcaccactgtggtgggctaccgtgatctccgtgttccagtccggctcgggcaaggtgggttccgccggctatgccgccgccaccgtgaccggcgcatagattgactacgcgatcatggctgtggtcatcgttatcgttatcgtgttcgtcgccatgctccacgccctgcgtaaccggaagtagatggtaagtcgagtggcaccatgctaccgcgcaatggctgggcatggagttttggctaggaatcgttcgacaggcgttggcgcggccgctgagagcattcgcgtcgaaaggtttgccggagctcgttcggcgtggaatgggccgattcaccggtgattgttggtcaaacagccaatgctgacccttctgccaatggttagcgaggttcctatcataagcatttcggagagcgatctcgaaaaaggcgacatccttcacgaggatttgaccaaggtcaacattccactcgtataaagtaaggctgtaagcgcatcttggtggcaagagtcaaggtatgtacggaatcgcggggcggaaagccactcctcaatccactgcggattggtaataacggatgattgtaacgcatgaatcacgaggcccccttacctcgtattgcaatgccccggtgacatgaaaaacggcggtcaacacggggcttgtacattaaggatacaggaagggtagttataagttgctgatatgccgtgttttttacgatagtcatcggcctctcccatacggcggaacaggaactgacggatgccgagatgccgtgattcggcgggaggacctgtactggcccagtccttctgctcggtagcggtaccgctacgccgactcttcccgacgctccagtgccgccgatatcagtgaatgcccagcctgatgtcggtagagttaaggctattggcttggtctcgacggtgagacttctccaatggccaatatgcactgttgcaaaggagtatgcggtatgcaaccaatcaaagccattcaatacggctgcggcaaaatggcgaagtacacgattcgctatatgcacgagaaaggcattcaaatcgtcggtgccatcgacgtgaatccggaagtcgtgggcatggatgccggtgtgtttgcaggcatcggccccatcaatgtgccgattcgcgccgatgccgaggctgtactcaacgagtgcgacgcggatatcgcggtagtcacgctattcagcttcgagaacgaaatcgccaccatgtgcgagcagtgcttggcccgcggcatcagcgtgatcaccacctgcgaggaatgcatctacccgtggaccaccgatccggccaccacgaaccgtctcgacatcatcgccaaggaagccggtgccaccatggtcggctccggcatgcaggacatctactgggtgaacatggtctccaccgtcgccgccggatgccacagcatcaagaagatcaccggtgcggtgagctacaacgtcgaggattacggcctggctttggccaaagcgcacggctgcggtctgaccgccgaggagttcgaggccgagcttgcgcatcccgaaaccgtggtgccctcgtatgtatggaattccaatgaagcgctggcccagaagcttgggcttaccatcgcatcgcagacccaggccagtgtgccgtatttcagcgatgtcgacgtgtattccgagacgatggacgagacgattccggtcggcaaatgcatcggcatgtccgccgtggtaaccaccgaaacgaatcagggcatcacgttggaaactgcctgtatcggcaaggtgtacgggccggatgatggcgatatgtgcgattggaagatcgagggtgaaccggacgtggagttccacgtggtcaagccggcgaccgtcgaacatacgtgcgccacaatcgtcaaccgcattccggacgtgctcaacgcgccagccggatatgtgacggtcgatcagctcgatgaaatttcatatctcacgtatcccgccgcgctgtacgtggcatagacccatattttcagggatgaaggccggcactcataagggtgccggccggtatcaggcggccagagtcgacgtgcgtggcatcacctggaactggatatggtcatgggtgatgtcatcgggccgttcatgccgtaggttcgactcgatcagcgtcaccatgcgatcgataaccgtacgagccattgcggggacgtctatcgccacagtgctaatgggtgggttggcgcagtcggaaaaggggatgccgtcgaatcccatgagccgtacgtcgtcgggcacgcggatgccatgttcggtgagttcgcggagcgcgccgatcgctatggtgtcagacatgcacaggatgccacaatcgcccgggacaggcgtcaggaccgcaagcagcatcctgctcggcatcggcggcgacatcgccaacttcaaaagcgcggcccacctggccgcccacgccggcatcgctccggtcaccggccagtccggcaccagcatcaagaggcgagaaaccctccagacggggcaacaaacgcttatagactattgcgccttgtataaatgcgaactgccagtcaaccttaccgttgactggcagttcgcatttatcgctcccgctggcgagagctgtcatgcgaagcatgactgagggtggtccacagccgccaatccgtaacatcacccaacgcagcatttcacgatacggacgtttccgtatcgtattttcgtgtggtcaaatagacattttgggcgaaaaagttcgagatacccccataactggccataaaaacaattgcttgagaatcactattgacttttatggcgactcggtatatggacacgtgaaacgaaaatgacatggagcaacggtactgtgtcaacagcaatgaacgaagaggcacgattcccttacgtgcccacaagcaattgaggtgattccggtgacattcaaagccccgctcgatctcacggtccacgctccggacggtatgtatgatcccgccaacgagcatgacgcctgtggtgtgggtatggtcaccactttgaacaagcgtcctgaacgcaaaatcgtcactgacgccattgaggtactggtcaatctcgaccaccgcggtgccgtgggtgccgaggagaacacaggtgacggcgccggcattctgatgagcatgccggatgagttcatgcgtgccaccgtgcccgccgaactgcccgaagccggccactacgccgcaggcatcgccttcctcgaccgcgacatcgaaacctccggtcagcaggaacaggccattgccaagatcgtgcgcgaggagggccttgaagttctcgcatggcgcgtggtgcccaccaacccggacggcctcggcctgcaggcccttgccgccatgccgggattcaagactctcgtggtcgcctctccggacggtgctctggccggcgtggacttggatcgcaagaccttccgcatccgcaagcgcgtcgagcatgaggtaggcgtctacttcgcttccctgtccgcccgtaccatcacgtacaagggcatgctcaccaccatgcagctcacccacttcttcgaggatctgaacgacgagcgcatgaaggccaccatcgccatcgtccactcccgcttctccaccaacaccttcccgagctggccgctggcccagccgttccgtctgctggcccacaatggcgagatcaacaccattcagggcaaccgcaactggctctccgcccgtgaaggtcgtctgagcagcgaactgctcggcgagttcgagccgctgctgcccatcaccactccgggctactccgattctggcaccttcgacgagtgcctcgaactactgcacctcgccggccgttccctgccgcacgccatctgcatgatgctgccgccggcttgggagaagaacccggatctcgatccggacgtgcgcgccttctacgagtacaacaacacgcttatcgagccgtgggatggcccggccgacatcgtcttcaccgacggcacccaggtcggcgccctgctcgaccgcaacggcttccgccccggccgctggcagctcaccgacgacggctacatcgtgctggcctccgaggccggcgttctgccggagatcgcgcaggagcacatcgtgtccaagggccgtcttgagcccggcaagatgttcctggtcgacaccgccgaaggccgcatcatccccgatgaagagatcaagaagaccctcgcctcccagcacccgtaccgcaagtgggtggaaggcaactcggtcgagatgagcgatctgccccgccgcgagcacgtgagccactccggacagtccgtccagcgccgtcagcgtgccttcggctacaccgaagaggatctgaagctgttgctcactccgatggccaacaccggtaaggaaccgctgggatccatgggtaacgatgcgcctatgcccgcactctccagccgcagccgcatgctgttcgactacttcacccagaagttcgcgcaggtcaccaacccgccgctggactgggagcgtgaggagatcgtcacctcgctcgaatccgccatcggccccgagcctaacctactggccgattccgagctgcacgccaagaagatcctcatcccgctgcccgtggtcaactctgatgagatggcccagctcaagcgccttgacaaggcccgcatcctcggcggctactatcgcccgtacgtggtcaagggcctctaccaggtcgccggcggcggcaaggccctcgaagagcgacttgacgagatctttgccgaaatcgacgaggccatcgccgacggcaagaacttcatcgtgctctccgaccgtgaatccaaccacacgtggggcccgatcccgtccctgctgctgacctccgccgtgcagcaccacctgctgcgccgccacacccgtacgcagatctccatggccgtcgaggccggcgacgtgcgcgagattcaccacgtcgcactgctgatcgcttatggtgccgcctgcgtgaacccgtacctggccttcgaatccgttgaggatttggcccgtaacggctacctcaaggtcgacgcggacaccgccgtgaagaacctcaccaaggcgctttccaccggtgtgctcaagatcatgtccaagatgggcgtctccaccatcatgagctaccgtggcgcacagctgttcgaggctgtgggcctgagccaggaagtcatcgacgaatacttcaccggcaccacctcccgtgtgggtggcgtgggccttgacgagatcgccgaagaagtggccatccgtcaccgcgtggcctacccgaaccagtggagcgcatccccgcaccgcaacctgcgcacgggcggcgactacaagtggcgtcgtaccggcgaggaccacctgaacgatcccgaggccatcttcctgctccagcagtcgacccaccgtggcgactaccagatgttcaagaagtattcgcaccacatcaacgacacgtcgaaccgactcatgaccctgcgtggcctgatgaagttcaacaacaaccgcaagccaatcgacatctccgaagtcgagccggcctccgagatcgtcaagcgcttctccaccggtgccatgagctacggttccatctcacaggaagcgcacgagacgcttgccatcgccatgaattcgattggcgcacgctccaactccggtgagggcggcgaatccgacgatcgtatcaacgacccgcagcgctacagccgcatcaagcagatcgcgtccgctcgcttcggcgtgacctccgattacctcgtgcacgccaccgacctgcagatcaagctcgcccagggcgccaagcccggtgagggtggccacctgcccggtgccaaggtcccgccgtggatcgccaaggtccgtcacgccaccccgggcgtggagcttatctccccgccgccgcaccacgacatctactccatcgaggatctgaagcagctgatcaacgatgcgaagatggccaacccgaaggcacgtatccacgtcaagctcgtttccgagttcggcgtcggcaccatcgcggccggtgtggccaagtgccatgccgacgtggtgcttatctccggctatgacggcggtacgggtgcagccccgctcaacgccatcaagcacgccggcaccccgtgggagatcggcctgtccgaaacccagcagacgctgatcctgaacggcctgcgctcccgcatcgtcgtccagtgcgacggcgagctcaagaccggtcgtgacgtggtcatcgccgccctgcttggtgccgaggaattcggcttcgctaccgcagccctgatcgtggaaggctgcgtcatgatgcgcgcctgccagaagaacacctgcccgcagggcattgccacccaggatcctgagctgcgcgcccgctttaagggcaagcccgagtacgtggtcaacttcttcatgttcatcgctgaggaggtgcgcgagatcctcgcccagctcggcttcaggactcttgaggaggccatcggccacgttgagtgtttggatcaggacgaggccatcaagcgctggaagtccggcggcatcgacctgaccaacgtgctcaagcaggccggcccggtacccggcacgatcctgcaccagaccatcgagcagaaccacgagctggagaaggcactggacaacaagctcatcgaacttgcccagccggccctcgaacacaaggaacccgtgcgcatcgaaatgccgattcgcaacgtcaaccgtacggtcggcaccatggtcggctacgagatcacccgccgttacggcgaggaaggtctgccggacgacaccatcgacatgaccctgcacggttccggaggccagtccatcggcgcgttcatcccgcgcggcgagactatgcgcatctacggcgaagtcaacgactacgccggcaagggcctgtccggcggtcgcatgatcgtgcgcccggaagacaacgtcaccttcgacaagcacagtaacgtcatcgccggcaatgtcaccggtttcggcgccacgtccggccagatgttcgtggccggtcgcgccggcgaacgtttcggcgttcgtaacggcggtgccacgttcgtcgtcgaaggcgtgggcgaccacggttgcgagtacatgaccggcggcactgttgtggtgctcggccccaccggacgcaa

SEQ ID NO: 3562 - DNA, 3008 bp, Unknown
  R85_18m  MAG No. k141_22484
catgccgatgacggtgcacaccccgaacacgctctcccatgcgaaccgttgcagcaggatgccgccgatgtccgggccgagcactatgcccaccccggatgtgccgacccgcagtccgacggccagcccacgcataggcgatccgtcgaacaacccgatgatggatggcagcgtggctcccatcaagttgtgtattaatataacatatttatgaaacaatgatacacatcatgtcgggaacaggcatccgcatcgaaaacaccgacctacaacacaatcaggcccgacgaccatcaaaggtcgtcgggcctgattcatacgcgctgtcggactaacggcgtccggacttcatacggaatggcgcattattgcgattcttcttggaatggcggcggttcgggccttccgtgttgccgtatttggcgatcatgcggcgttcgtgacgcttggcaccttctgaacgctcgtcgcgtacgatgcggttctcgttcttgcgatggatgcgcttgtcgaattttccgcccttgccgtaccgatcattgcgacggttcttgccgtactcgttgcggccatcgtcctggcgctcgtcgtaacggtttttgccgtatccgccgcgacggccgcccttacggcggtcatcgccatgctcgaacagatagtcgcggcgctcggcctcggggttgctcatgccggcgcggcgttccgcacggttgcggttcttcttcacggccttcttgctggccttgtcgccgtgcttgcgctgcggctcgccttcggcaacaaactcgccgcctgcgttctcgtgctggaatccggtctcggcaacgttctgctcggcgcggtcgcgattgcgattgtgcttgcgcctgccgctgcggccggactcatcgcccgccgcgttcttggcacccttgttcttgcccttgcgcgggttgcccacgggctgcgacttgtcgaggctccaaccatccacgcgctcggcgcggtcgcccacaagctcaagcacttcgggcgaatcgtgggtcacttcgatcatcttggttttgatgccggcctggttcagcaagcggcgcgcctcgcggcgctgttcgggcagcacgagggtgaccacgtcgcccgccttgccggcgcgggcggtacggccggagcggtgcacaaaggacttcgggtcagccggcggctcgacctgcaccacaagctccacgccgccgacgtctatgccacgggcggccacgtcagtggccaccatgacgcgcacgtcgccggaatcgaatgcggcgaggttgcgatcacgctggttctggttcaggttgccgtgcagctcggcggccggaatgccgttctgcgtcaggttcttggcgagcttcttggcctggaacttggtgcgggtgaacaggatgcgacggccttcgcccgaggcgagcacgcgcacgagttcgtgcttgtcgccgcgcgtggtctcgaacacgtggtgggtcatcaggtcaggttcggtggtggccgaatcgacctcgtgcaccttgggatcatgcaggaaggtgttcaccacttcatccacaccgtgatcgagcgtggcggagaacagcatgtgctgggcgtcgggcgaaatctgctcaagcagtcgcttgaccggcggcaggaagcccatatcggccatttcatcggcctcatcgatgaccacgacttcgacggacgagagcgtgagcgcttgctggcgcagcaggtcctcaaggcggcccgggcaggcgaccacgatatcggcgccggccttcagatcgcggatctggtggatgtacttgacgccgccgtacaccgtggtggtgttcatgccgaacgtgtgggccagcggcatcagcacgtcgttgatctggttcgcgagctcgcgggtgggggccagcaccaggccgcgcgggtgcggcaggaaatcgtcagcgcggcgctcttccaagctggccttcttgcgacgcttgatttccttgcggaactcctccatcgcgatttcgccaagcgaatcataggagccaagccgggtgaccagcggaatggagaaggcgagggttttgccggagccggtgcgccctcggccgagaatgtcgcggccggccagtgaatcgggcagggtgtcggcctgaatggggaatgcggtcttcttgtcatctgccgcaagtacgcgcaccagcggtccgggtacgccaagttcgccaaaggtaagggggcgggattccgcgctgtcgttcatctggaaatcagcggaatcgtcacgatcatcgaaattattacggggcacagtggcctttcatgtcaaaggttacgcaaattacgcaagctttccgagcttagcgtaagccccctactttgcttgatgctcgccacgctgtcatcccactctttactgatgaccccatggggcggtaactcgcccatgaggcggtaactcgcccatgaggcggcaacttgcccatggggcggtttgaagaaattgtgaaaccgcagaataaagccattttcgtctaccgccccatgagggttttaccaccccatgggatgtttgccgccccatgggccaattaccgccccatgggttctaccaccacgtaaggcgagcaccgccccatggaacacgcaaatggcccctacccgtgaaggtagaagccattgtgcaaaagggctgagccacaatacggcccagtagccctaaaacacactacaaaatatccggatcgtctttggcgatagtgccggttgccttgccaatggccttcaggccgtggtaggccacaagaatcacgatcgtgccaatggcaatgccgttgaaggaaatgccaccaacagtgaacgcgaattggccgatggcaataatcatggtgatggctgccaccatgatgttcagcggcttgtcgaagttgaccttgttctcaacccagatgcggatgccgatcatgccgatcatgccgtacagcagcgtggtcacgccgccgagcactccggcggggatcgtgttgatcacg

SEQ ID NO: 3563 - DNA, 8232 bp, Unknown
  R85_18m  MAG No. k141_22531
gatttcaagcagtacctcaactccaagctgcgcgagttcgcggccgagctgcgccgccgttcggctgcgggcgctggcgaggacgagctgcgcacgctgaaggacgagtacatgggcaccgtgtaccgcatctgcgccgtgtcgcttggcgagccgccggagaagttcgacttcttcgcgcgcaccaaggatgacgatgaggataagaagggcgaggcctgcaagtgcaaggccgaggccgacgcagacggcaaggccgaatcctgcaagtgcggcgactcctgcaaatgcgagggcaaatccgacgccaaggcctgcaagtgcgataaggacaagtccgacaagccgaaaaccggtaaggacgagcgcccgcagattcgcgagatcggcatcaccccgcttgagttctacaagaagtacgtgccggtggacgtcaacgatttcgcgacgctggccaacgccccgctcaagaaccgcccgttcaaccggcgctaccgcatccgcttcagcgcgaacgtggccgaggcgggcgatatggagttcgtcaacgtgccgctggacgtgttcaagaaggccgcgcttgaccagctcaccgccggtcacccgatctggttcgcctgcgactgcacgcagttcgcgctgcgcaaggatggcttcttcgaccagtccgtggtgcgcgtcgaccagctgttcggcactgaattcactggcgacaaggcccacggcctcgaatacggcgacagcccgagcaaccacgccatgactttcaccggcgtgaacctcggcgaggacggcaagccgaaccgctggaaggtggagaacagctggggcaaggacgccggcaaggacggctactacgtcatgtccgacgcctggttcgaccgctacgtcaccgagctcatcatccgcaaggaatacctcgacgacgccacccgcgccctgctcaccaccgaaccggtcgaaatcgacccctggcagcctctcacccgccgctgccgctgacgttccgctggcgggagcatatattcgaatgccccttctctctgttcagagagaaggggcattacgttatgcgagtacgcccggccgcacctattcgagactatcgcggctgagctgagcaaaagtgccgtcatcatcggccaattgccggtaggttccggcctcgctaattgttccgaactagttatccacagagttatccacatctcccgcaagctagagtcacataccccggttttcatagcgagcatgtgaccgctgcgctacggtggcgtcatgaacgacatattgcccactccaccgcccggcgtattcgacgacgaaccgtccggctggccccggccccacacaccgggcgttgcgtctgcgcgcaccatcaatcctgagctacgttcatcaccacgtatggcgagttccgcgccaactgtgattacaggccctgtgtcgccagcaatgagcgaaaccctcacccaacgtaagcgggaaatgcttaaacgatgcacagacgccgcgcaacagctcgggcaaccggtgctcttcggcatggccacatcgctgatactgcaatccgtgccgcttcccaaggattgcgatatcgaccccgccgagctccataccgtctccgactcacaccgcacacgaatacgtgccatcgtgccgccaacgacaccacacatctggaagccgctgagcgatgcgcacaatgtgcgtatcaacaaacatgtgtacgcactggatctgatacacacttgggcacaactcgccgctcatatatcgctcgaatcgctggtcatacttggcgacgcaatccttacggcaatcgcccgcaagccgggtctggcgaacggccgcactgctgacggcatttatcaggacttcgtgcggcaagtcactggactcccgaaattcaacgcaaaatccaagtgcatgatcgctcttgcattcattacgccccgcgtggactctccgatggaatcaaagacccgcatcgcgacgacgaaatacgggcttccgccagccgtgacaaattacacggtgcccggcgcgacattcagcaacggcgcgccgataacgctcgatctcgcttggcccgaatttcgcgtcgccatcgaatatgacggcgatcatcatcgcaccgacaaaaaccagtggcggcgggacaacgacaagcgcgaactgctgcgacatcatcattggatcgtcatcatcgccactgccgcgaacatggccgatgagccatcccaagccgaactcgcctaccgggtcgggcggcagttggcattgcgaggtgccgtattcgatttcactttgacggcaacgccactcgatgagatcgcccggcggaggcgacgaagaatataacgtttatcgcgaaagtcgtacagtatccatgttgcgccgacgctgcgcgactcggtgtccgtgtccgatgtcccggtagcgatgtcaatcgatttatgtgtggaccgggccagatttcgctgtcccggttctccatttcgcccctttttgagcaaccaagacaaaatttcattcacctatcaccccaccgtgcaatattcgccatcgtacatcggcggaattccggggttttgggattacggataatgggcgtttacaaggggggctgtcccggttcccaaaaagaagccgaaatcacgaaccgggacagcgaaatctgtcccggtaatcgcgtcaatcggttgccgtcatcaccggaacatcaactgcgcataggtcgaacgcttcaatgcgcaacaggcatgcgaccatatcgcgatagcgatattccgacggaagtatgggactcaccacgcgaccaatattatttgccgagctttggagcctcgtgcttggcgtggcggatcacggcatcggggaaaccggcgtggatgtagtcggacagcatccgcaatagcctctcgtcaaaggtgtgccgctcatcgctgctggcatcgaccaggatgaaatcccatgagtattcggtgtcaccgtcgttgatgatgagtccgcggccagtgatttttgcggccagcaacgcggcgatctgtatggcgcctcgcttgaccaaggccgattccgcttgagtcaggttgcccgaaaatgtgacggtatacatcatcagtccccccttctttgttattttctagaacagcaatgccttattgtaaacagacagcactctgccataatccttttttcaatatgcggcccatggcattcccagcattaaaaaaagaaacccggcggagggggccgccgggtgagagagaagagagaagaagggttcagttatggggttcgaagaacctcgccaccggtatgaacttcattccgttgacatcttctatgtaaccgccccatgcttggcgaattgatgtgcttgtctgggaaaagtcttggcggagtgtgacgaatttgtgacgcccgccgacaaccggcctcgcattgtcggggcttgaccgcacatacggcaacgggccacctcgcaacacttcatgtgcgaggtggcccgtcagctacgagctagcaatgccgaatcactcggcggcgagtttggccttctcggcggccagacgctcggcttcggcggcacggcgagcagccagcgcttcatcgaagcgagccagctcctcttccacggcctcggtcggaatcttggcgaagatcggtgcgggcttaggcaccacggcgccgacctcgatcgcctcgctcttccacgggtgcacgttcacaccgagctcgtaatcgccggtgatgatcggatacgtgaagccgggcttgtcgagatcctcgacttccttgagctcaggcagcggcgagaaggtaccggtgccgccgagcgcctcccacaccttctgtgcggagtgcggcaggaacggtgcgagcaggtggttcgcgtcagacacggcctgggcggccacgtgcagcacggtgccgagacgagcctggtcgtccttaatcttccatggttcggtggcggaaatgtacttgttgatgtcaccgaccacacgcatcgcctcagacagggcgtgcttctggtggtgggtttcgatggaggagccgaccacgtcgaacgcggcggaagtctcttccagaaggccacggtcttcgttggtcatcgaatcctcgtccagcggcggaatctcgccgaagttcttgttgatgaggttggccacgcggttcaccaggttgccccacgaggaggcgagctcctcgttgttgtggcgcacgaactcggcccaggtgaagtcggaatcagaggattcggggccggccacggaaatgtagtagcgcacggcgtccacggggtagcgggcgaggatgtccttgacgtagatcacgatgccgcgggaggagctgaacttcttgccttccatggtcatgaactcgctggccaccacctgctcaggcaggttgagcggacccatcgggccggtttcgccgcccttggagcccttgccgttgtatgcgagcatttcggacggccagatctgggagtggaaggtgatgttgtccttgcccatgaagtagtaggccgggcagctcggatcgttccaccattcacgccacttctccgggtcgccctggcggcgggcccattcgatggaggccgacaggtagccgatcacggcgtcgaaccacacgtacagcttcttgttcgggttgtcgatccagcccttcaccggcaccgggataccccagtcgatgtcacgggtgatggcgcgcggcttgacctccttgaacaggcccagcgagaagttgatgacgttggtgcgccagcccttgcgggtctccagccatgccttgttggcttcggcgagcgccggcaggtcgaggaagtagtgctcggtctgctcgaagcgcggggtttcgccgttaatcttggagacggggttgatgagctcgtccgggtcgagctcgttgccgcaggcgtcgcactggtcgccacgcgcaccttcggcgtggcaaatcgggcactcgccctcgatgtagcggtcgggcagggtacggccggtggacgggctaatcgccacctgctgggtgcccttgtagatgtagccgttctccaagcactgcttgaacatctcctgcaccacgtgctcgtggttaccggtggtggtgcgggtgaacaggtcgtagctcaggccgaggtcgcacagatccttggcgatcacgcggttgtaacggttggccagttcctgggcagtgaggccttccttctccgcctcgacgagaatcggggtgccgtgctcgtcggtgccggacaccatgagcacgtcattgcccttcatgcgctcgtagcgcgcgtagacgtcggagggcacaccaaatcctgcaacgtgaccgatatgacgggggccgtttgcatacggccaagcaacattcaccaaaacatgactcataaggcttgattatccggcgcggcggggacacgcccggatagctgccgcgccgccatcctcatcccactcacctatccgcccgtaacttcccccacatacttatccgtacaccgcttgcgcgcttatccgcatacgcattcgcacacgtatccgtacgtgcatccgtacacacgtccacgcacccatccgtacgcacgtccacgcacatccgcacacacttccgcctgtcgatatccaccgagttatccacatcattcgcgcacctagtgaagttatgcacttatccaccgttttcgcttatccggtggcgcgcaagccgcatttctgcatattgttcggtcatggatatcacagcaggtccgatgacggacatcacaacagtcacctcgccggcaaccgcgcagcccgcggtgccgccgatactgtttaccaaggatctgccgggaccgctcagccttaaccgtctggccgccttcggcgcgttacgtaagctcgacgattccgccggctactggatcgagcattcgggcacactgtatggtcgcgcaaaaatcgtcgcggaggtcgccccgtttggcactgtggtgtgttcgatgaccgccgcttgggtatggctgggaggccccgactttccgagcaccatagacgtgatctccacatcgcacttccgctcggcatccgtcagccgccgtatccgcgtattcaaaagattgacgttgccggagcaaatcatcaagctcggcgggctgcctgtcaccacgccagcccgtacggcttgcgacctggtgatgagtcctgaagacatccccgatccttccaccgtcaacgcactggtgtgtcagctgatgtccgcgtaccagtttcggccaaacgactgtctgcaaatcgtcaaggagcatcggcatcacaagtatgccggacgcgcacgcatgttttttgaatcggtgcagaaggagattgacgaaccggctttggagcaatgcgcatgacgaggggattcatcgccaaaggacatcgcagaggccgccatgccgctcaccgtttacggcatttgcggcaggcgcaacggttgcctcgccacgcggcggcggcacactcatccgaatccgcatcgcgcgcaatctcggatatgaccgcgccgcctgaaccacccatcagacttacgcccgcggtggcatgttcgcccgatacggatgttgccgtgctctggcacatcgcatatcacgtgcccgaactgcgtaaatggctggttgccaatcccaaagccgacgcgcctttgctggaattggtctcgcagcgtggtgggcccggggtccggcaggcgttggaaatattgttcgagtcgatggaagcgtaacggggagataatcgccggctgctgcgctatcccttgattttcagcacagccgcatacacctgcttgcgattggccaacgatccgtcagccagtggatgctcctgcaccacttgcgcgatggcgtccttgatacgcaggccgtcctccaaagcacggtcgatggagagcacggccatgtcatccacgctcaacgtactgggcgcggccgcttcggcctcctcgttggacgcgccgccgatgaccagcaccatctcgccacggggcggatcatcaatcacactttggcgaatctcgccaatcgggccgcgacgaatctgctcataatccttggtgagttcgcggcacagggccatcgggcgattcgggccgaacgcgtccagcagatcgtccatcgaatcggcaatgcgatgaggcgtctcgtagaacacgatggtgcggcgttcgggcaacagcgtgcgcagatactgcacgcgctcggaatgctttcgcggtaggaagccctcgtagcagaagcggtcggtgggcaggccggagagggcgagcgcgtcgagcacagcggaggggccgggcgcgcaggtgacgggcaggccgcgttcgatggcacggcgcacgatggccaagccggggtcgttgatggtgggcatgccggcatcggacacgacgagcacggtggcgccggtttcgacctggtcgagcaggccgtcggccttgtcgcgctcgttgtggtcgtgataggcgatgacgcgaccgttcacatagacgccgaggcgacgggcgagatcgtagaggcggcgcgtgtcttcggcggccacgatatcggcccgctccaagagggccaccagacgggcggaggcgtcgccaacgttgccgatcggggttgcggcgagcaccacggtgccggcggggacggtcacggccgattcgcgggattgggtggcggcggattcgccggcatgaacttcatcattgcgttcaggcacttgcgtcacgctaccgtcagcgtcatactgctcattcaactcatctgcgcttgtcatactcccagtattgcccataccacagagcaatccacgacaatccatggcggaatcgaggcattctccctttgcaggggctgatttcacatgttccggaagtctacttccgtttcaaggggctcctcatccggtgaagcaccagtacaaacggctttgacgcaacgctattccgccattttggtggcatatctacttgaccatcagcccctcgaaacgcaagtagacctccggcaaaccccaaatcagccccttgaaacgcgagatggcagaatttcaacgaagacaaataaaaagaccctctgcggtggaatgaatgcagagggtctcgtggagctgacggtagtcgaaaccgcgacctcttcgatgcgaacgaagcgctctaccaactgagctacagccccttggatgttactttgctccgcaaagcaac

SEQ ID NO: 3564 - DNA, 17197 bp, Unknown
  R85_18m  MAG No. k141_22795
cttccatttccccagcggggttggcttaatcgcagtatatctcactgctgaccatgactgttttacttactcctaatcaatgagcttgtagccgtgatcggcgactacggacttgagcttggtgaggtaggtttcggcggccttggatagcttggaacgctcgttcgtgatccagccgaccagcatcgtttcgtcggtgtcgagcggcacggtgacgatcttctcattgttgaggtcgccgttgtcgatgccggtgcacaccgtgtagccgttgaggccgatgatgaagttcagaatcgtggcgcggtcggtcacgttgatctgcttgggggagtattccggccagaccgcctcctcatagaagtagaacgagccttcctcgccctgttcgtactggatgaacggatagggcttcagatcctccatggtgatgatctttttggcggccaatgggttgtcccgtgagatgaacacgtgcaggggggcgcggaagagcggatggaattcaaggtgtttctcgcgcaggagtttgccgatcacgtccttattgaagtcggacaggtagatgatgccgatctcggactgcatgttcgccacctggttgatgatgtcacgtgtacgggtctcacggatcgtgaactcgtattcgtcggacttaatggagttgatcatctccacgaaagcctcgacggcgaacatgtagtgctgggtggagacctggcacagctgcttgcgcggtttggcgtgcttgtagcgctcttcgagcaggtcggcctggtcgagcacctggcgggcgtaggtcaggaattccgcgccgtccacggtcagggcgatgccctgcgaggagcgggtgaaaatctcgatgcccagctcgttctccaattccttgaccgacgagctcagggccggctgggagacgtacagggcatgggaggcctcgttcatcgagccgcactcgacgatcttgacgatgtatttcagctgcagcagtgtcataaagtctatttatatcgctagggatggtcgccacacgggtttataacctcatcaatccactatggcgacacaatatgagatgcctcgcatatcgcggacgctgtgtaacgggatatgcgccacattggtaacctgaggcaggaccagtacgatgccatccagaccttctccttctccagcatcgaccgcttctccacgccgagcctgatgaccaggctcggcaccgacgtgatgaacatccagaacgccttcatgatgattctgcgcatggtgccgcgtgccgcgtcgttgaagtgctcaccgaacagtgcgacatgccggtcgccaaacggccggtcaccgtcgtcaaggacgggtccatagacttcaactgccgcgacgcaatatttggcgacttacaggcgtacgccgagttcggcgagcgattcgcgcgcctgcgacgcgttctcgaagaggatgctgtggatgccgacctcgttggcgccgacgatgttcttggcggtgtcgtcgaagaacacgcagcgctcggccgtgagaccgaagcgggtcaggaccagctcgtagatgtcggcgttcggcttgtgcatcttctccacgccggagaccacggtgccctgcagcagctgttcgaggcgcgggtacttctcgaaggccaggtggaaggtctcatgcgaccagttggtcagaccccatacgccgtagccgtgggccttcaaatccgccagcagttcgaccatgcccggcagcgtgcggggcagcgcgtccgcgtagtggccgatgtagaacttgaagatgtcggcgagttcctggccttgttcgcgtaccacatccgggtagatgtccgcgaaatcctcgccggcgtccatgcggtcctcgtagtggaagaagccgcaggggtcgtcgtcggcgcagatgcgttccacgatttcatcggggaatcggccttcaaggcatgcgcgggtgttccagtccagcagcacgccgcagaagtcgaaaatcacgtcggtgatgggggagttggccatgatggttccttgtgtgtttgggtcgttgggtggggtctgcgatttagtgtacggggtttgtgtataggtcggggtatgtggagtttgaggcttatgtttctctccctccgtctcggctttgcgagacacctccctcgtcagagggaggtcaacaaggttatgcgatgacgtcggcgatggcttcggggatggcgtggatcacgtcgccggccacgattgggtggccgagcgtcatgaagcgctggcgatgctcgcggccgatcagttccggctcctgccagccctgctgctcggattcggaggcgatcgccgccgccaggccatgcaggtaggcggccgaggccacggtctcgcccgtggtggccacgtcatcctgctgggcgagtagggcgccggtcagaccggccagtacgtcgcccgcgccggcggtgcccagccaggccggcgcactgcccgacgcatagacatggtcctcatccaccacgatggtcaccgcgcccttcagcaatacggtggcaccggtgagctcgtgggcgcgcttcgcgctggccaacgggttcagccgcacgtcgtcggcggtgtacggctcgtgcgaatcggcatgctccgcggtgctggcggtggtttcgaaccggttgagcagtttcgccatttcgccggcatgtggtgtgatcaccacctggccgggcacacgctccggcagcaggtcgagtgcgccggcatccaccacgattggcggcatgtcgtaggcgtccttgttctcatcctcgctgccgagcgcgtaatgcttgagcaatgcggcgatggtgtcccgctgcatatcgccgtcggcgccctcgacgctagcctcgggcacgccggaccccacgacccaggactgcacatgtcccttgccgatcacggcttccggcagtgcggtgagcaccatgttctgcgcgcgctccgggcccagataccggaccatgccggtgttcgcgcgggcggcggcgctggtggtgagcacggcggcaccggggtagcgctgcgagccggtcaccagaccaaccacgccccgggagtatttggaatcctcgaaccgggggagacggaccgcgtcggacgcgaacgaattatccaccacctcgacgtccggatccttgtcgtcgatatcgaatccgaaatcgaacaactcgatacggccgcaggcgaacgtggcgggcggcagcaccgcgcacggcttcatcgcgccgaacgtgaccgtgaccgtggccggaatgtacgggccgggcagagaaccatcgttcacaccgacgccggatggcgtatccacagcaagtaccagcggaaaatcgcctgacgactcatggttcggcagggcgggctcatcgggagactcgccgtcgagaccaagggcggaggcgagcgcggcgggaatgccgcgtagcgagccttgaatgccgatgccggtcatcgcgtcgatgatcagatgcgatttcctggccacggcgatggcggtctgcaatcgctcgccggcctcaccggcggaaaacccggacgcgcaaccgggaatatcggctgccgggtcaagcaccagcaccttgccgccggcgcgcacgagcgcggcgaatccggcctcatgcagcgaccggcccacggcgatggcagtgacgttcgcgccctcctgggccagcgcggcggccgcgaacagaccatcgccaccattgtctccggccccggccagcagcacgatcgacgtgtcctccagcgccagatcctcgtcgtccagcatgccggccgccatgtgggccgcggcctgggcggccatgcgcatcagcggcacgcctttgtccagcaggggtcgctccatggcccggaccgtatcggagtcataggcgctgtgcagcagcagttcgcgatgatcggcgtcttcggtgtattccatggcaacccctttcttgtgtttgttacttgcggcccgtgtttacaggccgtacacctcgtgggcgaacttttcgagcacggggatcgaacgcttgactttctcggtgtcgatgcagtaggccatgcggaagtatccgggcacgccgaagctgtcggacggcacgaggatcaggtcgtattccttggccttcatgcagaacgccacggcgtcgtcctccaacgccttggggaagatgtagaacgtgccgccggggcgcaccacgtcgaagccgatgccggtgagcgcatcgtagagcaggttcatgttcgtctcgtagacgttgaggtcggcggtctggtcgatgactttggctacgcccagctggatcgagctcggcgggcagttgtggccggtgccgcgcgagatttggcccatcatcggcacgagcaggtcggcgtcggtggctgcggggttcaccgcgacgtagccgatgcgttcgcccggcaggctcagcgacttcgaccacgagtagcaggtcagcgagttcgcatagaagctggccgggtagggctgggtggctccgtcgaacacgatttcgcggtaaggttcgtcgctgatcaggaagatgtcgtggccgtactcggcctgcttggcggtcaggatcgcggccagacgcttgagcgtgtccgccgaatacaccgcgccggacgggttgttcggggtgttgatgagcacgacctgcacgttcgggttaagcgcagcctcgaacgcctcgaagttgatctggaagttctcggtgtcggccggcacgatggtcagcttggcgccgatgcccttgacgtacggctggtattcggggaagtagggggcgaaggtgatgatctcgtcgcccggcttggtcaccgcgcgcatcgcgtgggacagcgcgcccgccgcgcccgtggtcgggatcatctggttgccggtgtatgccatgccgaatcggtcgttgagatattcggcgatcgcatccttgacggacgggatgccgagcgaaggggagtagccgtggatggacaccggatcgccgttttcgtagaggtcgaccatggcgtcggtgaaggatttcggagccggcaccgagggattgccaaggctgtaatcgaacacgttctggtagccgatttcagcaccgcggctcgtggcgtactcgctcagttcgcgaatcacggacttgccgccaagcatggccttgtattcctcattgatcatggctgttctcctcgcatggttgtactggtatgcaccacgctactactatcgcggccggtttgcgccatttgccgcgccgtacctaagccggctgttctatttgttctattagtggagtttgaaccggcatatacccttgcaataaagccatttgtagggtctgaggctttccggggttgcttgtctcatagattttcggcctcttgatatttgcggttgatagctgtgatgtgtgtgggcgatggctgttgaggcatcatggggatctcttcgactgtccgccgtcgccatgccgccatgatgcctacagaaagtcgagttgcgtatttccgccaagcagggtggtgaccggtggggggcgatcggtgggggtgaccgacacccgctataggcagcaggcagccgcacacatcccaatatctgtgggacggcagacgagtcaatcgtttgtcgtccgcgccgtccctcaagagcgcgggatggcagacaagtcaaccgtttaacgtccgtagcgtcccacaccgacgactgtagaaaccgcggaataacgccgattctcgctgcagctccatgattatgcacaaccgttcatagcgagcgctgtgggacggcgggcggaaaacggccgaatccgcgtgccgtcccacacctcgtacaatccgcgttttgggaaagcatcaccgtaaggctgacgcgcatccgcatccacagcaggagccttaccggccgtaatcccgcactcgattattttttctgacaggaaatcgaacccgaaacactaacccatgcccgccccaccgcaaacagcgaataaccaaaaaatgcatgatctatccttggtgccgaataatgagagcctgactgtagtggctacgggcagctgtatcggagaaggattcgaccagaagcgtttcgacacgcttctgcttgccgctccggtctcgtttgagggtactctctcgcaatatgtagggcgacttcatcgcgagaatgatggcaagaccgaggttcgtgtctatgattacatcgacgtgaccgtgcctttatccgctgtcatgtatcgaaaacggctgaaggcatacgcaaatcaaggatattcggtaaatcctgaccatactgacaaaatggacatgctcagtgcaaaggcggaagcgttgcgcgcttgcatgacggccgcgacgcagggcgaagatgctgcggatgcgttgctcgacacccggtctgacggattattcgaaggcagcatcgttacagccacgaattatgcagagatactccgcaaggatattgccggttgcgcacggtccctgattatctcggctgaatatgtatcacaacagggactcagcgcaattgacgatgaattgctccgactggccgacaggaaagcgctcatcgaagtttatgtccgtttgccggcgactgctgcggtggcaaccagaacacgaatagaacggaatattaatcggctgcgtgctattgggtgcattgtccggaccgtcgaatcgtgttccgattttgccataatcgatgacggattgatttggtttggaggcatccctttacttggcaatccaaggagtgacgactgtgcacttcgattcaaagatacgaaaatcggcgagaatctagcagatggactgaaacgacggtcgtcctgagtcaatattcagttaagataatcgcgcagtacgagggcgtgattgatgtgcgggtccttggcggcatagagcagggtcacgtcgggatgctccgcgcagatgtggcgcagattgtccacggcggcattggcgtcgagctcggcgatgtaacgcatgcggaattccgcgaatttggcggggtcatggccgaaccatttgcgcaggaggggagaaggggcgacgtccttcagccacaggtccaacgccgcacgctctttcgtcatgccgcgaggccacaggcgatccaccagcacccgatacccgtccgacgcagtcggctcttcatatatacgtttgattgcaatacccatacgccccatgattggcgtgcgcttgccggaagtcaaggggagacgcgatccatctacccgttcgatttctgggtgttctgtctaaggccttgtgctatgacagctagcgattcagcagcttttggtgatatcgtccaaccggaccgccttgcccctgtcgaaggtgttcatagtgagatcgacgggtttggtcttgatgaacgctgacagcgcggtgtgcggcgggttgtcgatcaagtgggtgatgggggcaatcgcctcctcgacgctgacgcccacaatggcgtaaatggcacgcgccagcagcttcatcagtggcgaatcgaaactgttcaatgcctcattgctgcgcacggcccaagggttgaacaacacatagtggatgcggcctccggtctgctgttggttttccgcgaagagcactcccagcagatcgttcagacgactcgtacagatagtcgcgcaatgctagaacgtgattgatgtgcacccttcattgacggtctctcaattgatctcctgcgattcatgccgtataaggaagttctcgaccaaggcgatcatcgtgtccttccccgcaggtgcggacagcgcaatcatcagcgtcatcgccgccaaggcgttaccctccacaagcaggggagtcatcgtcgcccagtatactgttgccgttcaggaaatacacgaacagtgcggcggcacaacgtttattgccgtcggagaacgggtgatccttgacaacttgatacagcaggttcgcggctttctcctgggtggaacggtacagttcttcgcctccgaacgtctggtagagtcctgcgacgattcctcggaacgaaccgttgcgtttcctcccgaacagatcggattgcgtgtagaacggcatcgaccggatgaacagcatcgcgtcctcataggtcaagacccactgggactcgtcgcccttgggtatagggacattgcctgtgtcatagtcgttaagcagcacaagactcggcaaatatcgttccaagatctctgcggtgccagcaatttccggttcggtgggcctcgatagcaccttgacgacggcgtgaagtgcgtcaagccgcttgtgattgatggtgtaaccatcaacgagatgctgcttcagaactgagttggcccatcgccgggaatagatgccttccttggatttgacgcggtatccgaccgacaggatcatatccaagttgtaatgctcgacttggtatgtcttaccgtcagatgcagttgtcgcaaattctgcgacaactgaaaatccattgagctcttccctcaatgcattgccgacatgcttgccgattgttttgatatcgcggccaaacagcaatgccaattgctgtctgttaagccacaccgtgtcctcgtccaccttcacatcgaggtgcacggtgtggtccgcgctctcgtactgccggtcgagaaccgggtggcaagggcggccaccaccagtatagtcaccacaccggcgcacaggatgccggcgatggaggccacatccgaagcgatgtccgcacctgcggccggcagcagtgtgccggaagcgtagtcgaagcgcgcgatgtacaggatgtagagagcgaccgtcaccaccgtctgcaatgccacgtacacggcgtagataccaaacagggcaaggattttcgcattgatgatcgtggcgcggtccagatccttgtacaggaacatgcggccggaggccacgggcgtatagatggcaccagccaccagataggccatgaccaccatcggcagcatcagcatgttctgtacgacgaactcgccagcgaggaaatccagcacactcaccgaaccggtctttccgctgactttcatgaaatcggagttgaacaggttcacggccggcagaatcagtatgaatgacggcggccggatccaaagccgcgaccgccgcacgtttcgcgacaccgagcggccggccaagctcgataaccgtgatccgcttctgttcgccggcgaattcgtccgcaagccggccgcctttgatgaacaggaatcgcccgcacaactcctgcaattcgttgagctgatggctggagatgagcatggcgatgctgcggtcgcggtacggccaaagtcccacaagttcaagcaccgggcggattgggaggtgcgggcggcgggtcggacgatcacagtgtgacccgaatacgttcatgaatcatcgaatcacacggcgaggcggaccgcaagtattcgagagtcgccagttcggtcgatttcaatgacaatggtgtggacgattacgcggatatcgtggcgggtgcgcgcaaggacgccgaaaaccatccggcttacgattccggctactatcagggcggctatccgccggccgatcgcggggcgtgcaccgtacgtgattcacaacatggcgcagcggcagcgcgaaaacgactacttcgccttcaagaagcacatgacggtcaccgggcactaccgtttcgacgcttcgaaagtgctgtagagcgtactcagggcttggcggtgacggtcggagcggcgtcggcattgccggctttggctccggctgcatcagctgaatcggtgccggccgcactggcgttagcactatcgtcagcgttggcaccgccggctttggccttggcatcagccgcgctcccgccatcgatcaccagtcgcagataatcgcggtcggcggacttgcggcgcggcacgaaccgactgatgatggagtttttcttgccgcggttcttcacgtacaggaagccgaacacggagaacacgaccgcgccgatgaagttgacgataagatcctccatcgtgtcgatcagaccgatgtcgaggtagccgccgaggcccaagtcttggccattgaccgtgacctgggtgatgtcgttgatgcgaatcgcatggttggtgtgcgtggggtcgagcatcaccgagctgatggaatgcacgatggcgtctttctgcatgtcgaatccgaacaactggtccatgccgaattcgaagaactcccagatcacgccgatggtcatggagaagcagaaggagacgatcgccagatacaggggcgaaagctcgaacttcacccggtcggaccggttgagcaggtcgaccagcgagaagccgatcgccgcggcgaggaagccgttcatcgtgtgcaacaccgtgtcccagaacgggaagatctcatagaacgaactgatctcgccaagaatctcggacgagaacacgaacaccagcacgatgacttccagcgccgaaggcagctcgatgcggaactgcacctggatgaacgccggcgccaacagcaacagcaacgtcaggatgcacaggaacacattttcgtagtcgccgttaaagaactggagtattgccatggcgagcaccagcatgcgcagcaccacatagaccgcgaatgagcttttgtgttcgcggatttccatgcctacggctcggctcatggtcttccagcgtacgcgccaggacggtttgcgttgtgcgtcgtgctgttgtgaccgtttccgggtcattcttgcctctttctcgcattgttctcgcgccagtctatccgaacctgcttacaggcaatcggcaagaacgggcgatagtctggccgcatgaaccgaatggaaaccgatgctgcctcgattgtggaccgcacgaatcatgcggcgatgctcgataggacattgtgccggcggcacgccaccgcgtgtgctgattgcagtgctcgccgtgctgctgtaccgccgtatgggcatgattacaccgctgatcgtggctcatggcatgtatgacgtctccgccgccatgaccaatctgaccggaatcgccggctcctcatggtcactggtcgtagggctggcaatcatggccatgccggtggtttgggctatcgtgaggtgtgcgagataggctttgtaccggttggcagcaaatcaaaccagcgagacaacggaatgaacgaagcgaaaggaacggtatctgatgactccgattgaattgtcaacccgacgccgggttacgggactgacttcggatgagttcgccaggctgttcgtctctttgcaacgcgatgtggacggcgaagccgcgcattggagcgccacggacgtcgaatcctgggagctggtcggcccgccggtgaccgccgaacagcatcttatcgacacgttcgccgcggccaacgaattcgtggccacgcttgcggaccgtctgtaccacacgatcatgccagtcacggaagaatcggtcatcaccgcatacgctgatgacctcacattctgggcatcgcatccggaccttggcggagtgccgtgcgcattatggaacatcgccgcactgcaggcggccgaatgggcccgcaaggaaaccggcatcgcctgtgaactagacgtgcgcgaaccgctggtgtgacagctgagctcaaacatgggcgtaggtaacggcatggtttgaggactatggtgttgcgttaccggtcggaaaggatatgatggtggggcgtcatagcaaaaaagcgcgtggacagtcgaggagacatgcgcgaaagccctccgtttggagtgaaattcgcggctatctgctgacggtgatcgcggtgatgctggtcgtgttgctgggacgcaccttcgtgttcaacgtctatgtgattccatcccgtagcatggaagacacgttgcaaatcggcgaccgcgtatttgcctcgcgattgactccgagactctttgcactgcaccgtggcgacatcatcgtgttcaaagatcccgcagactggatggagggggagcagcttcccaccaatctgatgtcgataatcgacagcaatcgttacctaatcaaacgtgtcatcggtctgcccggcgataccgtcgcctgcaagggatccggggagcccatcacggtcaacggcaaacccattgatgaaagcgcttatcttaagtccggcgtgaatccaagcgacagtcctttttccgtaaccgttactgacggcaacgtgttcgtgcttggtgataatcgctccaattccagagattctcgataccatcttgacgacggcaacaatgggctagtgccatacgacgatatccaaggtgtggcgttgttccgcttctggccatttacgagaatcggcttgctcaattgagtttggcgtgaatacgcaagttgacatgtgtcgcacggcccggtgcatcctgcagtcggaccgtttccggaaccctctccccgaaatctgacgaccccctgtctcacagctatcgtacagctccgatacgggaaacgtgcgggtgattccataacgactacgtacttcaggaagtgacgtgtatcacattatggtcatgtgttcagtgccgcagataggcgaagtttattcatgagccgaatagggccggtgaagcgggctctcactgcgttcataatacggcatatcgtgaacggcgttatcatcacagtcaggccgaattaaaggaggctcggtcatggtcgccgcatccacggcattcagcccgtcaagcacgatgacggccagtttggtggaatcgactggcctgcccagtgccgctattcctgtgcacgaggatggtaacaacggcaacggcgacagtagtgccgatggcagcggcgacgacggcggcatggtcagatcgctgagcctgtggaactacttcaccatgggattcggcgcaatcatcggcaccgtatgggtgctgctggtcggtgactggatgatcgtcggcggtggcccggtcgaggcgatgatcgccttcgtgctgggcgccgtgtttctgctgccgatcggctcgacgtccggcgcggttaccatggtcgggtcgtttctgctcggagtgctggtgatgacgccgctcttctacaccggtttcgacacgattccgcagagtgccgaagaggcaagcgaaggccttgactggaagaagttcggtatggtcatctcagcttcgctgctggccgccggcttaatcatcattggcctgcaggtgctgccgttctccccggccgcgctcaaacccacatcatgggcaatcgtggcggtgtggatttgcggggtctggcattgcgttggatcagtgcacgttcacggcgcgaatagcggtgcgccggtaggtcgcgagccgttcagtcgcgcgcgacccaaagcgtatcgaggtcgtcggcctcggtcgcctttttgcgcttgcgtacccactgttgcaggaaatacgccccatagcaggccacgatgaacacgagctcggccacgagcgcgaaccgttgctccacgtcgaaaatcaccaatacgaacgatgcggtgcacaggatgaacgccgcccaagacacgtacggatagccgggcgtgcggtatttgagttcgctggtggaatggccggactccagccaacggcgacggaacacgatctggcagtaggcgatggcgatccacaccaccacggcggacaggccggaaagcgccaccagcaccaggtacacagtcgaggcggcgatcacggaagacaggagcgccagcaggccaccggccatcgcggcgcacaaggcgagcatcggcacgccgcgacggttcgttttggcgaaccagcgcggaatcatgccttcgttgcccatcgaccacaccatgcgcgtggaggcgtacaggccggaattcgaggcggaaagcacggccgtcagcaccacgaaattcatgatgtcgcccgcataggggatgccgatgctgttgaagacgagcacgaacgggctttcgcccacgccggcctggcgccacgggatcagcgcgcacatcacggtgatcgagccgatgaagaacagcgccagacgccacagggtggtgtggatggctttcggcacggcggtttgtgggtccctcgtctcaccggcggtcacgccgatgagttcggtgccggagaacgcgaagttgacggtcagaatcgtggcgaacaccggcatgaagccgttggggaagacgccgtccttgatgagattgccgaacatcggggcatgttggtagccggcgaccgggatgacgccgaagatggcgagcgatccgatgacgatgaacgcgcagatggcgaacaccttgatggaggcgaaccagaactccgcctcggcgaagaaacgcaccgacaaggcgttcagggtgaagatgagtgtgatgcacgccgcgctccacgcccatgtgggactgttcgggaaccagcgctgcatgagcagcccggcggcggtgaactcggatccgagcgccaccgtccatgtgagccagtactggatcgcgatcacgaagccggtgccagggccgatgaacttctcggcatacacatggaaggagccggtcaccggcatggccacggacagttcgccgagcgtgagcatgaccaggtagacgatcagcgcgccgatgccatacgccagaatggtgccgatggggcccgcctgctggatggtgtatccggagctcaggaacaggccggtgccgatcacgccgcccaacgagatcatctgcaggtggcgggattccatgccgcgcttcaggttggtatgcagcgcgtgctcgcctttgccgtcatgtggcgactcggactggctgatttgcgctggttggttcacctgttccggctggttttgacggccatccgtctgaatctgcggttcctgctgcgaggacggcgactgtgccgccgtgtcggtgtcgggctgactcatgtttctctctttgccatgcgtgcgttccataggcgtcgtcgtgacggcccggaatagtatacccgcactgaggatatagctgcgctgcatgatgctgagtcaaaatcagcttcaaggggctgatttggcgtttgccggaggtctacttccgtttcaaggggctggtcaactggcggaacgcagatagaaatggcattgttctatcactattccgccgtttttaaccagtggctactttggcatcagccccttgaaacggaagtagatgttccgcaaagtcaaaatcagccccttgaaacggagataggcactcgcagcggctacttcaccttctggatacgcagcacgaacacggcagcgcacacggccatgacgatggagatggcgaacgccggcgtgtaggtgccggtcgtggtcttgaccacggaggtgatggtgggaccgactgcttggccgagcgtggtggccaagctgaggatgccgaggtccttgtcggcctcttccttgttcggcaacacgtcgacgttgagtgcctggtcgatggccgagtacacgccatagccgaagccggcgatgcccgcgtacaggtacatgcccgtgacactcggcatgatccacggggtgcggcgtcccagcttggaacgcttgtggtcggagaggttgccgaacacgaggttggaaaccaggcccacgatggcggtgaccgagttcaacgtgccgactgccgcatccgggttagcgacgccgatgtccttgaacagctggggagcagcacggtggccaccacgtacaggccgctgctccacagaagaccgaaagccagaaacccgacagtaaatcgaatgttgtttgttttgatgtgtccttggacatgtctgtcagcctcctatggtgattgcgtgccgttgtatggcgattgtagaccggctcggattggcggttttccgggctttttgagcgtgtggtagcggccgtatgcgccgttgcaatattgatcttgtgaacggttaatgtactcggggctcaaaatatattccagcgtgcggcgcgtttcttgtttaaggaaagtaattcgaaaaaagcagccgatgcatggccgtatcaggtgccgtatggcgagcggcgtatggaaaaagtgtctccgtcgggttgtgatgagcatctatgagattgacgtatgtcgtcaggggcagcaattggcatgtgcgggtggatttgcggctcaaagatggggaaacgatatgagactggcgatggcgcagatggcgatgaccgacaatatcgacgaaaacgccgatagggccttggcctactacgatcaggccggcgaggccggtgccgatctgttgttcttccctgagatacagttctccccgttcttcccccagtatgagaaccgcgatgcgtcgcgatatctcatggacctgaccgaccgtcacgtcgccgcattacagaacaaggccctgcaacacggcatgtacgtttcaccgaacctgtacctcaaagcccaggacggccacaactacgacgcttcgctatggatcaacgaacaaggccatatcagcggcatctcgaccatggtgcacatcctgcaagcagaacgcttctatgaatgcgactattatgcgccctcccaagacggattccacgtgttcgagaccccgttcggcaagatcggcatcgtcatctgcttcgaccgtcacatgccggaaagcatccgtacatgcgcattgcgcggtgccgatctggtcatcatcccgactgcgaacatcagcgccgaaccagtggagatgttcctgtgggagattcgcgtccaggtcatgcagaaccaggtggccatcgccatgtgcaaccgggtcggcaaggagggcgatgtggcgttcgccggccaatcagtggtggtggacccgtacggcaacgtcgtcagcgagactgatgaccatgaacagttgattatcaccgacatcgatctcacacaaaccgcagcagcgcgcaaacagcgaccattcctgaaactgcgccggcccgaatggtacgcctgacaagaacgaaccgacgtcagcccggaatcttttcgacgatggtgttcaaggtgtcgaaagtctcatcgatttggtccactacctgcttgccctggttgaccatttcggtgatctgttccgtgcggggttgcggcagcgcataaatcgacgtcttgacgcgcttcaagaccgcaccggcgtcggacaggtcctgcttgatggaagcgattttgggaatggaaagcgtgccgtcggagaagttcatgccgga

SEQ ID NO: 3565 - DNA, 16994 bp, Unknown
  R85_18m  MAG No. k141_22871
agagccatacagatcagtcaacgcaccaacgttgttggcggtggtggaagccgcggcggaaatcttgttcacgtcttcaagcgacttgttgacctgcttgacggtggtcacgccttcgtccagcgcggggatggcgtgttcgccggactcccggaccgtctgcgatatctgatcaaacatcttgcccagcctgatcagcggatagatcatgaaaccggccaatactgcgaacgcgatggccgcgatcaggccagcgatctctccgactcccattgtttcctccttgcggtcacacttactcgtctaagggtagcactccttccctatttcttggcataccattgcacgcgcagggcgaaaaccgtgcgcgtggatgcatgcggctataggcgaaaggtgtcctgctgacgctttcgtttgcggcgtgccgccgtggaccgtacgtgctattcgatatgtattgcttgctatttgctacttgccgtacgaaacgatggtcacggcctcgccgaacggcttgtcggtgtcgaagtcgagcacggttaccgaaccattggccgggcgttcgttcagatcgaggtcagggccgccgaaccggtggccgaggctaagcagtgtgttgccatgcgaaatctgcagcacatcgtcgccatccttgagattcgggttgtcggcgataagacggaacgcgccttcgacgcgcgtccaatattcctcatcggattccgcatcgtggaagggatcggcttccttgagaaaatcacgcgaggcccccaacccgaacttctcgacgatttggttgtaggttttggcgccgtgaggcgctcccgcggcgtaccaggccatggccatgtcaagtccctcgtagtagccgtagaactgctcgcggaagtgcatgtccgtcacgagtgcggggcgcgggttacccgcggcttcgttgatgtcgagaattttctcggccgtctgccgggcacgcgtggtgtccgaacagtaggcggcggtgaacgtcaatcctttcagtcgctcaccggccttgacggcatcagcgacgcccgactcggtcagcggcgaattcgaccatccctgcagacggttgtatcggttgaaataggtctgtccgtgacggaccaaatgcagatgaagaatcatggttccgattatgtcaccattccggcggtttcggtgcgggctgccggaagtcataagtcataacggcataggtcactacctgagatatgcgtaatccgggtagtatacctgacgattcctgagagtacacttagggtactatgagcataacctcgaaacctgcaccatctcaatcgtctgagcctgcccatttcaggggtatcgatggactgcgcgctctggcgattcttggagtcatagcattccacacccgcccgtcgctattgcagggcggattcattggcgtgacgatgtttttcgttatcaccggttttcttgccacacgttcagtactgaacatggtggaccgcaccgggtcctttggatatggccgatatctgatccgccgcattactcgtttatggccggtgatgctggcgaccattgccgtggtgccttggctcacttggatgttcgctcccagcctgttgcagaaagtggtttccgattcgctgccgagcgccttgttcgccagcaattgggtgtacatcttccgcaaggtgccgtatttcgaggcggccggattgccttctcctctgacccatctgtggttcttgggcgtgacgatgcagttctatctgatttggccgttgctgatggtggtgctcggcaaaatcaccaagtccaaatgggtgcgctccatggcgattcttgtcatcatggctgcttccaccgccgccatggtgctgctgtttgacccggccaatacctcccgcgtgtattacggtaccgatactcgtctcgccgagctggccgccggcgcgctgttggctatctggattgcgccttcctcgcgaggtacggaagttgcggaagctggagcggcttcgcaaacagtgcagatcggacgtcaggccggcgacaagacgggcgcccgtctcactatcgtctgcaatgttcttggcaccgcggctttggcggcactgctggccggattctggttcgccaacgggtatctgtcgtacatgtaccaaggcgggtacctgattaccgcgttcatatcgttgtgcgccttggcctgtgccgtgaacaatgactcaatctggtcgcgcgtgctgggttgcgctcccctacgctatatcgggtcgcgatcgttctcgctgtacgtcatgcattatccgctgctgcagttcatgaacccggcgacacgaacgcaggcgttgccgtggtggggttgggttcttgaggccatcgtggtgttggcggcgtcggaagccttctaccagctggtcgaggcggcccgtaaatcggtgcagatgcctcgcagccaacatgccaagccgctaccgaaagccggctgccagctgcgcccgggcgcgtgggtcatgtcggttatcggattggtgaccgttgtggtgctgacgtgggcaccggtggattggaatggcatcgctcaagcgcgagccattcagctgcgccccgaactcgcggcacccgccaagccggtcaagaaaccggcgaagcccgagcccgagtcttctgccacgaatgccgcgaacggcgaaaccaataccgctgacgcgaataagaacggttcggattctcagccgcccaccatcaaaccgattgcggaaaaggtgccaaacaatcttgacatttcgaagtacgcctatgatccggcaacggaaagctgcaacgcggatatgatgatggtcggcgattcagtgacgtcgggtacttcggacgccatccaggccgcattcccgaacgcttttatcgatggcctgccgaaccgtcagatgccgcaggcggtggatgtgtatcagcaggacaccgctgccggccacagtggcagtgtggtggtgtttggcctcggcacgaacggcgtgatttcgaatgagcaggaagtgcaacagctcattgacctgaccggcggcaagccgacatacttcatcaccatccgtatgccatacccgtggcaggagaacaacaacaatacgatgctgcgtgaggccgccaagaagaacaagaacgtgggcatcatcgattggcatgggtatagcgaaggtcatagcgaatacctcaacgatgacggcattcatccgaatatgaccggtgcctatgcgtacgcgacgatgattcgtcaggcggtgtgcggccagtaatcgccctacaacgcaggaaccccgcggcttctcgaaagaagcgcggggttcgagcggtatgtcctggatttgttgaccagagggcccggatcagcgggcgtagaattcgaccacgtactggatgttgacctgcaccgggatctcctcgacctccggcttacgggtcacagtggccttcagggacggcaggttcacgtcgaggtagccggggaccgcaggcagcacgtcacggtgcacgccttcggcggcgatctggaacggaaccatggtctggctcttggccttcacctgaatggtctggccgggcttgacgcggtaggacgggcggtccacgatgttgccgtcaacgaggatgtgacggtgcaccacgaactgacgggcctgggcggtggtgcgggcgaagccggcacgcagcaccaggttgtcgagacgggtctcgaggtcggtcagcatggcgttaccggtctggccggcagtacgggtggccttctcgtaagcggcgcgaagctgcttctcggagatgccgtactgagcgcgcagacgctgcttttcgcgcatacgcaccgcgtaatcggactcggtgcggcggcggtcacggccgtgctcgccaggagcgtacggacgcttttcgaagatgcgctgagccttgggggtcagtgcgatgccgagggcgcgagacagacgcacctgacggcgagaacgctgaacgttcgtcattggattaatccttctgtcgttatctgaacggaacgcttgccttgcatatgcctggcaagcgctgagccgggcctccccagcgcttcgtcgtgaacgaacacgaacgggttggttttcttgcgatcacctaccgccgacccgctgatgggctatgactccagacggtatctacctgttggcagacaccagcagactatattacaccgaggctatggacagcactccggcgtccatgcgatacacccggtctgcgtattcgagtgcatcgggatcatgggtgaccatgagaatcgccgtgccgttgttggcttggtctctgagcagacgcattacgatgtcggtgctctcctggtcgaggtcgccggtcggctcgtcggcgatgagcaggctcggctggttcatcagcgcgcgggcgatggagacgcgccgcatttcaccgccggacagctcgcgcgggtagctgtctgccagatcggcgacaccaagctgggtgagcagcatgcgagctcgggtggcgaacaggtccggacggctcgcagccgtgtttgacggcgtgttttcccggtctgtgattggcgcaatgacatccggcatgaacgggtcggcggctgcttcatcattggtggcagcggcttgtgccacggcatcggtcgacgcaacagcgtccacctgagcaacggcatccgttgcttctgcgttttgggcaaacggcagcggctccggaaacatcgttgcgggcagaatcacgttgtcgagcacggtcaggttgccgagcagggtctggctttgggtcacgaatccgatggtgcgattcctcagcacggacagtgctttatcgcccaagtcggccacattgcgtccagccacgctcacggttcccgaggtcgggcgaatcagcccggcgaccatgttgatcagcgtgcttttgccgttgcccgaccggccgacgatggcgatgaattcgccggcatcgacggtgaggttcacgtggctgacggcgtcgaacggcgtgccgcggcggacgaactggcgggtcaggtccgtcaaggtcagcagatggtccggggagggcgtctcggttacgtgcggcgaatccggcgcagtcggcgcgttcggctgagctggcgtggtcggctggagcttggtcggctcaaccgtggtcagctgagtcggcgtagttgtctcagtcatatcactccccctctcgcagggtcaggtaggcttcgggccggccgagacgccacatggtggccagcgaaccgatgatgccgatgaccgtagagcacacaatggtcacggcaatgaatccgatcaccgcaaccgggctggcttgcagatacggcaattgaagttgtttgccgatcagcgaactgaatgggaaaatcaccaggctggccgcgccgacgccgattacgccaccgatcagaccgatgatggcggattccttcagaatgatggcattcaacatgccgcgcgtggcgcccatgatgcgcagggacgcgaattcgcgtttgcgttcgttcaccgacgaggcgaatacggcgagcagcacaatcacgcccattacccagatcaccgccacgaaaatcttgaggtaggtgacaagcgcggtcagcgaagttctggtgttggcggtgatgccgccggggtatacgtaccccaaatcggcgaaccgggagtcaagacgcttgatgttttcagccacggtctgcgcttcgtaaccccgctgcgtcttgatcatcacggtggagacggcttcgcctgcatattcggcgggcatgacctgcttggagaccttggccgaggcggcgaccatatcaggcacggtgttttggttgatgaacaccgaattgtcgaggctggtgccggtgttggcgagctgggcgacgaccggccacttatggccgtagagttcgatggtgccgtcggtggacacgttgacgtttgcgccggcaatcatctgaccgtcttcaagggggccttcgaactgggatgcgacccatggttcgatgacgaagtcagtgtccgggtcgtaaccgatgatctgcagcttttcggcacagcaggcggcggccagcgatgatatataggtctgttcggtggcctgtgcgatgccgtcggcctgcatgacctcgtcggcgatgtctttggtgaaatagaaagtgctgggattgccgctggtgagcagcgcttcagccttctgcgcggtgttttgcggcacgaccataaggtcggcgcccaggcgcttctccatactggtcatgccggtgttgaggttcatggtcagcatggtgccgccgaagaacgtcagcgcgaggatggtgacgacggcgagcagtgcgccggtgcggaacggcttgcgtttgaggttttcaatcggaaggccgcgcaatgcgatatgggatggcacgatgagtccttatgttgcttatagtgcggttgcaataagcgagaccggagtccagcgttcggaatggctgggctccggccgtctgctcgatcagttgcgcttggcggcgcgagagtcgagccagatggcgatggccgcgaacacgatggtgagcacgccgagcacgatgagcgtgggcagcataaccatgcggcagtgcatcatcgcgcccttgcagatgccgatcaggaaggtgggtacggcgagtagtagcagggcgttggctgcggcggcgatattgaggccgatgcgaatctgcggggcgacgaacaaagccacgacgccaaacacgaggatgacgacgccgatgccggtggccgcctgctgcgagtagtggcaggcacccggcatgtcatggccggtgcaggcgtgcgcaaaggtctggggcgcgatggtgatcagcgcgccgaacagaatattgggcacggatgcaaacagcttgttcttcataactactttttcctctcccctgttcccagggctcgtaggcgcaacctccgcattatgcccagatagtgatgaagaacacaagtcttgttttttgtgaatttatttggtatataactcagcccctcgtcagaggggccaatctatctacaacttctcaataggtgctacgcggagcatgaggcgtttgacgccggcggagccgaagtccacggtgattaccgaattgcggcccttgtcttgcgcgtcggcgaccttgccgagaccgtactggtcgtggctgatcatgtcgcccacggcgaagtcggcgatattcaggccattgtccttggtgagcttcgagctgggcacggcagagccggtcgaaccggatttcggtgtggtgcggcgcgtggtgaccttgccgccacgggtgccgccatatgaaccggatgaagaaccggaacgggaacgcgacccgtaagacgaccccgaacgggagcgagacccgtaggaggacgagccggagcgggaatcatatgatgatgaacgggaaccgtacgaagaacctgaacgggaaccgtacgaagaacctgaacgggaaccgtacgacgaggagccggaacccgagccatacgacgacccataccgcgaccgcgacccataggacgaacccgaaccggacgaaccacgcgagccgaacgtcgacgacccgccaaacgtggcgccgccgaaatcgtcatcatcccaaccgcccaaatcgtcggcgaatccatcggtctcccagttggcgcgcatacgctccacgccggcttcacggcgtttccaatcaatcagcgaatccggaatttcgtcgaggaattggctgggcatcatatcggcggcctggccccactgggagcggacggcggcgcgcgtgacatacagtctctgcttggcacgcgtgatgcccacataggcgagtcggcgttcctcctgcagttcagtggtgtcttccatcgaacgcgaatgcgggaaggtgccctgttccatgccggtcaggaacaccaccgggtattcgaggcccttggcggtgtgcaaggtcatgagcgtcaccttgccggagtcctccgcctcgccgggtagttggtcggagtcggccacgagcgcggtggtctccaggaatgcggacaacgtggcgtcaggcgtgttctgttcgaattcggctgcggtggactgcagctgggagaggttctccagacgggaggcgtcctgcggatccacggatttctcaagttcggcccttaagcccgacttctccaatacttcggccacgatctcgctgggcttggagtcgtgcgcgtgcgtgaactgcgagagcgcgcccatcagatcgcggaatgctcgtagcgaggtggcggtgcgggtcggcacctcgatctcatccaagtgcatgagtgcgtagaagaagctggtgccatgctcgcgcgcgtaggcgagcagcacgccttcggcgcggtcgccaagcccgcgcttgggcacgttgagaatacgacgtagattcacatcgtcgtccggattgacgagcgcctgcaaataggccagcgcatccttgatttcgcgacgttcgtagaacttggtgccgccgacgagctgatacggctgattcgtgttgatcagcgcctcttcgagcgagcgggattgggcgttggcgcggtacatgatcgccatgtcggagtaggagatgccctcttcggcgtgcaggcgcgcgatttcggtggccacccactgggcctcctgctgggcgttgtccgccgcgtagccgacgatcggctcgcccttgccgagcgcggtccacagtttcttgggcttgcggccctcgttgttgctgatcaccgcgttggccgcgtccagaatggtctgcgtcgaacgatagttctgttcgagcatgatggtcttggcgttcgggaagtcctgctcgaagtcctggatgttgcggatgtcggcgccacggaacgcgtagatggactggtcggaatcgcccaccacggtgatccaggcggggccggacttgccggcgttcggcgcgcccgggatggccttctcccccgtgtccacgccggccagctcgcgcacaagcacgtactgggcgtggttggtgtcctgatactcgtcgacgagaatgtaacggaagcggtgatggtagtactcggcgacggccgggtcggtgcgcagcaactcgaccgtgcggccgatcagatcgtcgaagtcgacggcgttggccagggccaagcgatgctcgtattcggcgtagatcaccgcatagatggcttcaaggtcgcccaccgtgccgaactggtagccgcgctggccaggcgtgaagtcgggcgcgtgaacggcgaggttttccttccaaccggtcagattgttcttgaggtcggagatatggccgaggatcgagcgtggagtgtagcgcttgatgtcgaggttgaattcggtggcgatgattttgacgagtcgctcggagtcggcggaatcataaatggagaagccggacttgagcccgatggacttgccgtcgcgcctcagaatgcgcacgcaggcggaatggaaggtggagacccacatgcgctgggccaccgggccgatcagcgagccgagtcgttcgcgcatttcggcggcggccttgttggtgaaggtgatggccagaatctggctcggccatgcgccgaactggctcaagatccaggcgatgcggcgggtcagcacacgggttttgccggagccggcaccggcgccgatcagtagcgcctgaccgcggtattgcacggcttccgcctgctgcgggttcagatcgcctacgagttcctgcgcgctgcgtgcgatgacttccggctcgtcgtacactgttgcctccctttgaatcgcgacattcatgtttaccacatgcacgggtcagcgcaggacaacgtacacttacaagtatccatatcattcactgacatacagcaatgggaggtctaatgcaggaacttgaggagcgaatccagagcgagggaacggtgaaggcgggtgatgtgctcaaggtggacgcgtttctgaaccaccagtgcgacgtgcgtctgttcgaccgcatgggttcggcatgggccgctcatttcgccggcaagcacatcaccaagattctgaccatcgaggcgtccggcatcggcattgcgtgtgtggcggcccagcatttcggcaatgtgccggtggtgttcgccaagaaggcgcagtccatcaaccttgacggcgaccagtacaccaccacggtctattccttcaccaagcagaaggagttcccggtgatcgtggccaagaagtatctgaacgccggcgaccatgtgctgcttattgacgattttctggccaacggcaaggcgttgcgcggtctgattgacctgtgcgaggcggccggtgtcacggtcgagggcattggcatcgccgtggagaagggcttccagggcggcggtgacgcgctgcgtgccgaaggctacgatgtggattcgctggccatcgtcgagtccatgaatcccgagaccggcgaaatcacatttaggcactgagcacattgactgctcccgccagcgggagcaacagagagaagaaaagaatcatgtcagagaagaaaaccaagaattccgtatcctttgaggcgctgtcttcgctgaacgcgccagtatccttctggaagggcattccgttcggcctgcagcatgtgatggccatgttcgtggcgaacctcgccccgatcttcatcgtcgcctcggccgcgaaaatgaccccggcccaatcggccaccatcatccaggccggccttctggtggcgggcctgggcacctgcctgcaactgtacggcgcgtggctcatcggctcgcgtctgccgatggtcaccggcatctccttcacctacgtggcggccgccgtggcgatctgcgcagacaagggctatggcgcagtggccggcgcggtaatggtcggtggcctgctggaactcgtgctgggtttgacggccaagtattggcgtcggttcgtgccgcccatcgtctccgccatcgtggtcacgtcgatcggcttctcgctgctcaacgtgggtgccacgagcttcggcggcggcagcggagccaaggacttcggaagctggcagaacctgacgctcgggcttatatctttggtcgcctgcctggcgttccagctgttgatgaagggcacggccaagcagctgtccgtgctgttcggcctggtggtcggctatgtggcggccatctgcatgggcaaggtcgatttctccggtttccagaacctcgccatcgtgtccgtgccgcagttcatgccgttcaagcctgagttcgactggggttcgatcatctccatcggcctgctctacgtcgtctcctcggtcgaggtgctgggtgacaccgccgcgctgaccaaggtgggcctgaaccgtacgcccaccgaacgcgagaccgcgggcgccatcgccggcgacggcctgatctccaccgtatccggcctgttcggatgcctgccgctgacctcgttcgcacagaacatcggattggtggccatgaccaaggtcgtcaaccgcaaggtgattctctccggcggactgattctggtgctggcgagcttcgtgccggccatcgccgaggtgttcaactcgctgccgcaggcggtgctcggcggctgcacgatcatgatgttcggcaacatcattctttcgggcttccagatgatcgccgaagcgggcttcacgcagcgcaacatcacgattgcggcgctttcgctgaccatcggcatcggcttcacccaggtgagcgacatcttcgcgcagttcccggcactgttccaacaaatcttcgcctcgaactgcatcgccgtgtcgttcgtggtggccgtaatcctgaacgccgtgctgcccagcgaggagcacttcctctccgcgcccaaggaggcaccggccgcggacgccgagtgataacaacgcgacatatcagctgcgcataatcacatgctgatgccctatcgtcttgcaggatgatagggcatcattgattttgagagagactacaagttgaaccatgagttcgagccggtggcgtgtcgatcaatcgacatcttcccattcgaggatgtctccgggttggcagtcgagtgccttgcagatggcgtccaatgtggtgaagcggacggctttggcacgtccgttcttcagaatggacacgttggcgggcgtgatgccaatttgttcggcgagctcgccgacgccaatcttgcgtttggccatcatgacgtcgagattgatgcgaatcgtcatctcaaatcacctgctcaagttcgcgcccgatccggacaaggagaacagtttccatacggccacgaacgccgcttcgatgcagagcaggaacagcacgcccataatgagatatgaccagtgcatcgacgtctgtctcgggcagaggccggccagcgcgccgctcaatcccggtacggcgaatagttggccccataggcaggccagccagaccagaatcacgatggctttcaacgcgagcaacacccatcggttcatgtagtttttcatagcccggtcctttcaggtgccgacgtttttggcgacaccgcgaacatcgatatgactatatcgaaaaacgatataccttgcaaggcgtattgcgtcaaccggcattggtcgctcatatgcatataggcttcggcagactgtcagcagaccgtcagctcaacggaacgaacgccatatgagccacccattcgcgcacgagcgtgatgacggcttcgggttggtcgatgtgcgcgttgtgaccggcattatccagagtcacgaaggtggcgttgggatagtgcggcaacagggcttgctggtcttcgtatccgacgatctggtcttgcttgccggtgacgatgagcaccggaccagcatatgtgccgagcatttcctcgggattatcggccagccaataacgctgatccagtcgttcgcatgccgcacggtcgcacaacgccacgccgggcaggatgaaccgttggtagcgccgccacgcgtcgaatgactggttgacgcccatggtaatgaaatcgaacacctgttcctgtggcaaggagtgcgtcagcttgggattgggctgtgcaaccacatgttcggccacatgccggccggcatgctgcgggtccacgaccggcgcgatcaatgccataccggccactcggcgaggttcgcgcgccaatacttcgcggacaagcgcaccgcccatcgagttgccgaccatggcgaatggagccgttttaccgacaaggccgtcaatggccgtttgcagccaatccgccatttccggcagcccgcaggcatgctcgggcaatgccggcgtacggccgaaaccgggcagatccagatatatacggcgaattgaatcattgccgtcaaacgccttgtcgagcatcatcagcgaacgatggtccacacccatgccatgcacgaacacgacgggcaatccatcatcattgccctcaatcgcgcagtacggctgcaattgtgccatgtgttcctctccttcaacccggtacaaatcgcctttcacacaatagcggcagcagctcccctggtgtcggagcaatcccgaccgccattctcggtttcgaggggctgatttcgtggtttggggacatccacttccgtttcaaggggctggtcattggccaaaacccaagtacgaatggcttcatgccaacgtcatttcgccgttttggagctgtcgctactcggccatcagcccctcgaaacggaagtggatgtctcggaacgagcaaatcagccccttgaaacgcaaatagacgattgcgaatcgacttatcagccgcgtcgaacttgcaatagagatgtcggtgtatcattccccggtctgattgcgcggatgtcaggaagcgtgaagaattgtcacaaagtcgcgtgatggcgcagccgccgttcaggtggatatgccacgctgtcatgatgacggccgagctggaacacggcaaatcccgcatgctgcataggccagccggtcacggtcagccatgacaccgaaatattggaggcgcaatgggacaacaggtgcggtgcggcagacgccgctcccatggcgcgggcgcgctgattgcagccgtcatacttgttgttgcggcgctgatcgcggcatggacgctgctgccacggctattcacgcctcacgagaccgcgcgcacggccgaggaagcatattgcgcggcggtgtcgcccgacggagcccgccgcaccttgacgcctgatcaggcgcagaacgcggcgctgattgcgaacatcgccgtcacgcgcggactgccggatcacgcggcgacggtggccatcgccacggccatgcaggagtcgaggctgacgaatctggactacggcgacttggattcgctcggcctgttccaacagcggcccagccaaggctggggcacggcggagcaggtgtccgacatgacctatgcgacaaacatcttctacgaccatctgctgcaggtgccggattgggagacgattccggtggaggacgccgcgcaggaggtgcagcgctcaggctacccggaactatatgccacatgggatgcgatggcacgcgcttgggcctcggggctgaccggcgaacggtcggcggacgtcacgtgcgcgttggagccagcaacctcctcggacgcggacgggttggttgccgccataggcgctacactgccgaatgtcaaggtctcggttatgcccctaaatggcaaaaccggcacgaacaacggcgctgcgaccaatacggccagcacaacgttgacgatcacgctgccggacggcctgtccgccgacaaccgcactcgactttgctggcagacggcaggctggctggtcacgcatgcacgtcaatacggcattgacgcactgcacgcggacggcatgaattggaaccgcaaagccggtacatggaccggcaccgaaaccgccgagcagaccgtcaccgtcacgcttgcgtgatgtgacctataacgccgtcgcgaccacaaatccgactgactggagcctacgccgtcgatgctgcctgaggcacgacacggatatgttttttactcgttcgaatgagcccaatccacgacggcttcgatgttattgccatccgggtccagcacgaatgcggagtaatagccgggatggtacgggcgcggaccgggagcgccgttgtctcggccgccggcggcgagcgcggctgcatggaacgcctgcacggcttgctgactgtcagccaggaacgcgatgtgtgtgaccggcgtgaccggcgaagcctccgcctccggcccgtcaatcggcgacacgtagaaatcggagtgcagggttccgtcatccacgccgaatccgagcgtgggctcatgatgcgccttgacgatatagccgagcggtgcgagcgcctgtttgtagaatgtgatgctacggtcgatgtctttcacgtgcaacgtcagatggtccagcatggtcttggtcaccctcccctggttcttgtattcgattgctgcttgcagtgtaagcccgaacgtttcccacagggccgcgcatggctatgatgagagcaatcgcacgtcgagttcgagacaatattcaaaacgaatccaaggcaatagggggaatgatgatgaccaaggcactgattgtggtggatatgcagccgacgttctgtgaaggcggcgaactgggagtcgaaggcggcaacgcggtcgccgagcggatcgccgattatgtgaacgcgcatcgcagcgagtacgcgtatatcgcaaccacgcaggactggcatatcgagccgggcgcgcactggtcgacggaaccggatttcgtggacacgtggccgaagcatggtgcggccggcacgccgaacgccgaattgcatccggcgatcaaggcgctgattatccatcatcatttcaagaagggccagtattcggcggcatattccggttttgagggcatcgaggacaataccgaccgtatccagacccgcgaggaggttgcggccgagcaatccgccggcaagacgctggccaatgcgctgaaggccgccggcgtgagtcgcgtggatgtggtgggcatcgccgaatcgcattgcgtcaaggacaccgcgctcgatgccgggaagctcggtttcgaggtcaccgtgttcgaggacctgaccgtaccggtcagcgaggagctcggtgtcgcggcccgcaaacagatgacggcggccggcatcacattggccgagtcccgctgatcaggccggatatacccagagcgaacgcacgaacacttccgtatattcaaggccgacactgccgcatagtcgcctagtcgatatgtgaagaaggcttttatggttacgatgctgctgacttcgatattccgcaacgcctcgtccgccgtgcatgaagtcgaaccgcatccgcaaggcaagcgggtcgcgttcatcccgacggcgagcgccgtggaaccgtgggggccggttcactcggcgttgagcaaacacgcgctgcaacgcctcggtttcgaggtggagcaactggatgtggaagatgtgccgagcgggtccgccgaacgcgtcacgcgtagcatcgccgaggccgactgcatctatgtgggcggcggcaacacgttctttctcctgcaggagttgcgccgcaccggtgccgaccgggccatcatcgagcaggtgcgcgccggcacgccgtacatcggcgagtccgcgggctcggtcatcacggcacctgacatcggctatatcaagctcatggaccgcacggacaaagcccccgatctcaccgattacgcaggattgggcttggctgatttccgcgtggtcccccaccatcatgcaacggccatgggccacgccgcacaacgcattctcgaccggtatggtgccgatctcagtctcaagcccctcaccaaccggcaggccctgctcgtcaaggatggcaaaacccggttgctgcgatgatgcgggtcgtaggtccgtcgcccattcggcaccgccgtggtgtgtccggcctgatatgcctat

SEQ ID NO: 3566 - DNA, 20411 bp, Unknown
  R85_18m  MAG No. k141_23081
cgtgagttacactatgtagtaaagttatttactgaaatactgcgtattgttacgtactgaggcgtggaaggctcaactatggtcacgatgaaggaaatcgcacagaaatcaggcttctcgcaggccacggtatcccggctgctcaatggggacccgacattgtctgtcaaagaggagacgcgacgtcgcatcatcgaggtcagcgagcagcttggctacgctaccggatcacgccgtatcgcattgccacgccgtgtggccgtactcgacaacgccacccgcgaggaagaactggcggacgcctatttcgatgaactacggtccgtgctcggcgacaatgccagagcccagcacatggaactcacgtcgttttcccatatcgacgatctgattgccgacgccggtgatttcgacggcttcatctccatcggaccgtccgtactctcttcggatagactgttgaagctccatctggtattgccctatggcgtattcatcgacaccaatcctgcgcccagcctgttcgattcggtacaaccggatttaagccaaaccattttggacgcattggatatgttggtgtcctcgggcaaacgacgcatcggctatatcggcggtactggcttcacgatgggtttgtacgaatatccggaagacggccgattaaccgcattccgcaattggaccgagcgtttggggctggatgcggaaggcctgatttacgcgcaaggcgcgttcactgtggacaccgggcgcactctaggggaggaagcggttaacgatcatcgagatgacatgccggatgcgttcatcgtggctgcggactcgattgcagtcggcgtactgcaggcgtttaccgctgcgggagtgctggtgcctcgcgataccagtgtgatcagtatcaataaccaggccatcgcccagtacacttcgccgacattgaccagttacgatatcgaccagaatgagctggccgatactgcgattacgatgcttgccgaggccatctccagtcggcgcacgctgcaccaccataccttcatctccaccaccctagtggtgcgtgacagtttcgtaccagcacgataaagaagctccctctgtgcgataaagaagctccctcgtcagagggagcttctttatcgctgttagaacagttccagattcacgtcgagcgtgtaggcgcgatcggcgggcagctggtactgctcatggacgggcgcgccccatgaatcgtctccgcccacgcccatttgcgcggccaacaggcgcaggaacgtgtgacggaccggcggcaactcgttctggtgggtcgcctcttccagcatgagcgagctgtacggcaacaggctcgccgcgaaatgttcgctgccggcctggctgatacgcatgccgtgtccttgggcgtcaagcacttcggcccaacgcaagtcttcatggttgccggtctcctgcggcaccagatacggtgcattgtcttcggccgcggtgcgctcgaaaatgccgagcttgccaccgtgcagacggtcgtgataggtttcctcggggccaaggccgtagaagcgcaggttctcgtactgcttgggaagtgtccattccaatccgaatgccggcagcgtcggcgcatcggtggcaccggcatatcgggcggtcagatgtacacgtccgctggcggcatccacctcatagcgcacggcaacttgggtttcgcccggttcggccaacgtatgacgaatgccgccaacgggcaccaacctcgttgacggcattcgtctttccaggacaccgcaatcgcggatgcatgccgtttacgcgttgaatacgtattggtcaaggcggcgcatggcctccttgacgcggctcaagggcaatgcgagattgacgcggatgctgtagggagcctggaacatgctgccgtcctgccatgcgacgcccacatcccagccgcgtttctccaactcgggcaggctcaggccgtggcgttcgcaccactgctcgcagtcgagcagcagcatgtaggtgccttccggtttggccaaactcactccttggaaatgcttggtgatgtagtcgtaggcgtaatcgacgttgccggtgagcaccgccttcagttcgtcgagccactcatggccttcgggccggtaggcgccgatcagcgcgtgcatggaaagcacgttcatgtcgttgtagtggcatttcgagcttttggccacgatgcggtcccggagtgtgggattgtagatgatgtggtagcttcccaccagtccggcgagattgaaggtcttgctgggcgcgtagaacgccacggtcctgttgcgtgcgtcctcgctgaccgattgggtggggatgtgctggtggttccccagagtcaaatcggaccaaatctcgtcggaaatgaccacgcaatcgttggccttgtacacttccatggccttctcgatttcccaacgttcccacacgcgcccgcaaggattgtgagggctgcagaacacggccacgtggatgtgatgctccttgagcttcctgtccatatcctcgtaatccatgcgccatacgccgcgctcgtccagcgtgagcggactgtggacgatgcggtagccgttgttttcgatgctccgggtgaacccgatgtaggtcgggctgtgcagcagcacgccgtcgccgggggcggcgaacgcggtcagcgcactgatcacaccgcccaggaccccgttctcgtagccgatcgcctcccgggtcaatccggtgaccccgttgcgcgtggactgccagtcgatgatggagctgtaatagtcgtcggtgggggagaagtacccgtaggcgggatgcttcgcccgttcgatgatggcctgcgggatcgtgggcacggtcgggaagttcatgtccgccacccacatggggatgacgtcgaaaccctcgcgtggcgggtccggcgcgaatcccgggtcggtgcccagtccgtcgaccgcgatcgaatccatgccatgcctgttcatgatggacgtgaaatcatacgtcattgtccgacaatcctttctcggtccgtggtggccggtcccaatctaaatcgggctcctgacggtgccgtggccgtgggcggcgatttgaccgcgtggcgtgttaggatatgcaccgttgtgaggcagtgatccgttatcagcggggagtcttcggaagaacggcggcaatcgcccagtagaaccgacgggatcggcccgagacagccgaacacaagcggtcgcgcaggctcgcggctccgagtgcaacagttcggagcggcgcaaccggtgcgataagcgaggtggtaccgcggtgcggagcgcataccagcgctcgtcatcgtcctcgtaggcaggaacggcagacatggctgttccgggcggaacacagtcggttccggctgcgaggcgattgactaatcggcccacggttcggtacgtgacattcgtgaaaccagccggcacacgtcggcgcccggcaatcgccatcaatgacgctcctgtaggaccagtgcacagtactaacaggagatttacggtgagcgaaaacgtatatcccaaggcgagcgagggcggcgagaccgcgcacgtcgcgccgaaccccagcttccccgacatggaggagaccgttctcgactactgggacaaggacgacaccttccagcagtccgttgaacgcaacccttccggcgaccacagccagaacgaattcgtgttcttcgatggcccgccgttcgccaatggcctgccgcactacggccacctgctgaccggctacgccaaggacgtgatcccgcgctaccagaccatgaagggccgcaaggtcaaccgcgtgttcggctgggacacccacggcctgcccgccgagcttgaggcgcagaaggagctcggcatcgactcggtcgaccagatcgagaagatgggcatcgacaagttcaacgacgcctgccgcgcttctgtgctgaagtacaccaacgaatggcagaactacgtgcatcgtcaggcccgttgggtggacttcgagcacggctacaagaccctgaacatcccgtacatggaatccgtgatgtgggccttcaagcagctctacgacaagggcctggcctaccagggctaccgcgtgctgccgtactgcccgaaggaccgcacgccgttgagtgcgcacgagctgcgcatggacgccgacgtgtaccaggaccgccaggacaccaccgtatccgtggccgtcaagatgcgcgatgaggacgacgcctacgccgtcttctggaccaccaccccgtggaccgtgcccaccaacttcgccatcgtggtcggcgccgacatcgactacgtcgaggtccgcccgaccgaaggcaagttcgctggcaagaagttctacctcggcaaggatttgctgccgcactatgagaaggaactcggcgagaattacgaggtcgtgcgcgaactcaagggcaacgagctggcaggccgacgctactacccggtcttcccgtacttcgcgggtgacgaggccgaatccgaaggccacgtgcccggcccgaacggctacacgatcttcaccgccgactacgtcgacaccgtcgaaggtaccggcctggttcatcaggctccctacggtgaggacgatatgaatacgctgaacgcgcacggcatcaagagcaccgacgtgctcgacgatggctgccgcttcaccgcgcagtgccctgactacgagggcgatttcgtgttcgacgccaacctgccgatcctgcgcaacctgcgcgccggcgacggcccgctcgccgagattccggaagagcgccgtgcgatcctcttccaggagaagagctacgtgcactcctacccgcactgctggcgctgcgccaccccgctgatctacaagccggtctcctcctggttcgtgtccgtgaccaagatcaagccgcgtctactggaattgaaccagcagatcaactggatcccgggcaatgtcaaggacggtcagttcggcaagtggctcgccaacgcgcgcgactggtccatctcccgcaaccgcttctggggttccccgatcccggtgtgggtgagcgacgatccgaagtacccgcgtgtggacgtctacggttcgctcgaagagctcaaggccgacttcggcgactatccgcgcgacaaggacggcaacatcaacatgcaccgtccgtggatcgacaacctggtccgcgtcaacccggacgacccgaccggcaagtcgcacatgcaccgtatttccgatgtgctcgactgctggttcgagtccggttccatgtcgttcgcgcagttccactacccgttcgagaacaaggagaagttcgaacagcacttcccggccgactacatcgtggaatacatcggccagacccgcggctggttctacctgctgcacgtgatggcgaccgccctgttcgaccgaccggcattcaagaacgtgatctgccacggcatcgtgctcggctccgacggccagaagatgtccaagcacctgcgcaactacccggacgtgaacggcgtgttcgacaagtacggttccgacgccatgcgctggttcctcatgtcttcgccgatcctgcgtggcggcaacctgatcgtcaccgccgaaggcattcgcgacaccgtgcgccaggtcatgctgccggtgtggagctcctactacttcttcaccctgtacgccaacgcggccaacggtggggctggcttcgacgcccgccagctgcgcgcggacgaggtcgccggtctgccggagatggaccgctacctgctggcccgtacccgtcgtctggtgctggccgccgagaagtcgctgaacgagttcgcaatctccgacgcctgcgatgcggtctccgacttcatcgacgtgctcaccaactggtatatccgcaacacccgtgaccgtttctggaatgaggacgcttccgcgttcaacacgctgtacaccgtgcttgaggcgttcatgcgtgtgcttgcgccgctggccccgatggaagccgagtccgtgtggcgtggtctgaccggtggcgagtccgtgcacctggccgattggccgttcgtggtggacgagaagaccggtgccgataccgagcttggccgcgtgctggtcgacgatccggccttggtggacgcgatggagaaggtgcgcgaagtcgtttccggcacgctgtcgctgcgcaaggccgccaagatccgcgtgcgccagcccctttccaagctcaccgtggtggtcgagaacgtggacgccgtcaaggcgtacgacgatctgctgaagtccgaacttaatatcaagaatattgagttctcgactctggaggacgcctccgcccacggtctgaagattgttcacgagctgcgtgtgaatgcccgtgcggcgggtccgcgcctcggcaagcaggtgcagttcgccatcaaggcctccaagtccggcgactggcatgtcgatgctgcgtccggtgcgccggtggtctccacgccgtccggcgaccttgcgctggtcgaaggcgagtacgagctgatcaaccgcgtggaggaggagaacgccaccgaggccgccgcttcggtctccgccgctctgccgaccggtggcttcgtgatcctcgacaccgcgctggatgccgatttgctggccgaaggctatgcccgcgacgtgattcgttctgtgcaggacgcacgtaaggctgccgatctggacatcgcggaccgtatctcgctggtgctgaccgtgccggctgtcgatgtggccaaggtcgagcagttcaaggatctgatcgcccacgagacgctggctacctccttcgaagtgaaggaaggcgccgagctgggtgtggaggtcgccaaggcgtgatgccgcggcggactgaccgcgcctgatgcgtggtgcacgggcgcgtgaaatgcacgaagtggtcctgccgtttagcggcgggaccacttttttgtttcgtggtatgcttgcgctgcgacgatggcgttgcgatacggagcgattgacgaggtgacgataatgtgtgcgacgtactatgcgagaaccagcgatcacgggtatgagacctgcgcggagcacctggccatggccggttgcctcgccggagggtttgccaagggcttcgggtatcttgacgacggattgctggctggtctggtccacgatctgggcaaatattcggatgctttccagcggagaatccgcaaccccgatcattgcggacccgtcgaccattcgacggccggtgcgttgctgttgatgcggtatgcatgcccgttggcggcgatggcggtggccgggcatcacgcggggctgcctgatttcggcagttacggcgagctggagggtccaacgttcatgagtcgcatgaacagggcgcgcagggcgggggattgcaatccactcgctctggctcaagcgggagaggcgcaactggatattccgcagtcggcgttcctgcatgggactcgatccgcgaagccgatgacctcgggcaagcgttccgagcgatggtcgctgtacaccgacatgatgttgacgcgcatgctgttctccgctttggtggatgcggatcgacttgatgccgaattcttcacttcgaatcgtattgaccgtgcggaacatcacatcctcgaatctttgaagaagcaccttggtccgcagaacctggcgagtggccgggtgcccgcattcgatgccctgcgtgaggcgtcgctgacggtgtccgtcgagcgtgacgccgaagaccggtcccggatcgatcgcctggccgccatcatggagaacacagccgatggatatcttgccgcacccgataagcggccgattgatatcagacgctgtgagttgcttgagcgatgcttggactgcggcaaagatccgtcatacggcaccggcctatatacgctcactgcccccactggcagcggcaaaaccatttcctcgatcgcgttcgctctcgaacatgcgcgcaccaacaatctgcgacgcgtcatttacgtgattccgtatacgtcgattatcgatcagacggtaggccagttcgaggcgatctttggaacggacgccgtgttgccccactactccgaggcgccataccagctcaagaacgagtccgacatggatgaaacggatctcaggcgcgcgcttgccgcggagaactggaacacgccgatcgtgatcaccacggcggtgcagttctttgaaagcctgtactcgaatgcaacctcgcgatgccgtaagctgcacaacatagcggattccgttatcgtcttcgacgaggcgcagacgttgccggtgccgtatctgaggccgtgtgtacgggcgattgccgagcttgtggagcgatacggctccacggcggtgttgtgcaccgccacgcaaccggagctgcagccactgtttgatgaatccttcgatggcgaccatgtgcgtgttcctgagatttcgccgttcactcgtgacgatagggactcgttccgtcgtgtgaccatcaaacgacttggcgatatcgcattggatgcacttgcagagcgactgggaaaccacaagcaggtgctgtgtgtggtgaacacgcgtagcaaagcccagtatctccatgaccggctggcggaagatgacgccgaaggcagtttctgcctgaccacgctgcagtgtgcggcggatcggcagcgactgttcgctgagatccgggatcgactggatgccggagcgtcatgccgcgtggtttccacctccttgatcgaggccggcgtggacgtcgactttcccgtcgcatatcgtgaagaggccggactggattccgtcatccagacggccggacgctgcaatcgcgaaggtcgtcgcctcgcttcggagagtgtggtccatgtgttttccacggaaggtggctgcgccccgttcctccggcagaacatcgcggcgttccgggcggtggccgatcgtcatgctgatttgaacacggatgaggcggttcgcgcgtatttcgcggaggtgctatgtctgagaaatggtggtgtcgcccgcgcgaacgtcggcaatgatgcgcttgatcggaagcgtatcctgccgctgcacgggcgtgatgcgaattggccttttgcggacattgccaaacggttcaggctcatcgatacgccaaccataccggtgtatatcccgctgcccggtgaggggtcgctcctgtgcgaacgattggagcgtggcgatatggatcgcacgctgtttcgcaaactcggcatatacgcggtcaatgtatggccgcggcatctcgaacagttgaagtcggtgggggcggtattggcggtcgggccggggaagagcgacgaagaggattgcttcgtcctgcgtgacatgggcttgtactcgtcgcgtctggggttgaggctggacggtgcgaccgctgatggcattttcgtgtgaggagtccgtgtgtccggccgtagatgcggccggacacacgggcgttccggctccgcgcagatagagaccaataaattacgcgcatcaaaaaaccaattgcacgaattgtttgcgagaggaagcgtatgcatgcacaatcggattatccagaggatgattggctggctctttctggccttcagcattttgcgttttgcaggcggcagtgggctttaattcatatcgagcagcagtgggaggataactatctcacgacggctggttctcttgaacacgatagggcccacgattacagtgaatcggaaacgcgcggcagcttgctgattatgcgtgatctgcgtgtgttttcgcggcggttgggaattaccggtgcgtgtgatgtggtcgagttccggcaatcggaggctggcgtaccgttgcatggacgatccggcacttggcttccttaccccgtggaatacaaacatggtgcgcccaagcagacggatgcggatcgccttcaactttgcgcggaggccatgtgtctggaggagatgctggcctgtgcgattccagaaggcgctttgttctaccaacagaccagacaccgggagcgggtcagttttgacgaatctttgcgcaatcgaatcgtcacgatgacgggggagatgcacgacttattcgctcgaggtcatacgccgaaggtcagaccgtcgaaggcctgtcgggcgtgctccctgcacgatgtctgtctaccgaaactggtcaggacgcgttcggcgagacagttcattgaggaagccgtgcgtggggaagtggaaatcggggagaagtcagaccacatatgaagcagttacttaacacactgtatgtcaccagcgatgacgcttacctatcgttgaagaacgacaatgtcattgtccagcaaggagataccacgctcgggaggattccactgcgctccctagaaggcatcatgagtttttcttataagggctcgtcgccggcgttgatgggcaagtgttcggaatttggcgtcggcctttcgttcttctctccacacggccgttactactgctcgatacttggtgagaagaatcgaaacgtactacttcgtcgcgagcagttccgtttcgcggacgacgaagacgcggccctgccttttgcgcagtcgttcattataggaaagatctacaactgccgttgggttcttgagcggaccaagcgcgaccatgcgctgcgcgtcaacagcgagcgtatcgcggagcaaagcgagaaactgcggcaggctctgctgaacgcgcgcgactgcacgtccatcgatgagctgcgcggcgtggaagggctggcagccaaagactatttcttcgctttcgacgacttgattctgcgcaacaaggacgatttcttcttccagcagcgtagccgcagaccgccattggatcggacgaatgcgttgatgtcattcgtgtactcgattctgaccagcgattgcatcgctgccttgcagggagtcgggctcgatccctatgtgggattcctgcacactgaccgaccgggacgtgcttccctggccttggatctggttgaagaattccgtccggctatcgccgaccgtttcgtgctgacgctcatcaacactggagcggtcaagccttcccagttcgagatccgagagaatggcggcgtgtttctttccgagggcgggcgcaaaaccgtgcttgctgcttggcagaaacgcaagcaggagacaatcacccacccgttcttcaacgagaagataccgtggggattggtgccccatgcacaggcgttgctgctcaaccgtgcgattcgcggcgatttggacgcttacccgccgttcatgtggaagtagttcttcttgggagggtactttggtcttgccgaggggcattggagtttgagccaactagagatggaaaccgggatgaggtgttggaatgatggttgtcgtggcctatgacgtcaatacggagtcgcctgaaggcaaacgcagactacggaacgtggctaaaacctgcatgaaatacggccaacgcgtgcagaatagcgtctttgaatgttcggtgtcaccgtctgactatctgattttgaaacatgatttggcggaaataatggacgaatcgcaagatagcctgcgttactacaatttaggggcgaagtattcttcgaagattgagcatcgcggaagacagcggcacctgccaatcgatgacgtgatgatgctctaatgtcggttcgtgtgacggttttccatgatgactgggcaatgcaaaaccttactgtgatgaagaccaaggtggataaaacgaggtaggacagtataggacgatacgattaaaatcgtggctgagcatcgatgcttgatgctgcagccatgtgaccagcgcgaactctgagttctcatgaaatacttgttctttcgcactgagattaatgaatgcttggagactgattatgttctcctcgtcgtttgataactcaaaagtggatggtctgttgatgtttttggttcgagaatttgtgtattgagcgatgtacatggattttcgcgataaaatcagttttgagaacagacggagcttccatattatggaatgctatgcccattctcgcggtcgcaccccactggggtgcgtggattgaaatcacacggtctggaagaacgacgagatcgcgttccgtcgcaccccactggggtgcgtggattgaaatatccattgaataaacatacgcgttaacgccgtcatgtcgcaccccactggggtgcgtggattgaaattacaaggtgcatcttaacgcggcaccgagcgacgagtcgcaccccactggggtgcgtggattgaaatataaaaaatatggcgcaacatgaatatgcatgtcgtcgcaccccactggggtgcgtggattgaaataacgacgagattcccacggatgctgatttcgagaaggtcgcaccccactggggtgcgtggattgaaataagaacagattcgtaggacactgcgaaaaacaaatagggtgctttccgccatcaacagcggaaagcaccctattcttatggtattcttatgatttctctgtcctaattagagcacctcactccgcagcaatcgcggccttgagctcctcgaccttgtcggtcttctcccacgggaactcaacgtcggtacggccgaagtggccgtaagcggcggtcttcaggtagatcgcgcgcttcaggtcgagcttgtcgatgattgcggcggggcgcaggtcgaagaccttgcgtacggcggcggcgatctggccgcgcgtcacgccttgctcggtgccgaaggtctccacgttgacggacaccgggtcggcaacgccaatagcgtaggcgatctggatctcgactttgtgagccaagccggcagctacgatgttcttcgcaacccaacgggtggcgtacgcggcggaacgatcgaccttggacgggtccttgccggagaacgcgccaccgccgtggtgggcggcgccaccgtaggtgtcgacgatgatcttgcggccggtcagaccggcgtcggccgccgggccgcccaggatgaacgaaccggtcgggttgaccagctggcggtagttgtcatgcggcaccttggaacccagcacctcatcaagcaccgggtcaatcacgtgcttcttcagctcaacagcaagccaatcctgcgtaacctcaggatcatgctgggtggagatcagcacggtgtccagacgaacgggcttatcgttatcgtcatactcaatggttacctgggtcttgccgtccgggcgcaggtgcggcacttcaccggacttgcggacctcggtcagacggaaggcgaggcgatgtgccaaatagatcggaagcggcatcagcgtcggagtctcgtcggtggcgtagccgaacatcacgccctgatcgccggcaccctgtgcttcgtaacgttcttcgcggctggcggcggtctcctgatcgccagtcagacgggcaacgccctggttgatttcggcgctttgctcggtgatggccaccacaacgccgcaggaatcggcgtcaaggccgacttcggaggaggtatagccgatgttgcgcagggtttcgcggaccttggactgcacgtcgcagtaccccttggacgtgacttcgccgaagaccaggaacacgccggtggcggcggaggtctccacggccacatggctggacggatcctgggccagcagatcatcaagaatggcgtcggagatttgatcgcagaccttgtcagggtggccttcggtcacggattcggcggagataagccgatgttcttctgtcatatcatccctttcttcaggacttatcgccccgcggggtgcgaggcacaatgatacggtgtcaatttttacttgtcactgcggaagcgggcataaataaaggcccgtgccaaccagcgcggtggctcgagccttacgtcttgttcgctcctgatgatgagttatagctgattgcgataactcaggcaagcgtgtcgctcaaaatcagttgtgagagaactctcacaccatcattcggcgacgaactgtccaaacaatccaaacgaatcgtctgaatcgatcagttgccctcgttggcgtcgtcctcgcccaaggtctcctcaagcagaccctcgtcgatctcgcggaaggcgatggacagaggcttctcgttgttctggtattcgaccagtgggccgacgttctgcagcaggccctcgttgagctgcgtgaagtaggagttgatctggcgtgcgcgcttagcggcgaaaatggccagcgcgtacttggaatcggcgtgcttcatcagatcgtcgatcggcgggttcgcaagaccgtcgggtgtcgggtcagtaccaaaagccattgttcttatctccaaacattggaaaatctatctcaaccgaagcaagtgtagccgtttggggggacttctgtcagccctataccggactctcgccagaagaatgtattccaaaaaaatgtgtgagaaacgttacgtttttgaaaattccattattcgactcttgacaagtggcgtgtccctcgcaaaggcttgaatagaaccatgactgaaatgcgatctgcaaaaattatgtcagggcgcgtctttgcaggcgcccgagccctctaccgtgctgcgggcgtcagcggagacgacatgggcaagaagcccatcatcgccatcgccaactcgttcgatgagttcctgcccggccatgtccacctcaacaaggtcggccgcatcgtttccgaggctatcaaggaagccggcggcattccgcgcgagttcaacacgatggccgtggatgacggcatcgccatgggccacactggcatgctctactccctgccttcccgcgacatcatcgccgacaccgtcgaatatcagtgcaacgcgcactgcgccgacgccttgatctgcattccgaactgcgacaaggtcgtgccgggcatgctgatggcagcccggcgcctcaacattccgaccgtgttcgtctccgggggcccgatggaggccggcaccacggtgctcgccgtcggcacagtcaagagcaccgaccttatcgacgtgatgtacgccaccgctgacgacagcgtctccgatgaggaactgctcaactatgagaagaccgtctgcccgacctgcggctcctgcgccggcatgttcaccgccaactcgatgaactgcctgaccgaggccatcggcctggctctgcccggcaacggcaccatcctcgcctcccactcctaccgcaaggacctgttcaagcgtgccgccaagcaagtcgtcaagatcgctcaccagtactacgacgattccgacgattccgtgctgccgcgctccatcgccaccaaggaagccttcgagaacgccatgaccatggatgtggccatgggcggttccaccaacaccgtgctgcacatcctcgccatggcccagtccgccgacgtggacttcaccctggacgacatcgagcgtatttcccacaccgtgccgtgcatctgcaaggcctcgccgtccggcaagtgggagatttccgacgtgcatcgcgccggcggcatcaccggcatcctcggcgagctcgaccgcgccggcaagctgcacaccaacgtgcattccatcgactacccgacgctggaagccaagctggccgattgggacatcatgcgcccgacctgcaccgaggaagcccagcagatgtacaaggccgctcctggccacatcatctccccggagccgtggacgcacaccaccctgttcgactcgctcgaccgcgaccgcaccaacggcgccatccacgacatcaaccacccggagattcacgaaggcggcctcgccgtgctgcgcggcaacctggcccccgacggctgcgtggtcaagaccgccggtgttccgccggagatctggaagttccgtggaccggctctggtggtcgactcccaggagcaggccatcgaggtcattctgaacgacaccctgaagcctggcatggcgcttgtgattcgttacgagggtccgaagggcggcccgggtatgcaggaaatgctgtacccgacctccttcgtcaagggcaagggcatcggcaaacaggtcgccatgctcaccgacggtcgctactccggcggttcctccggtctggccatcggccacatggcgcctgaggctgccaacaagggcccggtggcgctcatcaagaacggcgacatcatcgatatcgatatcgaagcccgttccgtgaacgtcgaactgactgacgagcagctggacgagcgtcgtcgcgagcttgaggctggcgacggctacgtggctcaccgcaaccgccacgtctcccaggcgctgaaggcgtacgccgccttcgcccgctcggccgacaagggtgcgacgcgtgacccggagctgatcaacaagctctccggtctcaactgatcgccgattgcatagctgaaaggcccggcatcttctttatgaagatgccgggcctttactgtgcttccgaaggcgggagcgatattgcttgttatcgcacgcaggcggcgggggagaggcgtgcgcctcgggcccagtcggcggcgcgcatggccttcttgccttgcgccttgacttgggtgagttccagcggcgtgctgccggtaccaacccacacgttcttcttgcccaccttcagctcgccgggctgaagctcggccggagtgttgggattggactggtcggccggttgtgcggcgagaatatgcagggcgagggatttagcggttgactcgtcattatcggcgattggcccttccgcaaacagttcggtccatgccccgggatgtggcgtgcaggcgcgaatctgacggtcgatggcctcggcctcgtccgtccaactgatgcgggcgtccttcaccgtgatcttgtgcgcgtattccaggctctcggccggctgcgcggtgaatgtggcggtgccttcacctacggcggccagcgcatccacatacatgggcgcgccttcctcggccagacggtcaagcagttcgccggaagtctcacggccggtcagttcgatggtcagggaagcgacgatcgggccatcatccaaaccctcgcccaccttgaacacgtcggcgccggtggtcgggtcgcccgcccaaatcgcacgctgggcgggagcggcgccacgccacttcggcaggttggagaaatgcaggttgtaccagcccatgggcaccgcatcaagcacgttcttgggcaggatattgccataggcgatgacagcggcgatatccgcatgcaggtcgttcaacgcctccatgaattcgggggagcggggtttgagatcgatgacgggcaacccgagctccagagccgtcgccttgaccgggctgggcgtgagcttgcggccgcgaccggtaggcgcatcggggcgggtaatgacgccgaccacatcaaaacgtggatcggtggcaaaggccttgagcgagggcaccgccacgtcgggggtgccggcgaacacgagtttgagcatggtcctccttgaaatgtcgatgctcactgcacggccggaatgttcacgccattggcgatgagcagttcacgcagcttgaccggatcctggaaacgtacgccacggatgccggccgcattcgagccgacgatgttcatggccttgtcgtcgatgaacaacgcgccatcggccttgatgccgaactggttcaacgcggcctcgtagatttccttgtgtggcttgcgcagcttgacaaaaccggagacgagcttgccatcaagctgctgcaaaatatcgcactgttcctcggccacgtggaacagactggattcccagttgctcaggccccacacgccgatgccggcagccttcaggtcattgaccagcacgcgcgcgcccggcacgatgccggtcagggagtcgcggaagttcttgatgtagtagtcgaggatgtccgcccacttatcgcccttgtcacggcgcatgatggcgatggcctcgtcggtgctggtgccgccgtccatcaggtcgttgacatcgtagaagccggagatgtcgttgtcgaggaattcgtcgatggtcttctggctgtagcgggggatgagtacggcgaccggatcccagtaaatcagcacgttgccgaaatcgaagatcacgtcggtgatcggcttgccggcgttcgcagcggcctcgccatccgcgaccagcacgtcgtaatccatatccggctctccaggccagcccttcatggtgtcctccttatagcgatgttcgttctgtaattatcgtttcacgtgttgaagacgattagatcaggtccttgggatctactcggaagcgaagctcgccgggttcgcgggacgccacatgacgagcggtttcccggtgcagtcgggccgccagctcggctcgccgactctgcggcacacggattactgccttcacccggtcggccgtggcttcgagctcccgggcgtcgaccgtgtccggttgcgcgatcggcaccgggcccaacatgccgggcagctcgccgcaggccgtccaatcgccgcccagcgcgccgatacgctgcatcagcgtcatcaccgcatcacggcgtccccatacgcaggcggcggccacggccggcggcataccggtctccacacgctcctcaagatccttggctgcaagaatcctcgaatcccagagcatcagcgattgggcgatggccgggtcggtttcgccgagaatcaacgcctggccgccacgggaacgcggcgcgcacaacgacaccgcacgcatccacgcggtcaacgtatccaaccgagcatccacgcccaacgcatacaggctggtccaagcgtcgagcacggccactgcgcgatactcatgaccggatgttccctgctcggcactgatcggacgcacgcgcggttcgaaaccgggagtggcgatgacaatcatcggctggcaagccacatcgcgcaccagaccctgcgtcttgctggacaaaactactggcacgccacggaacaatccggccagctccgccgcagtgcctgcagcacccacgcgcaccacgcgcatacgttcatgcccacagcccgggcacttccaattgatggcggcagccccacaccagcggcatcgcggtgtggaatcccggcggtcggccggtagttgcaatggtccggaacacttggcacaacgcgcctgacgatggcatttcgcacaactcagagtctcactgacgctgtcttgcggaatggacagcagcacggggccgctctccaaagccttagatagcacgcggacggccgtatgcggcacgcgcgccccgatggacgggtcggcaagacgcgcaagttcatcgcgattgagccaacgcacccaaggagtggcgtccttcagcggcgaggcgagcgggtgaatcgcggtggaatagccgctcaccggggtctccaccgtatccgggccggtgttttcccactggctttgcggggtgcgcgcattggccatggccacgaacacgccgccatgggacttggagcgcagccgcatcacgccacgggcctgtggatatggcatcataccgtccatgttctgataggcggcatcctccagaatggcgaacagtgccgggcctgcaaccggcgcatacatcaccgcgcgggtgccgatcaccaccttcacctggcccaacgccacggccagatacgtgcgataccggtcggccgcgggcatggtctccgcattgagcacggcgacgtcgcccacccagccgccggcgggtgccggggcgaacggtttgagtccataattgcgtagcataggcatcaggtcttcgacctcgcgcatggtgggcaattcaaccacggcagccttaccggcactcaacgcagtggccaccatccatgccatgtttcgttgccactcctgtgcaccgggcagcgaatcaaacacaaaagattggaaacgctgaccggtaagcgcgtcatgaagcacattgacgtcggcgtaattggcggtcagacgacgatacccctgcgcagctccctccgaaacggtactggcaacggcaaaggtagagccagcaggtttggtcccatcgggattggtgccacgcccggcaaaaccaccctgcgtattatccggcaatgagccgccgaccggccgacggaacgacgcggccaaccgctgttcggcctccaccttggccacgcgcggtggcacagcgaaacgcagaatattggcccgtgtgccgccataggctttggcaatcagaccgatatcctcacgcatcgatgcgggaaccagcacatcggggctcaacacccgttcgatatagcgaatcgaagagcgcggggtatcgctggtatcggtgcgtgcccagatcacgccgctgaccctttgaccgccaaaccgcacgcgcaccagcacacccggttgtgcggcctcgctgtctttttcatcaatgaagtaatcgaatgtctggccgaggtggagtgcctgcac

SEQ ID NO: 3567 - DNA, 8329 bp, Unknown
  R85_18m  MAG No. k141_23488
ctggatccgccgctttccactgtggaactgccgcattacgagatgggctactgggcagtaggtaagctggcctcgctcatcgaaggcgaggcacccgatccctttcctcgtgccggatacccggtcgagaaggttcagccgccgccactgagcgagcagtcaccccagattgaatgccagctgcgcatcaagcaatcctgggtccggccccacccccagcgatagcctgcccaaaaatcacgcatctatcctacttgatccggtttcgactgtatgtcgaaccggttcgaccccattattcaaggaagaaagaaacaagagataaggaggagcatcatgccccataccatccgacgctcagccgtcaaagctctggccgcaacgcttgccatcgcaagccttgtgaccgtgggcggctgcggtgaggcggaacgcgcggcggcgaaagccaacgccaatgaaatcaccatctggacgcacacggcaggcagcgaagccgagcttgccggcgtgcagcagatcatcgatgactacaacgccagcccagacaagaaggccaccgtcaaactacagtccttcccgcaaagctcgtacaacgactcgatcatctccgcctcatccgccaacaacctgccctgtctgatcgacgtggaccagccgaacaccccgtactgggcgtgggccggcatcctcgccccgctcaccgacaaggacctgttgtcccgcgccgacgacctgatggaatcggccaagggcacgtggaacgacgacctgtacaccgtcggctatttcgatgccaccatcgccctgttcgcccgcaagtcggtgctggacaagctcggcgtccgcgtggctacggtcgacgagccgtggaccaaggccgaaatggatgacgcattggccaagctcaaggcaagcggcgaatggacctacccgtttgaaatcggcacggccgataacaaaagcgaatggtatgcctacgcttacgcaccgattttgcagtccttcggcggcgacctggtgaaccgcacggactaccagtcgtcggacggcgtgctcaacggcaaggaaggcaaggaattcgcccactggatgcgcgacctcgtggccaagggctacatctcgtccaagggcggctccgacaccgcgctcgacttcgtgaacaataagtccggactgctgtacggcggcatttggtcgatgagcactttccagaagtacgccaaggattacgacgacatcgtggttatgccgatgaccgacttcggccacggctcggtgaccggcggcggctcgtggacggtcggcatgacccaatcctgccccgcacctgaagccgcgcaggactacatccgattctccctgcaagacaagtacatcgccaacatagccaaggccggtatgaacatcccgaccaccgaaggcgcacagaagctcgtgcccgagttctccgacggcggcgacatgcagatcttcaccgagatttcgaagaagtacgtcaaaatgcgccccgaaaccccggcatacaatttcatctccaccgagttccgcaagaccatcggcgacatcatgaacggtgccgacgtggacacctggctcgacaaagcagtcaaccatatcgacggcaacatccaaggcgccgacggctaccggaagaactgagagggaccaaccatgaccactgcaacatcaaccgcaaccactcgcggtacgtccggtaccggagtcggtgccgacaaaaccggcacccccggaaccagcgccggcaaaaccggcaccgtcgccacgcgccggaagtccaccgccgaacagcgccacgagaacgccgtcggctgggcgatgcttctgcccgcatccatcctactgctgctgttcatcggcattccggtgattctggccttcggactggcattcaccaacgcgcgcacaatcagcccgaaccctacccggttcatcggcatcgacaatttcacccgactgttctccgacccgacgttctggtacgcgctgcgtaacgtggccgtgttcgcggtcgtcgtggtgcccgtccaagccgggctcggcctgctgctcgccgtgctgatcaacaagcaggtgcgctcctccgtgttcttccgcacggtctacttcctgcccgtcgtcacctcgatggtggtcgtctccctgctgtggatgttcatctaccagaacgacggcatgctcaaccaggtcatggccaaactcaccttcgggcactggcaggcagtcgactggctgaacgacccgcgcaccgcaatgggcgcgatcatcgtcatgtccatctggcaagcggtgggccagcacatgctgatctggctgtccggcctgcagaccatccccggcgaactgtacgaggccgccgaactggacggctgcaacgcctgggagcagttcaagaacgtgacctggccgtgcctgcgctccacgcgcaacatgatcctcatcaccatcaccatcgccgcgatgagcctgttcactcagatcaacgtgatgacgcaaggcggcccgcgcgacgccaccaccaccgtggtgttcgaggctgtgcgctccggcttccagcagcaggagatgggctacgcctccgcgatcacactcgtgttcttctgcatcatcatggtgatcaccggcatccagcgttatctgactcgagagaagtaaggaaagggactgacgatgagcaacgcaacaactatggccgcatccccgcaggccgaccaaaccgcgcacgacaagcgcacgtcgaaagaagccaagaaagtcgcctacaagcacaaccggctgtccgtgggcgggtggatcgtacgcatcctgttcgcctgcctgttcgctttcccactgatcttcatggttgtcagctcgttcaaaccggacgatgagattatggcggacctcggctcgttcaaggcgttcctgccggtggggcacatttcgctcgacaactacgcgcaggtattcacccgcgtgccggcctccaccttcctcatgaactcggtgatcatcacgctggtgaccgtggtgcttggcgtaatcgtcaactcgatggccgccttcgccatccaacgtctgcaggtgcgcggcaagaagatcatcttcacgttcattctggccacattgatggtgccgttcgagacctacgcgattccgctgctgtggtgggtcaaccagctgccgcgcccggtggtggaccagttcggcctgtacttcacgcgcggatggatcgacacgctgcccgtgcagatcgtgccgttcatcgccaacgccttctccgtgtacctgtacatgcagtatttcgagacgattcctaaggatctcgacgaggccgcccgcgtggacggtgccggctggttccgcatctactcgcgtatcgtgatgccgctgtcgggcccggccaccgccaccgtggtgattttgagcttcctgcccatgtggaaccagtacgtctggccgctgatggtagtgcagtccgagagcctgaggcccgtgatgatcggcgtgcagtacttccagcagatgaccacgtcgtggggtcagatcatggcatacagttcactgatcaccgtgccgatcatcatcgtgtttgtgatctttcaaaagcaattcatcagctcaatcgcctcttcgggagtaaagggctgacgcgttaagcaaacagtcctgtggactgtttgtagcgtcagcctgagcgaggcgaaagccaagcgaaggcaacactgagcctcgctgaaagcgaacccacaattgcagggccgaaggcgaatcaatacgtgctgggtgggatttccctttttgcccatccggcgcctttatatccagcaattcccggtatcgaaaactcaaggagtcctcttatgaccatcatcaatgccgatggctacaccgcgttcgaggcgtttgccgaatattccggaggtgccaatgctgccccggcaaccctgcgcttgaccccggcaaatccgaacacaccaccgatcgaagcccacctgactgccgccgaccgtcgcatgcgactcaccctgccaatcaagcccggcgagcaatacgcactacgttgcgaaggcctgacgctgggctttgcgtacctgactggaggcgcgaatctgctggatcgaggcatccgcatcatcaccccggatacgcgcgccaccgcgcaccggccgagcgcacatttcgaaccggcccagcactggatgaacgacccgaatggactgtgccgtttccaagggcgctaccacatgttctatcagttcaacccgtacggctggcagtgggacagtatgcattggggccacgcggtcagccgcgatttggtgcactggacagatctgccgatcacgctgctcccgcaagaagatctgagccgtgacggctcgctgagcggcggggcattctccggttcggccgtaaccgtggacgagaccgggcatatcgtgcccggcgatgaggcgagcgccattcgcatcttcctgacccgtcactgggagtgccgcggcgaccccggctctgtggtggaaacgcagaccacagccatcagcaccgacggcctgtccttcagcccggagaccacggtgattcgccgcccgaacgaagatttcggccttgatttccgcgacccgaaagctgataacacgttgttcgatggtaccgcgcttgcgggcactcccactattgtggtggccacaaatctaccatccggcgaggcaccagccgcaggagactccggctccacgccgcggccggaaggcgaatactggtacggcgatggtgcgttcgccgccgccggggagcaagagcctgacccaacccgcacgcctgcattggcattgttccgtgccaccgacaccaatttaggcaaggccgcatgggagtatgccggtccactgctgttcgagacgggactcgccgaaacctatacctacgagtgcccggatgccttctcgctggacggctcggcggtggcggtcggatcgatgatgaaactgcatgattcgaccggtcgtttccagccaattcgctggtacacaggcgttatcgcggattcgctcgacgctccgcgtctggacgtgcagcacaccggttggtgcgatttcggctcatgctattacgcggtgcaatccttcctcgatcgtcatacgtcggtgaacggcaccgacgtggaccgtcgtattgccatcggctggttgtgcgactggttcggcgtacgcatcgaacggcctgactatgccaatggcgtgatgagcctgccacgcgaactgcacgtggtcgatggtcggcttatctctcgcccgatccaagaggtctacgacctgttggtgggcgatgttcttactgcaacgccagcaggcaatagcaatacgttccaagtgcccaatcacgcttattacgcggatatccgccccgaactcggctccgcgttctctgcgacactggtttcgggcacacgcactcagccggatggagccacggccgaggtctcgctgcgattggtcagcgacggcgctgccgtgcacctgacctccaccggcctaccgactgacagattcgactatgtgtccgccaccaagcagatcgaacgggtcgaggtcttctacgatcacggtgtggccgaagtgttcgtcaacaacggcgaagacgcaggcgcgattctcttcgattgcgacactgtcaacgccccggatttcaccaccgagctgaccgtcacggagctcagcgggactatcaccgtccacgagctgcgcagcacccgctaaaacataacccatatctcagtcgaggggcgtgatcagcgccccagacatctatctgcgttcaaagaggtacattcggggtcttgcggaatgctatctgctttcaaaggagtacctagactgcaaaactgcgagtatggtcgttggaatatcaacgctcatactcgcgatgtcagagtttcgatacccctttgaaagcagatagtattccgcaatcaggcaaatgtacctctttgaacgcagaaagcccctcctttgaaggaggggctttcgtatgttctgcatatttctctcactgagtttgtgccagcgagaaagctccaggggaaactcccctcacccgcttcgcgggagctcccctcaaagaggggagccgagatccggtgcgctactggctcccatcaaccgaggggagccagaggaatcaggcctcgtagtagccgtcggcaccgaggcggacgtccgggttgaggagcatcgccttttcgacctcgtggtggtcgtagccacggtgatcctcgcggaagcgacggttgtcgatcggttcgtagagcgcggcgcgacccatcatgccttcctcgaggtgacgctggccggcggccaggcgggcgttggcacgctcacgccaggcttccagcgcggcctcgccatcggccttggccacggccgcttcgaaggcacccggatgaaccagggccacgaagccggaaacatgtccgaagccgagcgaggtggccagaccggccttgaccgggcgaccagcggtctcgcgaccgaactcgtcctcgccaccgccgatgcgcaggggcttcctaacccagaccatgtggtcgtcgcgctggagcttcggatccacgcaatcgagcgctgcgttcgccggaatcacgccggacttgaacagctgcgtcagaccgttgacctggaagatgcaggcaccacccttggcgtgaccggtaagcgtcttctgcgagatcacgaacagcgggttgccgtcggtgcggccgatggcgtgggccagcgtgttgtgcagctcggattcgttcgggtcgttggcgttggtggacgtgtcgtgcttggagaccacggcgatgtcgtcagccgtgacgccaagacgcgctagatcgtgcacgagcttggagtccttgccaccgaggccggcagccagggcaccgaggcccggagccgggatcgaggtgtgggcaccatccgcgtaggagtggatgaagccgaccacggccgcaaccggcaggccgagcttttcggcgatgtcaccgcgggtcacgaggatcgtgccgccgccctgggattccaggaagccgccacggcgacgatcgttcgcgcggctgaagaagcgcgcgtcgatgcccttgccgtacatttcctccgagttggcggtggcgttcatgttgccgaagccgatcacggattccacgccgatgtcgtcgatcgcaccggtgaccacgaagtcggccttgccgagggcgatcttgtcgacgccctcttcaagggagacggccgcggtggcgcaggcggagacgggctggatcatgttgccgtaaccgccgatgtaggactgcatcacgtgagccgcgaccacgttcggcagggcttcctgcaggatgtcggtcgggatctcgtggttgaggaagcggtcgaggtacagcttgcgcatcgacatcatgccgccgaagccggtgccctgggtcgaagccaccagcgaggggtggatggactcgaggatttcggccggggtgaagccggcgcccagataggcgtccacagtggtgacgatgttccacagggcgatcttgtcgacgtcgccgaccatcgaagcgggaatgccccaacgggtcgggtcgaagcccttcgggaactggccgccgaccgtgcgggtcatggtggcgcggcgcggcacgcggatcatcgagccggcgtggcgggtcacgttccattcgccggattcctcatccggggcgatggtggtgtgagcctcgtccaacttgacgtattcggcggcgacttcgcgggtgggcacagagaaggtgacgtcgtggtcgaggaagacctcggcttcttcttcgtcagcaccgtccttgtagtcgttgcccatgccttcctcgaacgggcggatgccggagcgggccacgacctcgtcgtggtagcgctcggcgatgtcctcttcgggcacgaggttgccgtcggtgtcgtaccagccgggcttcgggctgtcggcccaagtcagcagacccatgttccacgcaagttcgagcactgcgccggcgctcaggtcgacagtgccgtccgagtggatgccgagctcggcctgggtgcgcgtacgaccggagccccacgggcccagctcaccgacggaaacgatgacgatttcgtcttccggcttggcggtgacgttggtccagtcgttgaggtcgaccgaagcctgcttggtgatgatcggggtgggcagcgccttgatttgctgcccacgcgaggagtcggacagtccagtggactgtccggcgacggagccatccgtttcctgagacgaggccgcagcagcttccttctcc

SEQ ID NO: 3568 - DNA, 2668 bp, Unknown
  R85_18m  MAG No. k141_23821
atcgccgactgatagaaagaaaaacaccaatgtctgctgttgaattcattgagccgctgacccatgaagagggcgtctcgcaagccaccaagctgtttgtggacacctacggcgctgcgcccgagggcgtgtgggctgctccgggccgtgtgaacctgatcggtgagcacaccgattacaacgccggcctgtgcctgccgatcgctctgccgcaccgcactttcatcgccctgaagccgcgcgaagacaccaaggttcgcgtcgtctccggcgtggctcccgacaaggtcgctgaagctgatctcgatggcctcaaggcccgtggcgtggacggctggtccgcctacccgaccggtgtggcttgggcgctgcgtcaggctggtttcgacaaggtcaagggctttgacgccgccttcgtctcctgcgtgccgctgggctccggcctgagctcctccgccgccatgacctgctccaccgctctggctctggacgacgtgtacggccttggctacggcgattccgacgccggccgtgtgaccctcatcaacgccgccatcaagtccgagaacgagatggccggcgcctccaccggcggtcttgaccagaacgcttccatgcgttgcaccgaaggccacgcgctgctgcttgactgccgtccggagctgaccccgctggagaacgtctcccagcaggagttcgacctcgacaagtacaacctcgagctgcttgtggtcgatacccaggctccgcaccagctcaacgatggccagtacgctcagcgtcgcgccacctgcgaggaagccgccaagattctcggtgtggccaacctgcgcgttaccgccgacggcatctccaaggccgatgaccagttccaggccctcaaggaaacgcttgacgccctgcctgacgagaccatgaagaagcgcgtgcgccacgtcgtcaccgaaatcgagcgcgtgcgttccttcgtgcgtgccttcgctcagggcgacatcaaggctgcgggccgtctgttcaacgcttcccacgattcgctggccgccgactacgaggtcaccgtccccgagctggacatcgccgtggacgtggcccgcaagaacggcgcctacggtgcgcgtatgaccggcggcggcttcggcggctccatcatcgctctggttgataagggccgttctcaggaagtcgctcagaagatcgccgacgaattcgaaaatcaaggcttccacgcaccgcgcgccctggccgcgtacgcagcgccgagcgcttcgcgcgaggcctaggacaacccggtgggttgtccggcggatgcggtcgaggtcgagccaataggcgaggccgaggtaatgctgggtcggccgtaggtcgtccgtaattgcaggaccgcgtgcgcagcgccgagcgctttgcgcgaggcctgagccattgcaagctccctctgacgagggagcttcgttttatcccgcaccaccaccatgcccgccggcgaatccggcaccacttattcccataacccccataacgctcctgaaaccaggcatttcgaccatccgcataaggtgatgctcggcctgtacatcggcgcattcctcggcatgctgtccgagacatccatgaacatcgccctgcccgatttgatggacgagttctccgtatcctccggtaccgcccagtggatggtcgtcggctgcatactggccattggcgtggtgatgaccgcgatcggcggcgcactgttctttaccatcggcgtcaactcgggcgttgtgctggtgttctccttcatgttcaagggcggcaaacgatacatgaatcggtaatgaacataatggcgggtgtcttccctataattgggtagtcacccgctttttgtatacgaccagggagagccatgaacaaggcaatcatcaccgtcgtcggtcaggacaccgtcggcatcatcgcacgcgtctgcacctacctgtcccagcacaacgtcaacgtgctcgacatctcgcagaccatcatcgacggttacttcaacatgatgatgattgtcgactacgccaacgcggacaaggacttcggcgcgatggtcggcaaccttgaggacctcggcgacgacatcggcgtgcgcatccgctgccagcgtgaggaaatcttcaccaagatgcaccgtatttgaggcggcccgctcagcaggccgccgcacgcgaggaggcggaaagcccggtgggctttctgctgacggagccatccttatccctctgatgagggtgaccgccaaactagtctttaaatatcctgtaaggaacaaaccatgctgaacatcatggaggtccacgagaccaatcagatgatcgagcaggagaagctcgacgtccgcaccatcaccatgggcatctcgttgctcgactgcgcctcggacgatgtcgacaagacctgcgacaacatctaccgcaagatcactacctatgccaaggacctcgtttccaccggcaaggccatcgaacgcgactacggcatcccgatcgtcaacaagcgcatcaccgtcaccccgatctcgctggtcggcgccagctcctgcaagacgagcgaggacttcgtcaagatcgcccacgcgcttgacaaggcggccaaggaggtcggcgtcgacctgatcggcggctactccgcactcgtctccaagtcc

SEQ ID NO: 3569 - DNA, 11996 bp, Unknown
  R85_18m  MAG No. k141_23821
catgtggagaaggcgtaaatggcaaagcacagcaggaagctgccggccaattcggcgcacacgcgcagggccagcggctgttgcttggtttcttccatgattgttcattccttttcatctgttggaagacgggcgaacccgtacaaacggttgccagtctagcagcagtcctacgttgcggtatgatatataggttggaattggctgggattccagtccgccaactctgaagtatgtatacaaatcgacagtctctgcgatgacagagtctgtccggccacgttgggagaacgatgccaaacgcatattcccgcgctgcgaaagcgcaagacgattccaattccattcgactccagaagctgcttgcccaagcgggattcggttcccgccgcaagtgcgaggacatgattaccgaaggccgtgtcgaggtcgacggtgaactggtcaccgagctcggaactcgcgtcgacccccataagcagcaggtgcgcgtagacggttcgcgcgtacgcgtcaatccgaaccacgtcactctggcactgaacaagccccgcaaggtgctctccgccatggacgacccgaagggccgctacacgttgcgcgacatcgtgggcgacaagtacgagcgcatcttccacatgggccgtctcgactacgattccgagggtcttatcctcatgacgaacgacggcgaactctcgcagcacgtcatgcaccccaagtacgaggtcgaaaagacctacgtcgccacactggaaggcaagatctccggcaccgtatgccgtcgactcgtgaccaccggcgtacagctcgacgacggctggatcaagctcgaccactgcgcgatcatcgactcctcacgcgaccacacgatggtcaaggtcgtgctgcactccggcaagaaccgcatcgtgcgccgtatcttcggctcaatcggcttcccggtcaagcgcttggtgcgcacccagatcggcccgatcaaactcggtgatctgaagcccggttcctaccgcgtgctgtcccagacggaagtccgttcgctgtccaaggaggttggcctgtgattcgcgttgccatcgacggccccgccggcgtgggcaagtcgtccacgtccaaggcgctggccaagtatttcggatacgcctaccttgacacgggcgcgatgtatcgtgcctgcgcttggtggtgcctgaagcagggcatcgatctggacgccgaaaccgtggatgagcgtgtcatcaccgaagcggtgggcgagttcttcaccggcgaccatttcgatatctccgtggacccggacaacccctgcgtattcgccgacgacgaggacatctccgaggccattcgttcctccgaagtctccagccatgtctccaaggtgtcgaacgtcatcccggtgcgcaacgtgctcatcgccgcccagcgcgcctacatcgcccgcgaggcgtcggccgactccttctccggagggttgggcatcgtggccgagggccgcgatatcaccaccgtggtgtccccggacgccgaggtgcgcgtgctgctgaccgcccgtgaggaggtccgtcaggcccgtcgcaccggccaggctgtcaagggcgtgggcgctgaggatgtggccgcgcgcgacaaggccgattccaaggtcaccagcttcctgaccgccgccgatggcgttaccaccatcgacaattccgatctggacttcgcccacacgctcgatctgctcatcggtgtggtcgaggacgccatcgagaaccaagaatacgagcagtatgccgccaatctcgaaggctatgagctggacgaaggcgatgaggatctgatttccggccgtggtttcacggaaggcgcgcgcaaggccggtcccaagccggtgggcgtgctggctgttgtaggccgtccgaacgtgggcaaatcatccctggtcaaccgtatcctcggccgccgtgccgccgttgtggaagacacgccgggcgttacacgagaccgtgtgagctatgacgcggaatgggccggcaccgacttcaagctggtggacacaggaggctgggaagccgacgtggaaggcattgaatccgccatcgcctcacaggcacagattgccgtgaccttggccgatgccgtggtattcgtggtcgatgggcaagtgggcatgaccaccaccgatgagcgcatcgtcaagatgctgcgtgccgccggcaagcctgtcgtgctggccgtcaacaagatcgacgaccaggccagcgaataccttgccgccgaattctggaaactcggcctcggcgaaccatactcgatttccgccatgcacggcaggggagtgggcgacctgctggacgtcgcgctcgacaagctcaagcaggccgagaagacttccggctacctcacgccttccggcctgcgccgcgtggctctggtgggccgcccgaacgtgggcaagtcgtctctgctcaatcagctggcgcgcgaagaacgtgccgtcgtcaacgatttggccggcaccacgcgcgaccccgtcgacgaaatcgtcaacatcgatggcgaggactggctgttcatcgacaccgccggcatcaagcgacgccagcacaagctcacaggcgcggaatattattcctctctgcgcacgcaggccgccatcgagcgctgtgaattggcgctgattctgtttgatgcctcgcagccggtatccgatcaggatttgaaggtcatgtccaccgccgtggatgcgggccgtgcaatcgtgctcgtattcaacaagtgggatgcgatggacgagttcgacaagcagcgtctcgaacgcctgtggaacaccgaattcgaccgtgtgatgtgggccgagcgtgtgaacctgtccgccaagaccggctggcacaccaaccgtctgacgcgagccatggataaggccttggaatcctgggatcagcgtattcctacaggcaagctcaacgccttcctcggcaagatccaggccgcccacccgcacccgttgcgtggtggcaagcagccgcgaatcctcttcgccacgcaggcgtccacgcgcccgccgcgtttcgtgatcttcgccaccggcttcctcgagcacggctaccgccgctacatcgaacgctccctgcgcgaggaattcggcttcgaaggcacgccgattcagatctccgtgaacatccgtgagaagaagaagcggaagtgacacgcgcgtaatttgccagatttcatatatctggtagattatctactcggtgcttttgcaccatcgggccgtagcgcagtttggtagcgcacttgactgggggtcaaggggtcgcgggttcaaatcccgccggcccgaccgattagccccggaattccgccacttctgagtggttgccttccggggcttttccgttttcagacaacatgagacaacatgacgacggacttacctttgtaagccattcgtaatggattaaacacggacttcatcttggcgtgttattggaattatcaccgacaattcaccgcctccgccccccgtcgtatgtgtttgccccaaacaggggctagactggttcctattgatttgatgaaagggacccgaattgaccgaaataaacgataaggcccaactggatatcgccgccgctgacgacaccgacgccgtcacctcggatatccccgaagaaaccgtaaacacccccgaagtggatgagactttcgagctttcggccgccaagatgcgcgagcacggcatgagcgaaaccgccatcaaccagttccgccatttgtatgacgtatggcgccatgaagaagcctccagctggattcgtgaggacgacatcgagccgcttggccacgtgcccagcttccacgacgtctatgagaccatcaaccacgacaaggccgtggacgccttcgccaagaccgcattcctcaagctcaatggcggtctgggcacctccatgggattggacaaggccaagtcgctgttgccggtgcgtaggcacaaggccaagcagatgcgcttcatcgacatcatcatcggtcaggtgcttaccgctcgcacccgcctgaacgtcgaactgccgctgacgttcatgaattctttccgcacttcggcggacacgatgaaggcgctcaagcatcatcgcaagttcagccagcatgacgtgccgatggaaatcatccagcatcaggaacccaaactcgtggccgccaccggcgaaccggtgagctaccccatgaacccggagctggaatggtgcccgcccggccacggcgacctgttctccaccatctgggagtccggcctgcttgacgtattggaggagcgcggcttcaagtacctgttcatctccaattccgacaatctcggtgcacgcccctcgcgtacgttggcccagcacttcgaaaacacaggtgccccgttcatggccgaagtggctatccgcaccaaggccgatcgcaagggaggccatatcgtgcgagacaaggccactggtcgcctgatactgcgtgaaatgagccaggtccatccggatgataaggaagcggcccaagacatcgccaagcatccttacttcaacaccaactcgatctggattcgcatcgacgctttgaaagacaagctcgccgaatgcgatggtgtgttgccgttgccggtgattcgtaacaaaaagaccgtgaatcccacggacccgaactccgaacaggtgattcagctggaaaccgccatgggtgccgcaatcggtctgttcaacggttctatctgcgtccaagtggatcgtatgcgcttccttccggtgaaaaccaccaatgatttgttcattatgcgttccgatcgcttccacctgacggacacgtatgagatggaagacggcaattacatcttcccgaacgtcgaacttgatccgcgatactacaagaacatccgcgatttcgacgaacggttcccctacgccgtgccatctttggccgcagccaactcggtttccattcagggcgactggacattcggacgtgacgtcatgatgttcgccgacgccaaacttgaagataagggtgagccgagctacgtgccgaacggcgaatacgttggcccgcaaggcatcgaaccggacgattgggtgtgatttacaacacggtcgaacgataaaaaagatattatttttgtgaaatggcgctcaactgtggaaaaagcctctaagatagagtgagtgtggggaaactcatacgcacttataacgaaacaataactatacgtgaggactaatggcagagggcacaagcggacgtcggcgtttttccgacaaatggggcaagcacgagctggacgtactggctgtgttgtcatccgcgttcccgcaatggctcacatcccgccaaattgcgcagcgcgtcaaggcttacgccgactcgtatggagagctggcagatcaggccgccaaggccgcgttcgccaagcagttccagcgtgatcgcgccaagctcgctgcgatgggcattgccatcgaatcacggcagcctgagtactcgtccaagtcggaaggccaggacttcgcgtcctatcgtctgcagttgggcgacgaaccgcgcatccgcctgatgttcgagccggaagatatgccggtgcttgccgccgccaactatctggctcgttcgatgtcgatttcttccgagccggatcagtcccagctcacccagcatgtgtcgcgcactacgccgcgtgtgccgcagaccccgattcccgggcttggcttggattcgattgcgcctggcttggggacgcagcccattccggattcactggtcaaggttattgattcgcgtcgtttcgccgccaccgttgacgtggatggcgaacacctgaacgtggcatacaccgattccgacgatttggccatgtttgtgcttgagcatccgggggccacgattgtcagcccgcaagaggctgtggacgcttatcatcgccgtttgcacgccgccagccggttcactctggccgacgaatccgccagtcctgtgagcgcttcggtggtttccccgtcgattagtcgcgatgtgcgagagccgggtgatcccgagtctatcaaggctcagaacaagaagaacggctccgctttccaaacgggcagtgaggttgatcgtcgcctgcgtctgatgctgttcctctccgctcatctgggtgaggaattctcgatgagcgagctgggcgaacgctttatcggcaagccaaagaacgatgatgaactcaagaaattcgtcaacatcatccataaggacatcaacaccctgaccaccgtttccgacgatggtgagatggccggcagccagttcttcgatattgactggccgctgctggatgccgagggtattgtttccgccaccaattcgctgggccttgaacgtcttgccggcatttcgccgcaatacctcagcatgctcaccgcctcggtcagctacctggcgcattcgccgttgctgccggacaagcagcgtgggcaggccgaatccctgtatgagcgtttgcgccgtcatgtcagtcccggtcagaccccgtggctgagcctgaccggctatgagctggagccccgaagcttctccatcgtcaagcgtgcgatcaacaccgattcgctgttggacatggagtacaccgacggtacaggtcgtacccgccgcaagctggtggcccccgccaagatcttcattgacgaaggcgtgtattatgccgccgtctacacggacgttggttccgccgcacccaaggacaaaaaggcctacgtctccaaagacaagaccctcgacaaggccaacggcaagccgcgcatctggcaggtactgcgattggcccgtatcgaaaaggcggaactggtcaagcccaccaagcagatcaacatcccgaacatgccggtgagcgaactgcgcaagtggagtttcgacaacggtaccgacgcggtgttcatcaccgatcagcgcgatctggcattcatcaagacattgccgggcgctaccgtcgaacaatgcggtgccggtgaaaaggtgcatctgaccgtttcctccgattcctggttcgtggccttctgcatcgcccacgcgcgtcatatcacggcggtcgccccggaaacgttgcgcaccatgatcgtggcacgcgccgaacgcgaactgagcatcagcgagaacaagtaaggagcctttcatgccttggtggatatggctgattctggccctgttcatgctggccatgattgttgccggactcatctatgcagcccttcatggactccgtgccttgaaagacatgtccgacatcggcggccaactcggtgaacgcgtggccgcgatgggggagcccggcacctctgccgacaccagcgagccgcctctgttcactcagccgctcagcgtggcacagaatcgttatgccgaggcccatgcgaacgtgattcgcggcaaggccgccaagcgcgaacgccacacccaggcatgggcccgctggaagcgattcaacaactaacggaaagcagcaatggcacgtcaccaacaccataagggcaatgccgattcccagacgctgagcccttcgcagcggtacgcatcattccaaaaggtccaacgccatcgggcgtccgcagcagcgcgattcgccgaatccctgcctttcgaactggacgacttccagaccgaagccaatgacgcgctcgaagccggcagcaacgtactggtcgcggccccaaccggtgccggcaaaaccgtagtggcggattttgccatttacctcgcccaggaacgcaacgtcaaagccttctacaccacaccgatcaaggcgttgagcaatcagaaataccatgatctggtcgacgtgtacggcccggacaaggtaggcctgctcaccggcgacacctcgatcaattccgaggcggacatcgtggtcatgaccaccgaagtgctgcgcaacatgctctacgagcgttccaccacgctgaacgcactgcgctacgtgattctcgacgaagtgcactatctggccgaccgattccgcgggcccgtgtgggaggaagtcatcatccacctgcccaagacggtcaagatcgtcggcctgtccgccaccgtgtccaacgtggaggatttctccaactggattgcctcggtgcgaggcgacacaaaactggtgatcagcgaacaccgccccgtgcctttggaacagcacgtcatcgtgcaggcggacgaacacaccgagcccgaggtgctggacctctatcgccgcgacggcaacggcgagcagaccaccaaactcaacgccgaactcatcaaccggctcgaccagttggaccgcaaggccgcacgccggcgcggcgaggaacgccccgataagcgcaagggcttcggcagaggccgcggcggcaaaggcgccaaagaccgtgctccgaaagcggaacgccacaccccgcgccgctgggccgtggtggacgagcttaacttcctgggaatgttgcccggcatctacttcatcttctcgcgcaacggctgtgaccaggccgtggaacagtgtatcaacgctggactggagctcaccaccgatgaggaagtgaccaggattcgccgcatcgtggatgagatggtggaggggcaactcactcaggaagacctgaaagccctgcagttctccaagttccgctttgcattggaagaaggcttcgcttcgcatcatgccggcatgattgccctgttccgtcagatagtcgaacgattgttcgaagaaggtctggtcaaaatggtgttcgccacggaaacactggcattgggcatcaatatgccggcccgctgcgtggtggtagagaaactcgaaaagttcgacggtaccggtcatgtgggcctgacgcccggcgaattcacgcagctcaccggtcgtgccggtcggcgcggcatcgacaccatcggccacgccatcgtggtcgaccatcacggttttgtgcccgccacggccgcctcgctgtcatccaagcgtgtctacccgctgcactcgagcttccgacccacgttcaacatggccgtgaacctgctcaactccagcgactacgagaccgcgcgcgtcaccctggaccagtcgtttgcccagtgggaggccaacgaatcggcctggcagctggaatcgcagattaacacactgaagaacgcgctggccggatacgaacaggcgttcgcatgcgaacacggcgacttcaaacagttcatgaccctgcgtatggagctgagcgacatcgaaaaggaaggccgccgcaaactgaagcacgaagtgttcctgaccgatcaggagcgttcacgcgctttccagaacctcgaccagcgcattcgcgatttgcgcaaggcggaacacgagcatccatgccgcaactgcccggacctccagcaacacctcaaatggggccaccgctgggcccgcgagactcgagaactgcagcgcgtcaccgatcgctacgactcccgcaccgggtccgtggcacgccagttcgattgcatctgcgatattctcaccgggcttggttacctcgaacgtcatgtcaatgcggccggccacattgacatgacgttgactgaaaaaggtctgctgctgcgccgcatctacagtgaacatgacctggaactgtgcgaggcgctgctcgccggcacgttcgacaagctcgacgccaacggactggccgctgtgctctcttcactggtatacgaggccagacgcgggggagacggcgaaccgaggcactacccgggcggcatctccgggcccatcgccatcgcttcgtccaagctcaagggcatttgtgaagacatcgatatcctgtgcgaggatcacggtctggacgagatgcagcggccggatttcggcattctcgacatcatgtatgaatgggcggatggcggttcgctgggatcgtgcctgtacggcaccgacatgaccggcggcgacttcgtgcgcactgccaaacgactggctgacgtgctgcagcagattgctgtcgcccagccgctgccgttcgacgggggagagcggctggcaggcctcgcccacgaagcggccgaccgggtcaatcgtggcgtggtggcctactccggcgtggactgacggggctgtttgacgggagtttgtcagccgacgtcggaagcttggaatagcggccaagtccgaactgttgcgtaaattagtagggttaaagatctttcaaggaggatgccgatatggcagaacgtagcctcaggggcatgagcatcggagcgaaatcgctggagtccgacgacaacgtcgatttcgccgcgcgaaacgatgtggcgtatgtatgcccgaagggccaccgcaccatcctgccgtttgccgagggtgccgaaatcccggacgagtgggagtgccgttgtggttccgtggcccaccgtgagggcgacgccgaccgtgagggcgacgaaatcagcaaacccacccgcacccactgggacatgctgctggaacgccgtagcgaagaggaactggccaccctgctcgaaaagcgcctgcaaatgcaccgtgacggttggattcccgactacgagtgatctcctactgaacaacacgtgaacttgatgcccagtcatcccgactgggcataatcattgttggaacaagtcgcattgtttgacgaccattcaaagcagtcgacatgaacaagggggagtggaatctcaatggcacagcatccgatgaaagtggtcctgttggatctcgacggcacgcttaccaagtccgacggcggcattatcggctccgtcatcaagaccttcgaagagatcggtcgaccggttccggacgccgccgaactgcgacgcttcatcggaccggcgattattgaatctctgcgtcgcaatcatgtgcctgcggaagatctggatcgggccgtggacatctaccgcagctactacggagaccgtgccgtgttcgacgatccgaacgagcccggcaacaaggtgcccggacgactggtgaacgtcgtattcccaggcatccgtgaacagctgctcaaactgcatgccgacggttattacctggcactggccagctgcaagcccgaataccagtgcatgcctatctgcgaccatttccacctgaccgaactgttggacggcatctatggtgcttccaaagacaattcccgtctggacaaagatcaggtgattcggtactgcttcgacaaaatcggttttgatgctgcagcgggggacagggccgtgatgatcggcgaccgctacaccgacattgacggcgcccacgcctgcaatttggacgccatcggctgccgctggggctacgctccggccggtgagatggaggaacacggcgcgtacgatatcctcgagaagcccgagcagatcgaagaagccgtaaaccgttatttccaaacgcactgaaacacaacggagaggacttcttcatgatgggatgcgatggagcctgcgccgcgggcttcgacctggttttcatcggtttgccgttgctgtcgctgtatgagattcccatgctgatatggttcatttggcgagcattccactggaaacgaaatgacaaggattggctgaaaggcacggcgattcttgcaattgcggtggtcgctccggtgctcctttggctgtcggccttttggctgtcggcctggtatgcgtggactagttgatacaggcgactgaatcctcgtcaaggataactaatctgacataacgtacattatcggctaactattcgggaatcttagaaacggcttaatttcaacggtcttcatttcgcacaggtaactgtggatgcctctgggtggcccgttgtggctacgcatttggctacgcatttcacacgacgggagaccaacgatggcaatgggtggcggcggctcgacatacagaagcgccgatggaatctggcacgccgcgatagacatagagcccgacagggccaccgggcgcaggcggcggctcacggcccaaggcaagaccaaggcggtggcgaacgc

SEQ ID NO: 3570 - DNA, 4547 bp, Unknown
  R85_18m  MAG No. k141_23835
atctgaatgtacgttatccggtgtcatttatagtcaatctgaataccgatacgcagcgttcgatcatggtgcccgatttctttcagcgtatgcttgatggtcatggcggttccttcctcgaagcattacgtgagttttgctgtgtgaggattgctcccgaatatcaagaaggtctcctgcgactgcttgactacgatgtcgtccgtagccggctcaagtcggaaggtgcagtgcaatgcggttacgtgaagaacgacggtgagcggttcatgttgacgattcttaccgacaacagatccacggacgagaccatgtgggtgttcgaacgtaaggacctgccgtagcggaaggctcgagaccctcaggggcatggccctgggcttccgcaacctcgacgccaccatcaccagaagcctgctgcacgccggcggcttcagacacgccatccaaacccacctctgacacatgcccttacacgccaaaatcggaagagccggaaatactacaacacgctgattgttgtatgtacaactgttgtatatgggtctcttgattatgaatttgaacatcaaacactccctcagtcacctgtggtgatggctcccgatcaagacggagcggaggttgctaacacgaaggaggagaacgaatgagcgataccgcagaggcaatcgcgcaggcgcgcaaagccgtcgaactggacaagcccaaacatgtactgcgcacgctgggccattcgattcgcgaatacaagaaagccagcatcctggctccggtgttcgtggcggtcgaaggtattctggaaatcctgattccgaccatcatggcttcgctgatcgatgagggtatcaccggtggcagcatgccggccaccgtcaagttcggcgtgattctgctggtgtgcgcgatggtttcgctgggtgccggcttcctgtccggaaagtacgcggccgtggccggcgcgggcttcgccaagaacctgcgcaaggaccagttcgagaaggtgcagggcttcagcttcaccaacatcgaccggttctccaccggttcgatcgtgacccgactgaccaccgacgtgacgaacctgcagaacgcctacatgatgatcattcgtctgggcgtgcgtgccccgatcatggtggtcgtggcctggctgttctcgttccgtatctccccgtcgatttccatggtgttcctggcctgcatcccgattctggccatcggcctgtgcggtctggtcgtgctcgtgcaccccgtgttcgagcgcgtgtttcacacctacgatgcgttgaacaacgtggtcgacgagaacctgcagggcatccgcgtggtcaagtcctataaccgcgaatccttcgaggtctccaagttcggccgcatctcccagcgcatcttcaaggacttcaccaaggctgagcgcatcatgagcttcaacatgccgatcatgatggtgtgcgtctacgcctcgatgattctcatcgcatggatgggcgcgcagcagatcgtcgcttccggcaataatgcggcgttgggcctgtccaccggcgagctgacttcgctggtcacctatgccatgcagattcttatggccatgatgatgctgtccatgattttcgtcatggtgattatttctcaggcttctgccgagcgtatctgccagatgctgcaggaggaaagcacggtgcagaacccggcacagccggtgaccgatatggccgatggctccatcgagttcgaccacgtcagtttccgctactccgacagttccgaaaagcccgtgttggacgacatcaacctgaagattcgctccggcatgaccatcggcatcgtcggcggtactggttcggcaaagtcgtctttggtgcagctggtgccgcgactctacgacgtgagctctggctcgctcaaggtcggcggcgtggacgtgcgcgactatgacattgaggcgctgcgcgatcaggtggccatggtgttgcagaagaacgtgctgttctccggcactattgccgaaaacctgcgctggggcaacccgaacgccaccgatgaagagattcgccatgccgcgcagctcgcgcaggccgatggattcgttcaggaattccccgacaagtacgacacgtacatcgagcagggcggtaccaatgtgtccggcggacagcgccagcgcctgtgcatcgcccgtgcgctgctgaagaagccgaagattctgatcctcgacgattcgaccagcgccgtcgataccaagacggacaagctgatccgcgccgcattccacaacgagatcccggacaccacgaaaatcatcattgcccagcgcgtggcctccgtgcaggaatccgacatgattcttgtcatggattccggccgtatcatggcctccggcacgcacgaggaactgctcaccacttgcgacgaataccgttccatttacgaatcccagaccaagaaccaggctaagaccggagaactggccgctgccggacaggctgctgagtcatctaccgctgagccgtccgaaaccgtgacggtgacagtgaccatgcccacggccgataccagcgcagctgataccaatgcagccgataccaaggaaggagaagcacgatgagtaacgaccagagtttcaagaatcgcgagcctgacatgggcaaagccgaccccggaaccatcaagcgcatcttcagctacatcttccaatacaaattgcgcgttatcgccatcgtggtgtgcatcctgatcggtgccgccgcgcaggccggatccgcgctgttcctccaatcgctgattgacacctacatcctgccgatggtgggggaatcgaaccccgactgggctccgttgctacgcgccatcagtctgatgggctgcctgtatgtggctggtatcgtgacatcctgggcttggcagtggctgatcatcaccgttgaacagggcacgctcaagaagattcgtgacgatatgttcgcccaccaacagaagctgccgatccgctacttcgacagccacgagcacggcgacatcatgagccactacaccaacgacaccgatacgctgcgccaggccatctcgcagtcgttcccgcagatgttctcctcgattatctccgcgattgcggcattgctgtccatgctgtggctgtcaatcccgttcactgcgttcgtgattgtgttcaccgttctgctgtatttcatcgtgcgcaagatcgtgagccgttccggccgctacttcgtcaagcagcagcagtggatcggcgacgtgaacgccttcgtggaggagtccgtcaatggtcagaaggtcatcaaggtcttcaaccatgaggacgccactcagaagaccttcgatgagaagaacgaggaactctttgaggcgtccgccgaggcgaacacttggggcaatgtgaccatgccggtcgtcggcaatatgggctatctgctctacatcctgctcgccatcgtcggtgccgccgtttcgctggccggcgtcaatgacatcggtctgaccggtgtcaagccgctcaccctcggcacgctcgtctccctgctgaccttgtcccgctcgttcatcaacccgatcggccaggtctcccagcagctgaccatggtgatgatggcgctcgccggcgcctcccgcatcttcaagttgatggacgaacccatcgaggaagacaagggcaccgtgacgctcgtgaacgtggaacttgggccggacggccgcaccatgaccgaagtcgaccatgagaccggccactgggcgtggaagcgtgagatcggcgacgatggtacgaggtctctgaaggccgccgaaaagctgcgcggttccgcctgcgaggtggcgatgaaggccaaggagcaggcgatcacctcgcctgatgggcgttatacgctgctgcgcggcgacgtgcgcttcaccaacgtgaccttcggctacaacccggacaagccggtgctgcacgacatcacctggttcgccaagcccggccagaagatcgcgctcgtcggcgccaccggtgccggcaagaccaccgtgaccaacctcatcaaccggttctacgatatccagcaaggtcagattctgtatgatggcatctccgtggccggcatcaagaagcctgatttgcgcaggtctttgggcattgtgttgcaggacgtgaacctgttcaccggtaccgtgatggacaacattcgttatggccgtctgaacgccactgatgaggaatgcattgaggccgcgcgtctggtcaatgcggacagcttcatccgtatgctgcccgagggatacaacacggtgcttgagggtgatggatccggcctgtcccaaggtcagcgccagctgatttccatcgcccgcgctgcggtggccgatccgcccgcgctgattctcgatgaggccacgtcttccatcgatacccgtaccgaggaagtcgtgcaggccggcatggataacctgatgaagggccgtacggtcttcgtcatcgcccatcgtctgtccaccgtacgcaactccgacgtgatcatggtgctcgaccacggcaacatcatcgagcgtgg

SEQ ID NO: 3571 - DNA, 22582 bp, Unknown
  R85_18m  MAG No. k141_23912
aaccgcatcctgcccgtgagctccatgctcaaggacttccacggcatctccgacatctgcatgtccgtgccgaccctcctcaaccgtcagggcgtcaacaacaccatcaacaccccggtctccgacaaggagctcgccgctctgaagcgctccgccgagacgctgaaggaaaccgccgcccagttcggcttctgataaaaaatcgctgtacggagcgcctttcacaccgcacaaggttcgaactacctttgtaggccttcaccttgtgcggcacgaaaaatcgcacacgtacagcgattttttataccctgctgaatgcttccagagggagcattttttattcgtggaattcgttggaggagggggagctatagccctcgggctcaagctggaaggtggtgtgggggaccgagaccgggaagtgctcgcgcaggcaatcctgcagttgggtgaggattgtggcggcatcttccatggtgaggtctttgtcgactaccacgtgggccataagaatcggcatgtcggtggacaccgtgctggcatggaggtcatgcacggcaagcacatgcggcacgtcttccagatgctcgcgtaccttatcgagatcaagaccatccggtgtttcctccagcagcaccttgaccgcgttgtgcagcagcttgatggcgcgcggaatcatcatcagtgcgatgacggcaccggccacggcgtcgaagccattccatccggtggagatcattaccagggcagaggccaccacagacaccgagccaagtgcgtcgttcattacctcgaggaacgcggccttcatgttcatgttgtcttcgcgctgcgaggcaaggatgaagatcgagatgatatttgcgacaagacccagaatgcctacgaacagcagcaagccgatatcgtcgatttccgctttggagccgccgaacagacgcatgccggcctctaccaacgcatagatgccgacgataagcaatactacggcgcccgcggcagcggtgagcacctcaagcctggcccagccccaagtacgagtgttgttgggcttgcggcgcatcagtatggcggtgattgtggatgccaccagcacggacatgtcggtgagcatatgaccggcatccaccagcagggccagtgagccggttaagacggccgacaccacttcgatgaggaagaccgaaccagtgacggtcaacgtggcaatcagcctgcgctggtgcgcggcagggtttacggatgtggatggtgcgggtgtatgggtatgggccatgtgtactccttcgctctatcgagttgaaaccgcttctcaataccatttgcgatatggtctgaatacgacgaaaccccggcgcgaggccggggtttcgtaagcagtgtgcgactatagcacgaccagcgcgattcagcgcacgctgatcagctggtggcgaacaggctataatttgcgcagtacggtgaccaccttgcccataatcgtggcatgtgtgccgtcgatgggcgagtatgcggggttgtgcggcatcagccagacatggccgttttccttgcggaaggtcttcaccgtggcctcgtcatccaacagagcggcgacgatatctccgttgacggcggaattctgttcgcgcaccaccacatagtcgccatcgcagatagcggcatccaccatggaatcaccgtggacttccagcatgaacagggtgccggagccggtcagccgttcaggcagacgcatgacgtcgtccacatgctgttcggcggtaatcggcacgccggcggcaatacggccaacgagcggtacgtcatgtgattcggcaatggcttcggcggggaattggtatatctccgccacattgctggcgctggttgcctcttcgctggcttgtgatggcttttcggcattcggggcggatcctgccatcacctcgatggcgcgacccttgttcgcgttcatgcgaatgaagcccttgtcttccaaaacttgtagctgatgcttgaccgaagacggacttttgagcccggcggcatttccgatctcccggaaagagggagcaaagccttgttcgtcgatatgcgtgcgaatggcgtccaacactttgcgctggcggtcggtcagggtggactcgtccggcttctgcttgggggagaggggaatggtgctcacgtcagggctcctttcgttatgtcaccagcataacgtgttgttcgtgtgaaatcaaacatctgttcgagtttcgacttgaccgtgtcgaacatttgtgccattataagaacagttgttcgatagaacatctgttcgagagaggtggtcgtgatgactggttcaatggtgatggccccggcccgtagcgcacgtgtagctatgcagcatgctggaacgtcccgccggaatgtgcgtgggcggattatcgcagtgatgatcgccttggcgctggcctggtgtggtttcggcgcgcttaccgctcagcgggcccaatcagatacgggtgccacgcaggtgaccagctatatcgtgcggccgggggatacgctctggtcatatgcttcggctattacacctgctggccatgatgtatcggaaacagtggatgagctgattacgctgaacaatctcgagtccggaacattgcaggccgggcagcgcattattgttccggttgagtaaatgaaacccgagcggcatggtttttccgcccgtacacgttattctggagagcatgcattgccctttttgccagaaccccgacaccaaagttattgatacgcgcattagcgatgacggtcattccatccgtcggcgtcgcgtatgcccgaaatgcaacaagcgttttaccacggtggaaaccagtatgctgctggtcactaaacgttcgggtggcgtggagccattcagcagagacaaagtgatttccggcgtacgtaaagcctgccaggggcggccggtcagagaagaggatctgaagctgctgggacagaaagtcgaagaggatcttcgctcccgaggccttgccgaagtcacctcagatgaagtgggcaaagccatcctgaaaccgttgcgtgacttggatgtggtggcgtaccttcgattcgcgagtgtgtaccagaactttgcaggtctggaggatttccaaagcgccattgatggtttgcgtgaataatatgcgaatgccgtgcaccgtgatatgcgagtgattcgcaaaccatggtgcgaaccaatcatgaagccctgcacttatgaaagagacccgtcagcgacgggtctctttcatatcaatcgaggatgagctgcgtcagctgatgacacgcatgcgaacggtgccctcgatgttgcgtagtgcttcaagcgtggcggcgctgggcttctgagccacgtcggtgaccacatagccaagttcgccttcggtggccaacgactggaaggaaacgttgatgttctcttcgccgagcacgcgattgacatgagccagcacaccaggaagattgtcgtgcagatgggcgatacggcacacgcccttgcgttcacctaggttgatctgcggtaggttcacggacaatgaggtagaacccttgaaccagtaatcctcaagacgctgagagacgaaatggccgatggattcctgagcctccaaggtggagccgccaatatgaggagtcagaatcatattgtcttcgttggccagtgaggtctcgaacggatctccgctcttcttcggctcaacggggaacacgtcgaccgccgcgccagacagatggccggaatcgaggtgctgcttcagagctcccagatcggcgacgaaaccgcgcgaaaggttaatgaaaatcgcgtcctgcttcatgtgggcgaattggtcttcgccgaagaagccggtgttcgacttgcggccatccacgtgcagggtcacggcatcggactgttccagcagttcgttgagggtatcgcaacggtgggcgttgcccagtgccagtttctcctcgatgtcgtagaacaccacgcgcatgccgagggcctcggccagtaccgacagctgggagccgatgttgccgtagccgatgatgccaagggtcttgccgcgcacttcatgcgagccggaagcggacttgtcccacaggccatgcttgatgtgatgcgtgtgtgcgggaatgcggcgcatcaagcagatgatgtcgcaaatcaccaattccaccacggaacgggtgttggagtagggggcgttgaacacggcgatgccacgcttgccggcatgtgccagatcgacctgattggtgccgatgcagaagcagccgatggcgcttagcgtaggacgcgcatccagcacgcgggctgtgacgttggtcttggagcgtacgcccaccaagtccacgccatccagcgcgtcgatgagttcgtcctcgctcagggctcccttcatggtctcgacttcgaaaccgtgatcacgcagcgatttggccgcgtcggggtgaatgttttccaataacagtgctttgggcatgcttcataccttagatgttcagggacttttcgtccgttcttgtccgaactataaccagtttctgggtcggcctggtcattgccacgtacaggtccgaggcggcgaccaggcggctcggcgcgtcatcctcgatgagaccgggctcgaccaccacgacggcatcgaactccagacccttgaccgtttcggtgccgcagacgctgatttgctcatcccattcgggctgctcgatgagccttgcgtattcggccgggtcaagaacggcggccagtttgcggcgcacggcgtcgcgcaccggggcgatgagatcatccggacagatgacggcgatgcggccggtgccgtctgccgaaacgaattgttcggcaagctgcgccgcctgctcggccgtcgtttccagcaaggacgacatgtcgggcaccacattgcgggacaccgaatcggggatggtgcgcaccgcattgaccgtggagatgtagaggccttccttctcggcaaatcgtgaggcgagttcggaaacttcctgcggattacggtagttgatggtcaactcgttcagatcccagtggctttcgccgaacaggcggttcatcgatttgctccagcgtcgggtgccacccagcgccgaggtctgcgccacatcgcccacgatggtgaacgagcgggaggggcaacggcggatcaacatacgccagtccatggcggtcagttcctgcgcttcgtcgaccacgatgtgcccgtaggtccattcacggtcggccgcggcccgctgcgcggtcagctcggcgtcgtccccgttcatctggtcgagcagcatctgactggagacgatgcctccacccagaccggtcgcggccagcgtgtctttggcatactgctcttcggcggcacgacgtgcgtcggcggcggactggcgggccaccgtcttgggatcggggcccagcatatccatcgcttcgtcgagcagcggaatatcggagcgggtcagcggggagcccttggggcgggcaagtgccgcgatgtcgttgtcggtcagccaaccagccagagacttcagacgttcgggatgggcgaacagctgatcgatgagccatggggcggtcatcggcagccagcacaggttcagggtcttgcgcacctgctcgttcatacgcagcaacgacatcgcgcggttcagctccgcctgatccggcgtgtaatcaagctgttcggcataacggttctgcatgctggtcagcatcgaacggataaaggtctcgcgggccttgttatgaggttgccgggtgcgcttcgcgtccgcctgcgcctgctcgatatcagtggccagcattggtacctgaatgccgctaatggttactgtcggcagaacagcgggaacacgcacgcgcgcggcgatggcattggccactacggaggtcatgcgtcgatcgcccttgagcttggctgcataaggggagtcgaccgccgtggcggtgatgccgggaatcagatcgctgatggtgcgtgagaccacgccggtctcgcccaaggagggcagcacctgatcgatgtagtgcaggaacgccgagctggggccaacaaccagcacgccggaacgttccagcgtgcgccggtgcgtgtacagcaggtaggcggcgcgatggagcgccacggccgtcttgccggtgccgggaccgccctgcaccaccacggcacgattcatgtcggagcggatgatgcggtcctgctcggcctgaatggtggccacgatatcggtcatcttgccggtgcggcgtgagctcagcgaagccagcagcgcaccctcgccggtcaacgtgccggcggaagacgcctggccgacttggtcggaatgcacgtcgagcacctcatcctcaacgcccacgacttcgcggaaactcaaggtgatatgcctgcgcatcacgatgtcgccgtgattggagggggtcgcctcatagaaaggacgtgcggcttcggcacgccagtcggtcagaatcggctcatggtccgggctcgacaggccgatgcggccgatgtaatgacggtcgccgttcttggcgtcgagacgaccaaacaccagccgatcctcaacgctgcgcaattgcgtgaggcggttttcgtacattgtggcaaaggagtctcgttcgctgcgttgcgtgggggatccgtgggagccggcggcgcgtacggtgtccaggcgttgccacatttcggctcgcagatcatccaatcgtccataggcgcgatcgacggcctgctgctcctcatgcagctgggaggcgtaactcgacatgctgttctcttcgttccatttccgtggggcagaaaaaacttaaggcattcaaatttaccgcacaccccctacgtcagtgatgcggacaacccggaataggtgaattcagcgtgaattcgccatgctgctcggtcggtggagtgcgcaacgtggattggatgtgcggagcgcccattcgtgcgacagtcgtggccgacacgcgcaatccatcggtaattgccctaaaagggtgagcaaatcgtgcatgagtggggagaaatggggaatcgtggggtagagtggtgaaccagttggccgaagtgtatcccacgtaacgatgaaggaggtggagccatggttgccgatcagacgattcgcgacgctgatgccaacgcacaaggctccaccactatggctgatctcatggctggtctgccgccgctgcttctcggcacatatacgccgaagatcgacgccaaaggccgtatggcgctcccggccaaattccgctcccagctggggcagggcctggtcatggcccgaggccaggaacggtgcgtgtacctgctgccgttcgatgaatttcgccgtatcgcctcgcagattcagcgtgtgtcggtgggaaacaaagccgcccgcgaatacctgcgtgtgttcctttccggtgccgtcgatcagcagccggacaagcagggccgcgtgctggtgccgcagatgctgcgcgattacgccaatctgggttccgacgtcgtggtgatcggcgttggcacccgtgccgaactgtggaataaggacacgtgggagtcctacctcgccgagaaggaagagggatattccgatattgctgacgatgtgttgccggaggtggaattctgatggttgatgtggcgaatattcatctgccggtattgctggacgattgcgtgaacctgatggcgcctgccctggaacatgagaacgccatcgcagcggattgcaccctgggccttgccggccattccatcgccttcctcaaagccgcgccgcaggctcggctcatcggcattgaccgtgacagtgaagcgctggggctggccaccgaacgcatggaacgggaggggctcgccgatcgattcatcccggtgcatgccgccttcgatcagctcgatcaggtgttgacggaccgaggcatagaacgtgtggacgccgtattcatggatctgggattatccagcctgcagatcgacgaaaccgatcgtggcttctcctattcgcatgatgcgccgctggatatgcgcatggacgtcagccagccgttgacggccgaacggattcttgccacctatgatgcggcggaactggtccgtatattcaaggaatacggtgaagagcgtttctcgcgtcagatcgcccgcgccatcgtggcacgtcgagacaaggagccgtttaccaccaccgcacagctcaaccgtctggtcgatgaagtggtgccgcaagcccaccgcccggcgggcaatcccgccaaacgcgtcttccaggcgttgcgcattgaagtcaacggcgaattggacaagctcgcctccacattgccgcaagccgcgaaccgactgcatgtcgggggacgactggtggtggagtcctatcattcgctcgaagacaaaaccgtcaaatcgttcatggcacaagggctgcgagtggatgttccggctggtctgcctgtcataccgccggatgcccaaccgtttttcacggatctcacgcgaggtgccatcaaggccggcgaacatgaaatcgcagccaacccgagatcggcttcggtgcggttgcgggcggtggaagtcagccgtgagattccgtcacgatggaggaaacgctttacgcaaaccgcgcagggcctgaatgacgtcaagatacaaggctccgcgtctccgggcagagccaaaaacacagcgcgaattcgtacaaggaggggataacggcatatggcaaccgcacgtaacattcgatcgaacgcggctccggcctcgaaccggccgcacaccaagcatcagtcctcctcccgacctgagctgcgggtggtctccaacccgcgtggagacgagcggggcaatgtcgtcggacgggtcatcgaatggaccagaacaagaagcgcaccgctggtgcacgtggccatcgcagtgatcttcctcgtcggcaccttgttcggtgcgctgatgttgcgtacccagatggtgcagaactcgtttgaggcggcacagatcgaaaccaatatcaacagacttacccaagatgtcgaagacgatcaggccaaactcgatcaattagtcgcgaacctgcccgacaaggccagcgacatgggcatggtcccgcagcagggatcagtgtccatcgacttaagcggataccagtccaacaaaggcggaacccagtgaacaccattcgtcgcatcgtagagttcgccaaggtcaagaccttcgcgttcaaatgcattgccatcggcgccgcattggcgttggtggcgtcggcatgcgtgattcagctggcctccacccagctcatcggcggccgtcaaaccgcacaagcggccacggctaaccgcaccctgaccgtgacgttgagcgccaagcgtgggcgtatcctcgacgccaacggctccgtgctcgctcaaagcgtggagcgttatactatcgtcgccaatccggaggctgcacaggagttcgagccgattacttgcaatgacaacacccgtgattactgccacgaaattgacggcaaacccgtgggcgctaccggagcggcggccgtgggccgactgctggccaaagtcctggatatgaacgccatggaactgggagctgatctgtccggtaccgggcagtatgtgattctgaagaaagatgtgactccgcaggtcaagcgcagcatcgaggcgttgcacctgggcggtattgtctggggtgagctgagcagtgaaagactgtatgcggatggcgatctcatgggcgcgctgcttggcggcgtgaacgacaacggcgatggcgtcgccggcatcgagcaggtcgagaacaagacgcttaccggaaccgatggccatgaaacctaccagcgtggtaatggcggcgaagagattcccggcaccatgaccgaatcggtggcggccaaaaatggcgacgatgtcaccctgaccattgaccgtgatgtgcaatggtatgtcaaaaaggccttgaaggaggccgaatccaagtatggtgcagcgtgggcgatcgccgtggtgcaggatgtccagagcggggagattctcgcactggccgatagcgatgaagtacaggctggtaccgatgcggcgaagatgagcccgtctcgggccgtgtccgaaaccttcgagcctggttcggtgggcaaggtcatctccatgtccggctatctgcagacgggactgcataagatgagcgatcaattgtcggtcccggaccacatcacacagaagggccagacctacaaggactcattcgaccatggcactgagcgctggacgctcgccggtattctgcagaactcatcgaacgtcggcatgattatggccggggagaactatccggatgagcaacgctacgagtacctgaccaaattcggcatcggacaaccgaccggactgaacctgcccggtgaatcgagcggtctgctcaccagcccttcggcatgggatctgcgtacgcgcaacaccatcctgtttggtcagggctacgccgtcaacgccctgcagctcaacaacgtggtggccaccatcgcgaacaagggcgtcaagcagcagcagtcgatcatcagatcaaccaccgatgccaatggcaagaccactgagaccaagaagggcgaagccacccgcgtggtggatgaaaaggtcgcatcggacatgatgaatgcgatggaatcagtggcggagagctacaacaagttcgtcaaggtcgatggttaccgcatggccgccaagtccggtaccgcagaggtgcagggttcggatggcgcgctctcgtccattatctccgattattccgtggtgattcccgcggacaacccgcgctatgcggtcaccgtggtgctgaaggatccgaatggtgtgttcggcggtctgacggccggccctgtttccgcacagatttgtgagttccttatgcagaaatacgaggtgcctgtctccagtccacgaaaaaatgctattccagtcacgtggtaaggatcaggggagaaaggcgatagcccatgagtgcagtgagcgaatccatcgcccagcgggtgaccttgggaatgctggtcgaacggtacggttttgaagtcgatccacccttcgccaccaatgtcaccattacctcactcagcgatgccgtggataccgtgattcccggctcgctgttcatctgcacgcatgagcaggaacccgatgtgctgcatgccgcgcaggcaggtgcctatgcggcgttgctgccacgcgcgtccaaagggcagatcgccaatgccgatataccgttgctctacggcgattgcgacgatcgcgtactcggcgatctggccagcggcctggccggcggaccatccaacgccatggcggtgttcgcggtgaccggtgcggatgagcaggccgttgacgcaggcgtgtcccagctctccgaattcctgcacatgctgggcaatccggtggcggtaatcaccgcatccgggtccacgtcgatgacacgtaccatgaacctgaactatcctctgggcatcctcgatatgcagcgcgcgctgtccgtgtgcgccgaagacggtgtggcggccgtgatcatcgccatggatgaccgcacattggccgagcatgcgttggaatcggtgaacgtggatgtgctgggcacggaagatgtcaacgcaagcgcaagcttggacgaattgaagacacgctacgcattcgttgcggaacatgacatgtccatgacctcgtcgacacccgaatcggatgaaatggctgcggattcaccggcaatgtacgaccgcgtccgactcgggcacatgtccttggccatcgccatggtactggccgccggcgtgaggaaaaacaacatacgcagtgccctgcatgtggccaacaatctcaattaagtccgtggatgcgggacgaagcgtaatcgtaaaggagtttgaaacaccatggttccgatgagtgtggaggagatcgccaaggccgtcgatggtcgattgatcggagacgccgattccgagtctcgagccaccaatacggtcagcgactcgcggcaggccggccccggatcggtgtttgtggccatccgaggcgagcgtgtcgatgggcatgactttgtggcgaaaaccgctgaacagggagccacggtggccatcgtcgaccatgaggtggagtccgatggcctgccgcagatcgtagtgaaagacacggtcgacgcccttggcgagctcgcccgacacaacatcgttcgccgccgcgagctggacggcgacttcgacatcatcggattgaccggttcggtgggcaagaccaccaccaaggatctgctctcctccctgcttgccaccgtaggcccgaccgtggctccggtgggatcgttcaacaatgagatcggcctgccgctcactgcgttgcgggtcgatgagcacacccggttcttcgtggctgagatgggtgccagccatatcggcgaaatcgcgcgactgacccgtatcgcaccgccgaacacggcaatcgtattgaaggtcggcgtcgctcaccttggagaattcggctcccgcgaacgcatcgcacaggcgaaaagcgaaatcgtgcagggactgcttcccggaggcaccgcggtactgaacgccgatgacgaacacgtggttcccatggccggcctggccagcggcgatgtgctgtggttcggcttgggatcgtcgcaggagcccgaggtgcgggccattgatgtcactgccgaccggtccgatcatgctgaattcacgttggtcgatgcggacggcaaccatacgccggtgcatctgggcattcctggacgtcacaacgtgatgaacgcgttggccgccgcaaccgtggcgatgcgttacggtatggcacccgaaacggtggcgcggattctggcctcgcagcacaccatcagccctcatcgcatggcattgtccacggtgaatcgcgaggggacttccttcacactgatcgatgattccttcaatgccaatcccgactccatgaaagccggcctgaacgggttgaaggcttggaactcaaatgacggcaaggatccgttccgcgtggcgctgctgggtgccatgctggaactcggcgccgatgagacggcattgcacacctctatcggcacgtatgcggccgaattgggcatcgacgcgatcatcgcggtcggttccgcccaagaccaacatctcgatgcactggcacaggctctggcggacggtgcccgtcagagccaatccgcgtcggtggattgcgtacacgacatcgatgcggccgaacagctggtcatcgacttggcgcgcaaccattccgacgctgtggtactgctcaagggatcgcacgcgtcaggcctgagcgctttggctgaacgctgggcaaagaactgacccgataaccaccccaagaaaccgacaagaaagagaagctgcacgtgattgctctgatcattggaatgctggtgtcgctcatcgtcaccttagtcggcaccccgctgctgattcggctggtccacaagctgcactatggccagtacatccgccaggatgggccgcagtcgcatctggtcaagcgcggcacccccacgttgggcggcgtggtcatcaacttcgcgattctgctcggttgggcatcctccgcactgtaccgatacctgcgttcgggcgacgtgccctcctggtccgcggtgctcgtactgttcgccatgctgtcgatgggtctgctgggctttatcgacgacttcgccaaggtgcgtaagaagcagaacgaaggcctatcggtgggcggcaagttcatcggccagttcatcttcgccaccatctacgcggtacttgcgctgctgattcccaccaaatcgggattccccagtgcgcaggcgggcatcagcttcatcgaacggccgttcttcaacttcgatttcgccggtcgaaccgtggccatcatcctgttcgtcatctgggtgaacttcctgatgaccgcatggaccaacgcagtgaatctgacggatgggcttgacggtctggcggcaggttcgtcgatgatcgccttcaccggttttggcatcatcgcattctgggaaagctaccacatcaagggcggcagccatggcggctattcctatgctgtgtccgatcctctcgatctgaccgtcatcgccgtatgcgcggccgtcgcctgcttcggcttcctgtggtacaactcgaaccccgcatcgattttcatgggtgataccgggtccctggccttgggcggcctgttcgcagccctgtccatcgccacgcacaccgaattcctggcggtggttctgggtggactgtacgtcatggaagccatgagcgacgtcatccaggtcgggtacttcaagatgacccacaaacgtgtattcaagatggcaccgatccaccatcatttcgaactgaagggttggaccgaaaccaaggtggtggtgcggttctggatgatcgaactcatcttcgtgctgctcgccctgacgattttctacggcgactgggtcacccgctccggcctgctgttcagctagcggaaatctgggtgggattatgctcacccacggaattcctatatcaggaggaacaatgcaagtagcggataagacagtggtgatcgctggactgggtgtgtccggcacctcgttggcggaggtattgagggaatgcggcgcccacgtgattggcgtcgacgagaggaagcccgaggccggtctccgctcctttgatgacgtggactgggaccatgtggactacgtcatgtcgtccccggtgttcaacccccgcaccccgttcgtgctggaagcccaacgccgtggcatccccgtgatgagcgaggtggaattcgcatggcagctgcgtgtgaataacgagcgcaccggtactccggctccatggatcggcatcaccggcaccaacggcaaaacctccaccaccgagatgacctcggaaatgctcaccgcctgcggactcgacgcgccgaccgccggcaatatcgcctccggagacatgagcatgagcctgtctcgttgcgccaccaatcctcagcacgacgtactgtgcgtggaactgagctccttccaattgcacttcaccgattcgctggcacttgactgcgcggcgatcaccaatatcgccgacgatcacctcgactggcatggcgggcgcgagaattacgccgccgacaaatccaaggtgttccacaacgccaaacgcgccatcgtctacaatgcgcaggacgccaaagtcagcgaactggcggccgaggcccaaaccgccgaaggatgccgcaaggtgggattcacgctcgaggccccccaggccggtcagatcggcattgaagatggctggatcgtggacaggagcggcgtggccggcggcgcagtgggggagccggtcagactggccgccatcaccgatttcacgcatctggcagagccggacggctcactgtacccgcatctggtggccgatgcattgacggcattggcgttggtgctgggacttggcgctgatcgagataccgcgttgaaggcgcttacctcgttcaagccgggcggccatcgcatcgaaaccgtggctgaggccgcagtcgagggcggctccgttcgtttcgtggacgattccaaagccaccaacggtcatgcggcacgcgcctcgctgtccagcttcccggccaagtctgtgatctggattgccggaggtctggccaagggcagtcgattcgaggacctggtcaaggaccaggcacataccatcaaagcggccgtcatcatcggcaaagaccagcagccgatggtcgaagcgtttgccagccaagctccggacatcccggtgaccatcatcgatcccgaagacaacgataccgtcatggatcgtgccgtcgaagcctgcggcacgtatgccgccgccggcgacatcgtgcttatggctccggcctgcgcctccatggaccagttcaagtcctatgcggatcgaggcaatcgattcgccgccgcagccaagacgtggagcgaggtgcatggcctccactgatacccataagcgtaaggcatacagagcccctgacaggcccgcactcgagatcaccgactacacgggttggcgaagcttgctcaacccgctatggtgctaccacggattccgcatggccgtggtggggctgacatgcttcggcctgatcatggtgttctccagctccacggtcaccatggccgcactgggcaagtcgccgttccttcagcttctgaaccagggcgcgttttgcctgatcggcttggtgctgggcttcgtggcattgacgatgccggtgacgttctggaaacggaccggcgtgttctttgtggtgggtgcctgcctgttgcaggcgctgacctttactccgctgggtatcgacgtctacggcaacaaaggttggctgaacctcggcttcaccactatccagccggccgaattcatgaagttcgcgatgtgcatatggctgccctcgtcgttgcatgcctgcagcaagatgtaccacaagaagggaatcaaagcatatgccgcgccgttggtgttgtatgcgataggcgtggcgctggtgatgggcggcaaggacctcggcacggccatgattctggtctccatcggaggcgtggccttcctgatcgtcggattccccggcaaatggatgggaatcggcgtattgggcgcggtggttatggtcggtgcattggcggtttccagcccgaaccgcatgcgtcgtattctggccacatatggtgattgctcggccgctgacgcgcagagcgtatgctaccagtccattcacgccaagtacgccatcgcctccggaggctttctgggattgggcatcggcaattcgcgtgagaaatggaattacctgccggccgcccataacgatttcattttcgcgatcatcggcgaggagaccggattcgtcggttgcgccatcgtattgctgttcttcgcgattctcgcctggtgcatgatcgtcatcgcattgcaggtcaccgatcgttatgttgccatggtgctgatgtgcgtcaccatttggatcgtgggccaggccatggtcaacatcggcgtggtcgtgggtgtgttcccggtattgggcgtgcctatgccgttcgtctccgcaggtggctcatcaatgatcatgtgcttgacggcggccggactggttgtgggacttatgcgttctcaaccgcagataaaacagtcgcgtcagagcgcgtaagtagactcggtaatcatgaatcaaggcacaccacatatcgttcttgctggcggcggtaccgccggacatgtcaatccgctgctcgcggtcgccggagcgattcgcgacatcgaacccacggcacaggtcaccgtcatcggcactgcggtgggtttggagaaggatttggtgcctgaggccggctacgagctcgacaccatcgaaaaagtgccgttcccgcgtcgccctgacctgtacatgcttcgcttcccggcaaaatggaagcgagaaaccgccaaggtgcgctccattcttgaaacgcggcatgcggatgtcgtggccggattcggcgggtatgcttccgcccccgtctacgccaccgcacacaagatgggcattccgattgccatccatgagcagaatgcgcgtgccggcatggccaataaactgggcgctcgttgggccgatttcatcggtaccgtgtacgaaggcaccggtctcaaaccgcgtgccggagccgacgtcgagcgcgtcggtctgccgttgcgcccggccatcgcctccctgaccaaacgcatcggtgacgaccgtgccgccgtacgccgtgaatcggccgcgcagcttggcgtcgatccgaatcgtccgctggtgctggtcactggcggatcgctgggagcgcaaagcctgaaccgcgccatcgcctcctccgccgcagacctgttggcccacgcacaaatcatccacttgaccgggcgaggcaaaatcagcgaagtacgcgaactggtcacggcctcggccggcgtggacgtgcttaccggcatcggccccgaatcggccggacaaggtgactaccataccgccgaatatctggaacgaatcgatctggccttcgcctgtgccgacttggtgatttgccgcgccggagccggatcggtatccgagctggctgcactgggtctgccggccatttacgtgccgctgccaatcggcaacggcgagcagcgtttcaatgccgagccagtggtgaacgccggcggcggccttctggtcgcagacaaggacctgaccccgcagtgggtgcatgagcatgtgcccgatctgctcgccgatcacgaacgacttgccgaattcggccgcaaggcatgggaatacggcatcagaaacgctgccgaaatcatggcccggcacgttctgcaattagccgaaccatccaaatagtattcagatatcatcccgtgcgcgatacagaccaatcccgtcccgcaacacgagatacggtcataatatagggtgctggaatccccaaaggagttttgaattgtctcaagatcagcccatcgtgcttgaccccacgtatgcctcgttcgatgctgcggcccgccccgcggatctcggcgccacccatttcatcggtatcggcggcgccggtatgagcgttctggccgaaatgctgcacgccgaaggagtcgcggtggacggctccgatcgcgcgcacagcgccaaaaccgaccgacttgaaacgctgggcatcaccgttgaattcgggcagcgagccgaaaatgtcgcccaggccgagaccgtggtctactccagcgccatcaaaccggacaatccggaaatcgtcgcagcgcacgcggcaggcaagcgcattgtgcatcgcagtgacatcctcgctctgctcatgaacggcaaacgagccgtcaccgtggccggagcgcatggcaaaaccaccaccagctccatgctgtcccacattctggtgaacgccggtgctgatccaagctacgccatcggcggctttatccaaggcccggacggcaccacgctggacggtggacacgcgggcaaaggcgatattctggtggccgaagccgacgaatcggacggcagcttcgccaaataccatccgaccatcgccattatcaccaactgtgaagccgatcatctcgaccattacggcgacgaagcccactaccgtgccgcgttcgttgcccacgccggccgggccaccggtcacgtgatcatcagtatcgacgaccccgacggacttgccgtgctggaggccatgcccgccgacgtgaaatcccataccgttgcctacggcactaccgcgcgtgaatccctgcccgatttgggcggtgccgcgtatgtctggatcgcttcggaaagcgagaccgcaggcagcggcgtcgaacagctcaccctgcatctgccggccgcggtgacggcgggggagccggtgtctcagagcgttgccctgaaggttcctggcgtgcacaatgcgcgcaatgcggccgccgccatcagcgctgccgtgctgctgggcgtgagccccgcagacgcggccaaggcggccggcacattcctcggtgcggcacgccgcttccaggtgcgcggcacggtcaagcaggtcactgtagtggacgattacgcccaccatcccaccgaaatcgcggccctgctggatgcggcccgacgccggtaccccgattcgaccattcgtgtgatcttccagccacacctgttctcccgcaccaagttcttcgcgcaccagttcgccgaatccttggccaaagccgatgacgtcattatcaccggcatcttcccggcccgtgaaaagcagaccgatttcccggacatcagcccctccaccatcgtggacgcggctgagggactcaaggacgcttccgcaggcacgtggattcagccggtcgaggatatgtgcctggccgccaagatgatggccatgcgcgcccaccacggcgacgtgatcttcaccgtgggcgcgggcgacatcaccgacatggatcaggtgctgctcaccgcacttgaggcccatcgggaaagctgcgagtgatgtccgggcgcacggtcagatccgggggcaatgacaacggctcacgtcgttcgtccggaagtccccgcaagccgcgcaccatcggttcacgcggaaacacgggtcactcgtcgaagtctcgcgctccccggtccgtgtcttccgggcatgagatcaacgagccggagatcatcgacgatgtgacggtagccaagggccaggccggtgccttcgtcgatgcacgacggctgcacagcgaggattacgttgccgaaacgctgcaccagaccaccggctccctaggagtcgtatcacgcccgaaagtggtgaatttcaccgaacgcgccaaagaacgcaagcgtgcgaacgtacgtgtcgttgcgttacgcgtgttgattgctgtcgtcagcgtggctgtagtgacggggctaacgtggctgctgctcttctcgtcggtgtttcgtctggaaaccagcgagatcggcgtatccggtgccaacgaatgggtgagcgcgcagaccatccatgccatcgccgataagcaggctggaaagtcgttgttcctggtctccacccatgaggtcacagagcaactcaagtccattcccggcgtcagcgaggccaaggtctccaaacagttccccaagtcgatgagcgtggaagtcaaggcgcaacggcctgcggccatgctgaaaagaggcgataccctgaccgcggtggattcccaggcgcgtgtgttgaactcggtgaagaacgccaacgtggatggcatcccggtgatcgaggtcaaggatatagacgccagtctcaagaaccgttcggtgaaggaggcgctggcgattctgggcgcattgccggaatcgatgcgtaagtccattaccaaggtcaccgctgagacgcaggattcggtgaccaccacgcttaacgacggtgaccgcgtaatcatttggggagactcctcgcaactgaagctgaagctggcggaagtcgaggaaatcgacaagaacatcaccgctggcacggctggctttgccggcaaacatcagattgatgtttccgcatcccagaagcccatcatcaagtgacggcgattcagttggttccgttggttccggggcggcgttcgctccgttggttctgctgacaacgttggtcccgtcaatgccggggcgatgttcgctgccggcgatttgcgcgagtagcgccatagggtgtatgctgaaaagtccggccgaaaagccggaagcttgataactcaagattgggggcgatcggtttcgacggtgacctgttcgctgcagggaagcgtgccgagaacgccgggtccgctcgtggatgaccccggcaaaagaataagtgctaaatctaaccgcactgagttcgctctcgctgcctgatttttagtcaggattaaccagtgagcagccgctccgttcactcctcctcgtctttgggaggatgctgagcgtcgtttagaagacttgctgatgcagttgagcctcagggctgcatcgggactttaactgcggatatgctcgccatcagttgtctgcgacatcgatgggggcagaaaaatcgccaacttggccagcagactacgcacgtagaagactgtgggctcggtcatcggaccggggttcaattccccgcgcctccaccaatccgcctcggcggaaacaagccgcttggctttacgaaagtaaggctgagcggcttttcttattcccgtcgattccctcgtattctctcggtttcacgggataatgtgggccaaatgtgggcaaaaatcgagcccgcgaagccctctgccacaacgcgagaacggccccgaccggcaagtaggccgactcgggttgagtcgtctgcgatgccggacggggccgaactgtgcgtggtggtcatgcggcgaggtcgaggcgctgtttgatggcgctgacgccgatgagcgcgccggcgaggatgccgagcgcgttgagcgtggtcactatcgcgtccacgtgagtccagccccatgcggggccgaccgtactgacgaacagggcgagtgcgggcaggacgatgaggcccaaccatttgaggatgtcgtagacgcggctggggattgcgcggttggcttcgatccgacgacctgcggttttggagaccgccgctctaccagctgagctacgcgcataggcggtcatgccggttgattgccatggcacatgaccattgggtggatatgagtaaagcccctgaaccggttgattcagaggctttcacactaatcctgatacggagtatgccacggggcggattccccctactcccgcttgtgttttgttttttcaggcggcttggatggtgaggcgtccgccgagggcgtggattaccttggcgatggtctggaagctggggttgccgtccttgctgaggctcttgtagaggctttcgcggcccactccggctgcttcggcgatctgtcccatgcctctcgccttggcgacgtctccgatggcggcctgcatgagtgtggggtctccggtttcggcggccgcgtc

SEQ ID NO: 3572 - DNA, 18038 bp, Unknown
  R85_18m  MAG No. k141_24072
acagccggacttcgattcctcgccggattcgttcacctccagcaacacgccgaccgtgatgccgcgcatggtggcacggcgggcgatcttttccgccagttcgatggaatccacggattcgatggtgtccactaccggcagcaccttgccgattttattggcttgcaattggccgatgagatggaaaggaatatgcgttgcagctgcggcattggccgtgtcagcctcagcggcatcaatcacgcctagcgaataaccacgctcccccagtcgttttgccagaccgtcagccttgacagtaatctcctgtggacgattctcaccaatcacgcgaataccagcatcgatagccgccagaatctcgccgacatcgcgcgtcttggtggcagccagcaattggaccgaaccggcagcacgcccggctgcggactccgctgaggcaatccggtcaagcacgcgatgcacaccatcagtaatctcttgtgcgcgcgcctgatcgataacttcgttggcgagatccttatggtccatgtatgccgtcattgctgcccctgttcgtagattccccaccatcgtagtctcatacgcgcacataatgcttgttattgaacaaaagtgaagcccccgctgttcatgcgcgggggcttggtgatgctaggccgagcgagtgggactagcaggtaccggacttgcggcgcttgaggatgattacacccgcaacagcaagtaccacggcgaggatgccaacaccaagcacggctgcaccggtgtcaggtatcttcttgtgcttgccggagtctgcatcacccttgttctggttggaatcgttgccttggttgggcttgtccgtgccggaaccgggcttatcgccaccctggccaggcttcgtggtgctcttctcaaccagacccgcgatggcatcgctgattgcctcagtcgcagcctgtacgtcagactgggcggcctgaccatcactcgtcagcgcattcgccgtagcgactgccgaatcaagcacggccagcgattcatcagtccactttgtgcgatccacggcagcagcggcatcgagctgagcgctcagcgcggcacgatcttgcaccgtagctacaagcaccagcttcttcgctgcctgcttcagctgggttgcggcatccaccaccgcagcttcggtggcatcctcagccttatacacctgctgcgccgaatccaataccgccgcgtactccgcccatgaagtctcggtgtacttggaggcatcgtcagccttaggcgagtcagcgagcgcctgcttgagctcggtcttgtcgatcggtgtgggctcaggcggctcaggcatactgtcgtcaatggcatgaacctgccattcggcaacagccggagaagccgagccggacgtgataaccatacgcaacttggtagtcttgaccggagtgttccacgtgccatcagaccaccccttggcatcgccggtggcccagccagcagacggtgaattggcggtcacagtgtaggtggcgtcgggaatatccacgaagttgccggcaccgttgttcgccaaggcgtcccagtactgcaattcccacgatgccggaatacccaatccgccatcatccgaggtgaattgcacgcggctagagtcgatagtcacttcacggtcccactcgtagtcgaggcgcatctcaccggtgttgggccaagtgccccagacatcctcgttggcaatggtgatatcgggaatgatcttgccgtcgttcaacgcggcggcacccttgacccagccggatgccttgccgtccacatcggtggcggtggcatcgccctcaatgtagccggtcagcggcacggaagtgtcggatggaatgtcggttttcgccgaagcggacacgttgccggccttatcggtggcgcggtagtacacggtggcgcgcgacgcgctcggtgcagcaatcggcttgctgtacgtggcccattgaccgtctgtgccaatgcggtattcaattgatgcgacaccggaaccggtgccgtcatcagcggtcaaggtcagcgtgcgctcctccttatcggcggcggcggtcacggttggcgcggcggagtccaccttgccgccggccttggccacgtcggaaacgttgccggcctgatcggtggcgcgagcccacacttcgacatcgccctgctgggaaagcgtggcaatggccgcgtttgcattcgcggcgatggtggtccagctcttgccttgatcagcggaaatctccagcttggcgataggtgcggtgtcgtccgtggcctgcacggtggcgaacggagcggtggtgagccactcgctattgcctgcgttagcagtaacggcaacggttacagtcggcttcgtggtatcagcggcaggctggtagccgtcctgcacggtgacatttaccgacacattgccctgctcgcttgcctcaccgggcacgccggcgaccacgccgtaggccgtaaacgaaccgaccttggcatacgaggaagcatcaactggacgccaaattactggggaggcaacagttgggttcccgtacttcacatccactgtggccggcagagtaggcgcagtaccggtggcggtggtcacgctcttcggcgcagtgattgccggcgattcgctggagtcggagccgacttcccattcagcaacggccacggaggcatagccgccatccacagcttgaccggtcgtgtcgagctttaaggcagtagtggtcaccgcatcgaaggtgacggcgttggggttggccttgcctgtggtcgttgtataggcactcgggttggcgacatccttccatgtgccgtccgcgtccaagtactgaatcttccacgaggcgggcgcgcgcagagcgttggaatccacgtcgaaccaaaccttagacgagttgacgcgcacagtgccatcccattggtagaccagagaatcgccggactgcgattgcgggatagaacggtagttggtccagtgattcggcgggaccacagcggtttgcaacacacggccgtcgttcaccgaacccttccaagcaggcgtttcagtgaacgtggcgctcacctttgcgtacggagccacgttggtggagggctgcgttttctcggccttggttggatgggcggtggaaaccatctggccgtcggcggtccaatcgacttcatcaatgcacacggcacggcggaaatcggtgccgccttccttgtcgccggtgtgataggtcacataccatttgtcgccgaactggagcaccgaggggtgcatcgtggtggccgagccagaaggcacgattacgccttggtacttccatgggccgagcgggctgtcggaagtggagtactggatgcaagcttgatagttcgattccacgcaggtggccgtgcccgaaccgggcttaccgccgtcgtacacgttgtaataggtatcgcccttacggaacacccacgccgcctcgaagaatcccttcgggccgttcgcgttgctgtccgcgtccttcatggtgtggaggttcggcgtggtgccatcagccttggtttccacctcggtgtatgaggtgcggccggttgtggcgtccttcttcatcttgatggcgagctgagtgccgaacgtaccaaagtgcaaatatccggtgccatcctcgtccacaaagaatgccggatcgatggtttcaatctgggtttgcgatgtggtgagcagcggcttgccgatggcatccttccacgggccgagcggactcttcgacttggccacgccgatggcgaacgggtcctgtccagccgcctcagaagccttgtccttcaccggcacgtagtagtagaaccaatcatcggaagtgtcgctcggggtgccgttatcgtcggctacgacttggccggcgtacgcgccatcgccggtggcccagctgaacaggtctgccttggcgatggtcttgtaatgtgtccatttgccttgattcaggccgtcttcatcggtgacgtatacgccccagtccttcatgttgaaggagccgtagtcgggcgaagcctcatcgtgaccggtgaagacgaagagtttgccgtcatagctctgcgcggatgcatctgcagagtagtagttctgcgaaagatcgttcggggtgtcaataccctcgttctgcccgatggggttgcgcatgtagctgggcagtgcgctattgtcgatttgggtgacggtgacatcaggattgttatacggcagttcgttatacgcgtgaccggcaacgctgggcgcgttgtcagcggtggctgaatcggcggccattgcggtcggcgcaagggcaaggcctgacagcaatgtcgctgcggcgacgagtccaccggccaccgcgcgaaccgattgcgcggatacatggaaactcatagtgctcctcattgagtgagtgaaaagagtaatgatgggtagaaggaaaaggctagagccccctctgtgagggggctcactcggcagaatgactccgttgcgggtcaggccgagtggcgagccgaaccgtggtcgccggactggcgacgcttcaggatggtcacgcctgcggcggtgagcagcacggcagccgcagcaactacggaaaccgcggcaccagtcggaggcacacgatcacccttgttgtccttatcatccttatcagtgtcggtcacaccaggctgctgggagccgggcttctgctcaaccttggtggcccaaaatgccttgtcaagggcatcctgtgcggcatcgacatcggcctgcttggcatccttgtcgtcgtacaccttctgagcggcggcaatctggctctgcagagcctgccatgcctcctcggtgtacttcgacttgtcagccttcttggcctgctcgatggaagcctcgagggactccttcttcaccgtttcggcggcgggcttctcttccaaggccttgacggccttgttcagcgaagcggacgcttcctggacggcggcctgagtgacctcaccgacctcaccgaccttgagcacaccttccgcagcctcgatggccttgttcaaggcctcgacactcttatccgtgtacttgccggaagcggcctcggctttggccgcatcgatggccgcctgcaacgtggacttctccacgtcggtggcgagcgcaacgagtgccttctggccgtcctcgagcttggtcacctgctcggcgacctgttctgcggtggcgttggcatcgtcgtacacagcctgggcagcgtcaatgatttgctggaactcagcccatgaagcggcggtgtagcggcttgcatcgaggccgttggctgtgtcaagagccgactcgagcgcggtcttgtcgaccggggtaggttcaggctcggtgccgtcaataccatgcacgccccactcggccacggcggccccgaaggtgctgctgccggtgtgcggagtgagcacgagtcgcagcgacttggtggcgaccggcttgaaggtcacagtgctccaacctttggcatcggtatccgcacgagaagccggcgagttacgcacaatggtgtaatcctcggtgggctcgacatccttccaagaaccatcctcggcgaggtactgaatcttccaagcgtccgggacttccagaccacccttcgaatcgtcagtctcagcgaagttggcccagaactgggcgcggctctggtcaacggtcacggactgaccgaagtcgtactgggcgtacatgccgtcctttgccttgccccaagaaccccagaccttgtcgttgacgttctgatcatccgtggtcggccaagtatcatcgacgactacgccgtcgttgagcttgccttcggccggtgaccaggtcgcctcggaatcaggcgaaatggtggtcttggtcgccttgccttcaatccaaccgaccaacggctcaggctcaggctcaggagtggaggaaccgttcgggtcggcaaccacgtggacagtgagcttggcagctgcggaagacgaaccgtcgtcgacggtaccagccacctcgtagtcaccaaccttggtcaggtcgatggccttgatgtcggcatccttccacgtgaccttgcggtcgtcgttgtatccgttcgggaacttcaccggaaccgtggcgggcaggtcgatggacttggcgttctggtagacggtctgctcaaccggctgcgcattacccacggtctgcaatgcggtatcggaacgagctgcgatgtgtgcaaccgtaccgctcagcgcaccagcgacgatgcccttgacatcgaatacggcatcggcggccagctgagcgtcggtcaccttatcccacgtgacggcgaggtcacggcgagaaccgtcggtgtatacggcgctcacggtggagggcagcttcagatcatcggccttggaaccggtctgcaccagtcggttgacttcgtccacgctcaccggctcgatggcgtacgcctcgaactcggaagcacccacgatggcgcccttcgggaagaccacgcgcagcttgtcggtttcgacggtgtcggcgaacttcacttcgttgccttcgttctgattgaccgtgtaggactggccgtcagccagcttcacatcctgccagttaccgtcagcgtcagcgtactggagcttccaagatgaggccatcggcacgccaccgccatcggtccagaagaagaccttggccttcttcagtggcaccttgccggcccacttcagttgcagccacggctccacaccagtgttgtcgccccagttgttccaggtctcgttcggcgtgttggtgtataccacctgaccgtcgatgaccttcttggcgttgtccttcggctggtagccgttggtgtagctggcagaggcgctcgactgcggggctacgttcacggtaccgtcagaggggatgccgtgaacggtgatttccttggagccttccttctcgccatcggaagcggtgagcttcagaacgtagtcgccttcctcgttgaaggtgacggtggtgctggcagcagtatcgtccacgaacttcgcggtaccgccctcggggccggaaaccagctcccacttagtggtgacgtcgccttctgcgggcagaccgtcatccttcaccgtaccgacgagcttggcaccggatgaggtgctggaagacacgtaagcatccacctgcggagcctggttctcggaagtgccgtcagccttgataccggtgttgtaggcttcgatctccttgacaccgacggccatgccggcctgcggcgtgaaggtgacgcggatagtcgtggtctccaccggagtgaactggatacggttgtagttcgcgcccgcgtagttcggggtgcgcacctgatccgcaatcggggcccatgtgccgtcatccttctggtactccaacttgtagttggcgggctcggcatagccggagatggtctggctggacgagctctggtagaagtacaagcggaggtcgtcgatcttctgcttgccgtccttgaacttgatattgagcgtgtcggtcttgttctcagaacccttggtaccccagaacgattccatcacggtcttgccgtccaccgcgttcttggccgggtagttggtgtccttctcggcgtaggtggtaccggtcacgtccgcgtccttggccacattcgtggtggacttggaagcggagtcgacgttggcaccggacttggcgaacaggtcggtcacacgctggtcggcggtgaaggcaacctggttggcggccttgatatcagaaccagcggcattggtgatggttacgccggccttgtcggcatcctcaacggtgcccgtggacggatcgtaaatgaggtgtgcgagcttgtcggaagtgaaggcgagcttgccccccacgtacaggctgtagccagcaggtccaccatagcggctgccgtccttatcccacacgatggaaacatcttgaccgtggtagctcaggttgttcaccgtgaagtagttccagccggggatctcaatcgggttcagctcaatcttgttatcctcgcgcggcaccataccggctacgtcctcgaccatcgtccagttcgtggtgccgagctgggtgtggtggatccaggagcggtaggtgatcttgccgccgttctgtgcggcgtcaaggttcttgtcgaggttgttgatcacgccgtcaccgtttacatcgccgacgttgttgttatcctcgttccagaactcgttttgatcaaggtagttgttatcgccgccctgatagtgcgcgaacgccacccagtacagcagtttcttgaactgctcattggtgatgtaaccgttcttggctgcatcgtaattgcggatgccggctgaatagacctgcagcagcggctgtgcgttgataatggagaagttgttggaaccggggaagttcagcgccgccttgtccgcctggttggcggtgaagaacgggaagatcgggaactcgttggaatcctcgaacaggcgcagagccttgttgtaatcttcgttgccggtaggcatcaggccttcggagtacgggtagtagttattgatctccttgtacttggcgaaagcaccgtcgttcagccacttgtgcttgagcaggttgtcggacttgtcccacagttcagtggtgacttctttctggatcttgtcggcgatggcctgcatcttctcggcgttggcggtatcgccagcggccttgtaggcctgagcagccgcattggcgttggcccacatattggcggaaccatcggcgcgatccatgcgctggccggaacgacccggctcagagaaggaaacggcgtcggcatcgttaccggtcatcgaccaccaggaccagtcaatcaagctgttgtcattgttgttctggttgtcgttgttgtccggctcgctcttggaagcgagtagaccttgcacgtcctcggcaccctggtcggccagctcctcggccacggtggacggaccgccgtgcaccttgtaggagtcccagccggcgcgcgtgatgtactgcgtgtagctatggttccagttggccgggtcgcccggattgtcgtggtagtagtaatagcccgccttgctcttcttggcggtatcgccggcggaaagccaggtgccgtaggagtactcggggttgcggaaccacttggtgtccatcatgaacatgccggaggtgagcacgatttggttgttgtagccgagcacaccctcgatggaggtcgggtactggaaggtgttgccaggcatgttggcgtcgagcatgttgaaacggctcagccaccagcggtagaccacggtcttatcgatattgtcttccggagtgtccacgtagggagcgttatcgacccaccacttgttgtaggtggtcacggaatccttgtaggaggcggcagcatccttaaggtcgccggtgtaacgggcctcatattccttggtggagtcaggcagttcgttggcgatcaggccgagctgaatcttgacggtctgcggttcgttggccttgaggctcaacgtgctggtgagtttgccaccgctgacgatccagttggaaccgtcctggttgttggcggagaagcgcggatagatggtcgtcaggttgttcttgacgttcacgcggccagtaagttcggtggcaccatcagcaccctcggcggcgaacggcgaggccgtggtcagtgtgacatcgcggtcctgcgtgctttccacggtgaggttcgcaaccatcacgttgttgtaggtgatgtacttgacttccttgatcttgaggctcttgccaccggtctggaacagggaggtgaagtagctcggcgtctgcttgcgctgggaggcgtcttcgttaagggtctggtttgatccatcagcgtttacggtaacggtgaagccgctcctgctggtctggtcccagtaggcggtatcacccacaaaaccgagctgattaggcgtgtgcgtgtacatgtaggcggcgcgaccacgggtgaacaggtagttgttgccgtcggagccttcatacgagtaagcacccttgtcgttcgtgcctttaccagttggctgtgcaccagtacgggtgagaatcttatcgatccagaagtcatggtcggtgtcgatgccggccaggttcttcacgtcgttatcgaatgtctcctgcagatagctgacggcagggttatatgtggtgttgttcgccgccgtcttcatcggatcatcagatcccttgaacgacggatatgccacatccgcattcttgatgacgggcgcatcggctgcctgcgcggtgactgcaccgccggtggccagtgtggcgaccgctgcaaccgcgccgattgacgcaagccaccgctttcgtgttgattgatgcattcctgcttggacctctccgccccggtctttcgcgtcttcgctcaggctacgtcgcatctatgagaccaggacttcttctgtggatgctgggccgcagagcccgttctccgtcagtttcctttattggctattgggttcaccggaatgagtatcttcagtgaatctggtgtgatatccgccatggatatcacggttggagcaattcaccgaagctgattccacatcataaccgagcgaatacggtttcgcaactttccctcagcgatatcaaccatcttatacaacaaaaacccggcaatttctcagttttcgcatttactttcgcattagagcattgctgcgtttcgccgtgtcgcagtacctacggcgcgccgattcagcctcgctgaatcaggaaccaacaggctcccgctggcgggagctggctcgcaaagcgagactgagggtggcttacacggtaccgcttatgaccaccctcagtcgactccgccgacagctctcacagcgggagcatataattaaaaatctcctgcacgggtattaccccacacaggagacctcattccccggatgtgttttcggctccaatcgatactgacatccggcctatgccgtcatcgacttattgcagacgatggcggcataagtattattttgccggccagttgcgcgcaggccggcatatcgccgatatttatcgacgctggaagacacgcatctcgcctatctcgcggttggcccacgagtagtacggcaccaagcgcagcgtcgcgggctcacccgcacgcggttcgtcggcatccacgtacagcggcgcgtcatcctcgtcggcgtgctcgcgcactgccggcaaatcaacggtatcgactccacccagcaagtcggcctggaaagccacagcggcatccgcaccggtgacgccatcggccagacgatagttccacaaatcaccgggattatcgacctgttcggcgcagtagaccagcggtccgcgcatcacggccacctgaccggcatcggagcgcacgcgggagttggcgcgcacgaacttcacggacatgtcgagctcgagcgcaatctccaacgtatcgccggcgttgaccacaaggtatacgaagccgtcttccagcgaacccactgcgggcttgccgttcacggtcagcgtgtaggagccccgcgaccagccggggatgcgcagtccgaaacggaccgagctgtcagtggcgctggcgggcaggctcaccgtgtattccacatggccatcccacgggaagttcgaacgctgctcgaccgtcaggccggaagcgaattcggctgtgttggcgatgaactggtggctcagcacggtcttgccgccgtcgcgctcggtgtagatgtagcggtccacggaggcgatgagtcgggcgatgttggccgggcagcaggcgcagccgaaccagtcgacgcggtgggagagcacgtggtgacggtccgggttatccagtccgtcaggcgtggtctccagtgcattgacgtagtagtactgcttgccgtcgagcgagatgccggcaatggaaccgttgaacagttccttctccagcacgtcggcgtattcgcccttgggctcgaggtcgagcatctgctgggcgaacatgctcatagccacggaagcacaggtctcaccgtacatcgtgtcgttcggcagatcatagtcgtaggtgaacgactcgcccacgtgggtggaaccaatcgcgccggtgacatacatacgacgggtgacgatgttcttccagaaacgcttggcggtgtcgatcagtccccgatcgccgagcagtcggcccacatgggccacaccagtgcacaggtagccgacgcgcacggcgtggccatccgcggtctgctggtcgcgcacaggttcggcggcctggaagtaggtgggcttgtagaagccgaggtcggggaagatgttgtcgccgttcagggccttcagctgcttggtgtagaactgagggtcttggccgcgcacgtcgatgaggtattgggagagcgtcaggtaacgcttttcgccggtttcctcgtacagtttggcgagggcgagttcgatttccgggtggccgtcggcgccatgaatcttgccttcttcgggcccgaagttggcatccaggcagtcggccatcttcttggcgacttcaagggcctgctcgttgccggtcacctgatggtaggcgacggcggcttcgatgtagtgacccatcacatacatctcgtggctttgctgaatcaggctgaagcgcgggcggtcggcccatacgccggacttgatctggtacggagtgtccaagtagccgtccggctgctgagcgcgggcgatgagatcgaccgtgcgatcgcacagcgccttgagttcgggatccggatggtaggccagcgcataagcggcttcctcaagccacttgtagacgtcggaatcctggaacaccatgccgtggaattcgtcgtccaattcgccggcggcaaccttcagattggcgaccgcgtggcttttgctgtcagccagctggttaccggccgggtcgtcgggcactgtggtgtcgatttcgtcgttcatcacgccccactggtaggggatgacggattcgacaatctggtcgcgacgccgcttccagaacggggaagtgattgtaacgttcatgatcagcccttcacggctccagccataaagcccttgacgtagtacttctggagtgcgaggaacaggatggcgcagggaatcagcaggatcacgacgccggcctcagtggcaccgtagtcgataacacccatggtctgctgacgcatgttcaccatcgccagcggcagggtggacttggacgaagagctcaagtacagcggaatcatgaagttgttccatgcttcaaggaaggcgagcaggccgaccgtaaccatcgaaggcttgaccacaggcaccagaatcttgaacaaggcctggaggctgttgcagccgtcgaccatggcggcctcttccatgtccttcgggatcgcgtcaaatgcgttacgcatgatgaacgtgctcataggcagctggaacagggtgatgactaggccgacgcccagcaggctgtcgttcagaccgatgtccttgtaccagaccatcagcgggatcagcagcgaggcgtacggcaccatcaggatggacaaggtgaccatgaagccgaggttacggcccgggtagtcgaagcgggagaacgagtagccggccagtgtgcagacgaccacggagaacacgaccgcgaccagggtcacgattatcgagttgaacaggtacttgggcagaccttcctgataaccgaacagggtcaggtagttggccacgccccagcccttggactgggccgaaccggcctgcgggctgaacgagcagatgatgacccagaccagcgggctgatgaagatgatggcgagcagagcctcaaggattcgagcgatgacgcgcttccacaatggggtagtcataatgtgttacctcccctttctcacttggtgttgtcgcgcatgccgcgcatctggatggagttgatgatgaccagggccaccagcacgatcagcgagagcgccgcggccatacccagatccttcttggaatcgaaggcgaagttgtagatgagctgcaccacggtcatggtggagttgttcggaccacccttggtcagaatgaagaactgatcgaaggcgaggatcgagccggtcacgcagtagatcaggcacatcacgatggtcggcttcatcagcggcagggtgatcgagcggaagatacgccaggaaccggcaccgtccatgcgggccgcctcgtacagatcaccggggatggcctgcagaccgatcatcatcagcagcatgtagtagcccgagaatcgccagacaatcacgataatcgtggcccacagggccgactggccggtggccagcaccgaaccgccctcctgcatcaggcccaacgagctcagaatcttggtgacagggcccacctgcggggaatacagtgcgtagaacagcagggacgcggacgccaggcccgtcgcggacggcagcaggaagcaggtacgcagcacgttgttccacttcgagctctcctgcacgatcatggccatgcccaggcccaggaccagcaggaagaccgtgacgatcacggtgtactccaacgtgaaccagatcgagggccagaacaatttgttctcgaacaccttgacgaagttgtccgggaagttcacgccgcggttgccgcccagcaggctccaacgcgagcaggccatcaccaccagcagcacgatcggcacgaagaacaggacgacgatcatcaaccagtccggcagcgagtacaacaggccgcgacgcgtctcggccgccttcgccttggacttatgcacgggcaccgccccggcgctcttggaaacactcgacatgtttctctctcctttggggaataactgtgaaatggtagtcacggaatccgaatgcaatccgatgtcagggcttcgaggaaggaggactccgaagccccgccaacacaccgcattcaagaggtatgtaatgatgaaggaagaaaaggaatgaagaagaagatagaagttcaattatgtggttgagccggcccctgccctcacaaggaagggaccggctcaatctgtccagttgttattcagttattgctgtgatttgatgagcgatggtgaggagcatcaccaccgaatcactgggcagacaggacgtcggtgacggccttgttgtcggccttgaggtcaccggaaccccacacggcgttctgcacgagcagctgccacggggagccagcggcgttgaaggcttcattgaaggccggggacttcggggtctggccgttgccgtcgatgatcacggagttgatggtctggatgcgcgggtcagcgtcgttgtaagcggtcttcagggtctggatgttggaggcggtgtcgccccggtcagcgaaaacttccttctgagtgtcagactgcatcagccagtagaggaagttccaggcctgagcaacgtgcttggagtccttggagatacccatggcatcgccaccgaggaacgtggaggtcttgccttccttggtgcccgggatcggagcgacgccgacctcgaagcctccgtccttctcagcatcgaacagagcagtggtggaggtgttcgggtaaggcatgacaccgatcttgccgttcgcgaacggagcggtccaagtggcaccggtctcttccttggagcctgcgcccaaaccgttggtggtgttggccagttccttgtaagcgtccagaacgcccttcatggagtcgttgtccagagtggcctcggagccatccttgttcataacggattcaccgtcagcccacacggacgggaagaggtcgaagaccagagcaccaccggactgaccggcgaggtaggaaccggcaacgccatccttgttgagggcggcgaccttcttggcctgctcggtgaactcagcgatggacttcgggccctgctccgggtccaggccagcttccttgtacagggccttgttccagaccatcacggaaacatcggtgatgaacggcagggtgtactcggtgccgtccacggtgccggcctcaatgtggccctgctgcaggtcggccttgttgtccagaccgtcgatctgcttggtgatgtcagtgaagatgccctcggaagcccagtacggaatacggaccacgtcgccggcgaggatgtcaggcagagagtcggtctgcgaagcaccgccgaccttgccttccatatcgtcgttcgggatgatctcgagcttgacctggttcttgtggctcttgttgtaagcctcgaccacgttcttggcctgacgctccagcggggaacgggtccacagggtgatctcggtgccatcgtcggtgcccttggccgggatgccttcggcggtggcggtaccgccattgccggagccaccacaggcggccagcggaacaatcaacgcggcggcagcgatgccagcaagagtacgggtcagtttattgaaagacaccatgttcgcttctttctctatttatccgctcaactatgagaggcggtggcggacggtccgcctccttggtcttcgccctgctcgctcctttgctcggaacaggtaacactgcgaaagccttttctcaatataaacgaacatcgccatttttgcaaaaacgctttcgcactttcgcatattttcgcatatcgaacaggtttgatatgcattttgcgcgattgtttgactcaaacaaacacttatttttagcgctttcttacggcgtgtcgccaaaagccaacatattcgaacgtgaacacaacgctttctttcattctcttttcaatcgcacaaaaatgatcactgcgccacgccaaaaaaatagacttgcgaaagttttcgcgtcatgtctacaatagaaaacaatacaaaggggtatcggtacaatcactactttcgcacgaaagagtgcagcaatatactgctgagaaagaaacgaggaatcgaggcattatggcccagacattgaccggacgcgcggcacggctcgaagacgttgccgctttggcgggagtctctttggccactgcgtccaaggcactgcacaacaagccccgcattagcgaagaaaccaagcagcgcgttctggacgccgcccgccagctcaactactcccccaacaaactcgcccaatccctggcccgcggcaccaccggcactatcggcctggtcacctccgatctgcagggccgtttctccacaccgattcttatcggcgcagagaacgagttgcgagcacaatcgacctcagtattgttggccaacgctcgtggcgacgccgcgctggaacgtcagcatgtcaagaaactgctgtccctcaaggtcgacggcctgctcatcgtgcagtgcgaaaccaacccccggcccacgcttggccatgactggggcgtgccactggtctacgtctacggcccctccaccgatatcgaagattgttcggtcacctgtgacaatgtggacgccgggcgcatggccatcaaccatctcatctcttgtggtcgccggcacattgccattatcggtggcgacgaaacctataccgccgccaccgaccgcaccaagggtgcggtcgaggcactggccgagctgggcatcgaaccggccgggccaatccggtacggcaagtgggacgaaggttggggccgcgccgccacccgtctgctgctcgatcagggcgtcacgttcgacgccgtggtctgtcaaaacgaccagctggccagaggctgcattgatgcgctcaagcagcagggcctgcgcattccggatgatgtcgctgttatcggccatgacaactggtctgtgctgacctccagctcgaggcccgcactgacgtcgatcgacaatgaaaccgagaccatcggccgccgcgcggcacgatacttggtcgatgccatcgaaggcaacccccatcacggtgtcgactacgtaccctgccgccttatccagcgcgaatccaccctcccgctggactgatatcaatcgataccctaccgcttcttggttttgcggccctttaagtagatgtcgatgacgatccatacgccgagggcgaaggccacgacgtagcccatgaagccgatgaccggaatgccgaagataatcggcttcatgccggcgtagtagacaatcg

SEQ ID NO: 3573 - DNA, 4185 bp, Unknown
  R85_18m  MAG No. k141_24738
ctggtcggcggcggtgctggcgtcggcagcgttggaacgcaccttggcggagaaccagacgtgcgggttgtcgccttccttgatgccggcggtttcggcggcggtgaccagcgtggccttggtcgactgggcggccttggtggcccacgggtcgtaatcggcgccgttgaccacggccaccttggcagtgccgaacttggcaacatcctggctggtgggctcgtaatcatgcgcctcaacgctggtcttggtcatgatgttggtgacttcgacgttgctgccgccgaggtcttcggccacggaaccccactggttgatggaggcgacgacctcgatcttgccggaagacgcggcgctgctggaatcggacttgttgccggcggcattgctggaaccgcaggcggccatcgagaacagggtcgccgcggcggccgcgatggcgagcgcgcgcttggcgttggacatgatggacatgattggattttcctctctaattcggctgtttggccgggcgatgctgctgttgctgcatcatcgcccggcccccaacacgacagaataacatgtattgagaattattatcatttgcatttacgtcggtgtgttgcacgcgcacacccgcgctgccggcggaaatcccgcgccccgacgatgacaacgcgggatcccgccgttttcggcagacgaaacggcagtatccccgcgtccgaacgatacccgcgcgggggttctgccatttaaggcctcggaaacgacagaaatcccgcgccaccttcgttcggacgcgggggttctgccgtttgccgcacatgtcacaacggcatcgcggcacagaccgacgcctgcaccaggtcgacgagccccacggtgtgggcatcctcacagaccagcgcatcacgcaaggcgattgcacggatgatgtcgcggcaggcgcactccccgtctgtatccaaatggcgtgccaggcaaccggcaccaatgaccggcaattcgagcacgcacgaggcctcacggatcaggcgggagaccactacgccggtcgaacgctcgtcatagacgccgttctcctcgcccatgccgtacaggcacaaacggtcgtcgtcaaagaatcgctcttcgaattcgtcaaggcctacggcattggccaccgcacccacgaacatcgactcaccccactcgttgagacggaaggaatcggccagatactgcgcgaccggcgtggcctcaaggcccacaggcagcgagaccagaaacgcgccggcccgcccttgcagcgatccgagcgtccgttcaaggtcatgtttgaccgtgcagctcatgcagcacccctcgagcccgaacgaatcggactcgccgaacaccaccccgcttgcctggggcttcgcgacgttgcgcacgatatcgagaccggattccacggcttcgttcgggcgcacggcataagcaatcgagcatacggacgggaaggaatcgaccaacgagaacgccacggagtccaggctcaggcggtcggcgccggtgagcagcaccacgggcgtgcgcccctccgcgtttccctgtgattgcaatgccggatgaatcatgacagcctttctgatttgataatggttatcattatgatatagttgcaggcatgtccaaaacatgtcaaattctgggaacacgcgccggggtcggcaaccgcgtctcccactcgcacaggaaaacacgccgaaccttcgccccgaacctgcagtccaagcggtactgggtgccgtccttgcagcggcacgtcacgcttaccgtgagcgccaagggcatcaagaccatcgaccgcatcggcatcgaggcggcgatcgcccgcatccgccgcgatcagaacgtcaactgaaccggccacggcatcacccccatgctcgggcagtcagtaggcccgccactgtgccggcgcgtaaccgcgcaacaaaccgcgctaacgagctgcatcacccacatggcaccgcgacgtacgcgacatacgtgacataacagcgtgacacccacacatagaaagcaccactcatggcaagcaaatcctccgcaatccgcccggtcatcaccctgaagtccacggccggcaccggattcacctacaccaccaccaagaatcgtcgtaatacgccggaccgtcttgagctcaccaagttcgatccggtagtccgcaaacgggtgctcttccgagagacccgctaatccatctgttcgttcattggacaccagtcgcgaggcgaggaagaggcttaagcacccgccgaaatcgtttccttgttggcattccggcggtttcctctatcaccatttcatgaactcatcttccgaaccttgcggcatgcgcccaatgaacgaatgcactcgtcccagctccggccggcgcgattcccgcaccccggagccttatcaaggagccggacatggccaaaaccagtaagatcaaccgacaattgcagcgcgaacgcatggtcgccaagtatgccgaacgccgcgccgaatacaagcgcgacagcgtcaaccctcatctgaccgccgaagaacgcgccgaggcgatgcgcaagctgcaggccctcccccgcgacgccagccccacccgtctgcgcaaccgcgattccatcgacggccgcccgcgcgcctacaaccgcaagttcggcctgtcacgtatcaatctgcgtgagaaggcacacaagggcaaactgcccggcgtggtgaaatccagctggtgatcgggccggcacaaccggccgtcaggccgtctcaggccatctcaattcaccggattccacccgtgcgtccgacgccattctcatccatatcaccacacaacaccacacaaccaaaggtccataaccatgcaagagggcatccaccccgaatacggccccgtggtcttctatgaccgctccgccgacaagtacttcctcaccaagtccacactggtggccaaggccgtaaacctgccgaccatcgactgggaggacggcaacacctacccgctcgtcaatgtggaggtgtccagctacagccacccgttctacaccggcaagaatgtggtgatcgacgccgccggtcaggtgcagaagttcaacgctcgttacgggcgcaagtgattcgccgcacattccgcaaagaccgtaagacaagaagaaaggaacggacatgaaggtcaaggcatcggtccgctcattggcccgcaaggatggctcctatgtcgtccgccggcgcggccatctgtatgtaatcaacaagaagaacccccactggaaggcgaggcaaggctgatggcactgcccaagtacaaggcgtcccgagcaaacacgcattcgcgccgagccaactggaaggccaaggtgcctcagctggccacggtcagaacgcctgaaggcgaagtggttcaggttccgcagaatctggccgcagccgtacgaaaggggtatatgaagccataaccaacatcgtggattccgcaatccatcaagtctcgtaacaacaactcgacggtccgctccacaggccggcggcgtacgttctttctcccatttccttccgtatgccgtcacctgccggggcgaaccgccgttttatgaggccaccgcatccgatctggccaagctcgccaaggcagacatcgtggtgctcaacggcgccggctacgacggctgggcggaaaaggcgcagcttgacaagaaacgccagaccatcgtgaacgtgggcggcctcatgggcgtcaccgccaccgacgagcacgagcattcccacgaccacgccgagggcgaagaaggccgccatcaccaccatggtgctacgaacccgcacctgtggttcagcccggaagccgtgctgaaggccgccgaagccatcaacgccgtctacgcggacaaggccggggccggttctgccaccgccgccaccgtgcaacgtcacttcaacgacaggaagaaaccctcaaggaaatggacaactggcccacgtattacccggcatccatgagcaaggaggaagtggccaccgagatgctggcccaccgattcgccatcggcccaggcaaccatgtgcaaagttccccgcatatcgatgtgtaccatctgtatgcggggaactcgcatattatctcgaccactatcatgcgtacggtgctaatatgacggcgatatggcaggtgatattcgcatgaaa

SEQ ID NO: 3574 - DNA, 11235 bp, Unknown
  R85_18m  MAG No. k141_25216
cggtggcccggatggctcgggctcatggaacgcttcgggctgacgcgctccatgagcgcgaagggctgttcgccggacaacgcggccgcggagggattcttcggcaggatgaagaccgaggcggtctaccccgagaagtgggaggaacacacccgcaacgaggtgctcgccttggtcgatgagtacatacgctggtacaaccacgagcgcatcaaacagtcgcttggttggatgagcccggtacaataccgtcaaagccagggaatggctgcgtgattatctccaagaaaatgtccgcagccccttatcccctaccccttgtggcatgattggtggcggtgagatcaatgacgagtccggcgaaacgtcaccagtcccgacacgcggatttatttggcgaaagacatctttaatgagccgcaagcgctaggccaacacttgcggctcacattatagataaaactagtccggctttaccagacagatttggttatctaattattgttattactctttatgggaggatagccataatatacggaaccgtaatgcggtgaagaagtattgtactttgataacgcccgagattttgcgcaaattggttgagggcctgagatagagacatggcccgtgtcctgtgtacgattttctgtcgccaaacaaaacaaaccgcgattggaaacgagggcacgaagccatgtcacagcagattctacaggtcgaccaggccatgttggagaccaccctggaccggatggtccgcaaaagcgtcgaggagaccctgaacgcgatgctcgacgcggaggccgacgagatcaccggcgccgcgcgctacgagcgcagcggggagcggaaggcctaccgggccggccactacgagcgcgacctgaccgtcaaggccggcaagatgagtctcaaggtgccgaaactgaaaggggcggtgttcgagtcggcggtgatcgaacgataccgtcggcgcgaggagagcgtcgaggaggcgctgatcgacatgtatttggccggcgtctccacccggcaggtcgacgatgtcagccagctgctgtggggcgaccgcatgccctcgcagaccctgagcgacaagctcaagaaggtatacgccgacatcgacgaatggcgtggcaggcccctcgaacaggattacccgtacctgttcatggacggcgtgtggcacaaaaggtgctggggcgggtccgtggagaacgtgagcatcctggtggccgtcggcgtcggtatggacgggcggcgcgaggtgctttcggtggccgagggcatgaaggaggactcggaaagctggcgcgaattcatcaaaggcatgctcgcgcgcggcctcaagggcgtgaggctggtgacgggcgaccggtgcgccggactggtggcggctgtgaacgaattgctgcccggcgcccgctaccagcggtgcatggtccacttcgaacgcaacatcctcgccaaggtcaaccccaaaaacagggactgggccgccgacgcgctgaaggccatattctccatggaatcgagggacaaggcgctggagaaggcggaatccgtcgccaaggacatggaggcgcggaaactgagggaggccgccaaatgcctcagggagggcatcggcgagaccacgacctacctgctcgacgactacccccgcgagcatcgccgccgcatccgaacgaacaacatgatcgaacggctgaaccgcgagatccgccggcgcacgcgcgtggtcggcagcttcccggacgggcgcagcgcgttgatgctcatctgcgcgagagtccgctacgtaacttccagcgagtggtcgacgcgacgctacctcgacatgtcaaggctcggtgagaacgtacagtcagcgaactgatcatcgccacggggacgggcgaagaccaaagtgcgcaaaaactcgggcactacctgtactttaacaacgtgtatgattctgcctcgccaactttactgctgccactagcaattgaattccaaatttttgaagcgaaagtagaacagttgttaagatagccccatctatcgttatttttaatattagaattcactgtatctaaatcaatttgccttaagggtaattgaatggaaacattctgaagattaataccattggaattaagcttcgaataaagattgagccacagacccttatattctctactgacatctacggattcatcccaagtgcttgctgttatagatttaccatcagcaacgttaatcccagcaatgtctgccgtagaaccagacaggtttgtgatcataagccaagaatgaccgagattcgtgaaactagatgacgagccggatcctgtagtagaataaatccgcagtaaagctacagcctctgcagcgcacgttttgtaattagcaccccgagaaggagatgagataattctcagatcttcgttatctgaggctttctcaagatcttccagagaagcattagacggaaagctggatagggtaggactcctatagggagtttcgatagattctgctgccgacgcatttactgtcacagttccagccaatattacagatactagagcagtgacaatttgtttgagtttctttatttatttctcctttttgtcaggaataaaatagtttcgatagcaccagcagcgacaaggaagggaaccgctcgtaaaaaataaagatatgaaggaaagctagacacgtattctggatgcaggtagtcaaaaataaagccgcttactgtgcgtaggagtccggcacacactaggagacctgcaagaatgtggcaaattcggcacatattgactcgattctcgaactgcggaggagtgagtcctattgtagtagggcttgccggagaggccaggcccagttcaaggagcggaaggcttgcgtcgctcctgcggaatcgacgagaaagtgttccagcctcctggtgaagagccacgagcaccctgcttggggacccgacatcatcgatgtacgacatacggcatctacgacttcgcccggttcgtgcagacgcttgaaagagcgagggtcatacaggcctcgtggaggcgcgcgtcttctcctttgtgggcgtttgggtttttctggtggtggtcttgatggactggcgtgtgcctctggaatgatgatatggaggtttcattatatcgtccgccgtctggctgggttgcattcgcgggggattggcgctattctgtaacagcgaaataagctggacttcgttcggttcgctgaggccattccgtggacgcggggtggcctcagtgctttcatcgctggattgggggaggtcggatccatgtcgttgcgcaagccctacaggagtgtgaacgaacagctgcgcattctgcgctcccgtggcatggccgtcgatgccggtgcgggtcatgtgctcaggcgcgagggctattatccgatcgtcaatggctataaggatttgttcctcgaccgaaaggcatgcctgaccgctggtgatgaccggtacggaacgggcgcgcgtttcgatgatctgtacgccctgttcctgttcgaccgtgagttgcgtgaactgttgttttcctccatcacacgggcggaggccgcgctcaaggcagtgtgcgcgcatgagttcaccgggctgcaccccgacgaggtcaacccgtatctcaatcccgactattatgattccaggtgccgtccgagcgccatggcattgatcgacaaggtcttcaagcggatacttgagttggacggcaacccgcgcaacaggggcgactatggcggcaaggcgtatatccgccattgcatggaagaccacaacggccaggtcccgttgtgggtgctggccaacgatctttccttcggccagacggtatggttcttccaagtccagtccccggccgtccgattggcggtcgccgaaagtttcaccggtttgtatgcggacacgcacgacaggccacggcgcatcaccatcaagcggctggacagcatcttcaacagactggtgttctaccgcaacctgtgcgcgcatgacgagcgctgctattgtgcccggtacgatgggcgcgctaacgagaacgtgtatcaggccatcggtgatcttggttatttgcttgacaaggacgattacttggaattgttcggtcgcttctccgcattggtcgcacgggtgacctccaccatgccatcgcggagccaagcgatcctgtctgccatgggtgtgcgcgaacgggaactggccgacagggcggaaatcatactgcgcagctgaccgttcctgctattgggacggtggcgtcgcaggcggctttggaccatgagccagctgatctgggctgtctgcaatgggcctgtgggattcgggatggatttggatgccattggcggctgggacggttgcacgggctgcgtatcgttctgtctattgtccgccatggagacatgctgccgggtgaatgcttctgggcaccacccatgcggaacatcatgaaaccacagggggtattgcgcttttccgtgccggtcggcgaagacgctgagcgccggcagggtggtggaacgttcccggattattcttgggtgcctgtaggtgcctcgtggaaaacgagcgtaaccggcaggtttcccaaaaattgaaaaccttggaacaaagccaaaaacgaccacatgcgattatcatcagaggtgcgcatgatgatggtagtcatggtcttaagtgtctcatgggcttgagaccgggtggtgatgcctgattgcaggaatgtgggttgtgattaggggcatggggtagccgaccaccaagattgagaccaatgcattgggtaacgatgcggcgagcggttccggcattctgccgttggaccgtgactgagatgccgtgttcttcgataatttgtgtcacgttggccctgtagatccagttctcgccacagtaagcgcccgatgtctatttagaggtgcaacacccctgttggtcctgcaattctagcagttcgtcggcgaatgcctcggcgggtgtccggtagtccagcacgcgcatgggacggttgtcggcctcgtcgacaatctcccgcagttccccggccatgtccatccggatctcgctgcgttcgggcagatgccggcggatcatgccgttcctgttctcgttgcttccccgccgccggctggagtacgggtcggcgaagtacgtgtccatgcccggctcgtcgcgcaggcgcgtgtggcgggcgaactcggtgccgttgtcgtgcgtgacgccgccgcgcgcgccggccggcagcggcgagaacatcgccagctgcgccccgacgctttccccggcggtcttgccgggcacgatcccggccatgaggaacccagtcttcctctcgacctcggtgtgcaggttgcatccggcgccgatcacgccgtcggcctcccaatggccgaaaccgctgcggccgccggcctccggcggacgctcggagatgggaacccgtccgggaatcgggaaacgcaacgtcctcctgccgccacgcctgcgccgcctcctgtggccgcgtggaaggcagcgcgcccagcgctcacggcgatggcggtcggcgtagatccaacggtagacggtctccgggcacacgcgcatggcggagtcgtcggggaacaggacgcgcagcctgccgccgatgggcagcggcgaccagccgcaacccagctattcggccacccgcgcccacaggcgttcgcatgacaggcggtagcgcttgcacggtttggcgcgcctgcggtcggccttgcgctgcgcggggccggcgatggtagtatctgcccgtccacgggcccgtcttcagccgtttcggccggtacggccggtaggactcgttctcgttggacgggaaccacgtgttgcgtttgatctccctgctgaccgtcgaggcgttgcggccgggcatcagaccgatcctgcggatgctggtgccgttgccgatctcgatctggatgacctggcgttcctcttccgacaggtgcgaatatgctttccccataggtgcaacatcccttcagactggttatctggacaatctccaatctaacgggtgttgcactttcatttagacaacgggtgtacacaggcccgcaaggtagcgttgtaagtatgaagaaggactgagcccatgcgcattatgttcgtctgcaccggcaatatttgtcgttctcccatgggcgagttgctgctcacccgctacctttccggtaccacagtgcaggttgccagcgcgggcacgcatggcttgcccatgcaccagattgaccccaacagcgccctgctcatggagagcgtgggcatcgaaccgagtgggttccgctctcgacgcctgacacagccgatggccaagtcagctgatctgatcctgtgctttgaaaaggatcagcgcaaagacatcgtcacgctggcacccaccgctgtgaaatacacgttcctattgggtgacttcgccaacatgtgcgagtactgcgcacgcaacgggctggtcaagggcttgaccattcaggaacgcttgcagtcagtgattgactctgcttccattattcggcccatgcttcccgaacccgaggatattgaggatccgcacggtaaggagtatgcaaaattccgcactgccgccgagcagacaaacaaggcgctgcgcaccatcctgaccagcatgcgcaagcactaccgcgttgaggaagctccggtgcgccctcaaatcacgcggcagtatgcttacacggtctgacatcaagctgacgtaagacgtaagtattcacgtcattctcacgccggtttcatctcccgatacgatttgtccgttacagtggcatgctgttgggtgatgacagtgggagtaatgagtgactgattctaatattgccggcatcgccgaggcggatttcgggaaagccggcgtctcgtttgataatgatcgaccgatattggtcgattcctcagattttttgttctatgcggcgctcgccatgctgccgattgacggcacagtagcaggcccatacatgccgttttggacgccgctttctccgtggttgtttatggcatatgcggtagcgaactggcgtttgctgccgcaggtttggcaccgtttccgcgcattcttcctgtttccggtgctgttaatcgcgctgtctgcagtggattggtgtctggtagcattccaccggcttccggcgctggtgtcgctggccggcgtggctggggctctcgcctgcctgtgtgcgttggacatggcattacgtatcaagcgcttgtcttggcggcgcatgttggatctgctgattctcgtatattggttcgccttcgcagtcggcgtggtgcagcggttgtcaatcatgtttgattggacttccgtaaagaacttcttcattcatctgatgagccgccagtacatcagcagcacttcgcattggggcggtggccgcccgcagtttctgttcgcagaaccgagctatataggtatgcacctgttcggtgtgctgctgccgctgatctggctggtgcgtggtcgtgaccacaagcgtgcaaaccaactgcgcgtccttatcatggtattcgctgcaggctcggtgctcatgggtgcaggcgtgcgcgtcattcttgactcgattatcgcgttggtgtttgtgattatcgagatgaacagttggcacacgtggcgcggccggcttgtggcgttcggggaactggtggtcacggtcggtctcggcgcatgcagcgtggcagtgaaccatcggttgagctccatagccgagcttggctttgacggtgacggttcgttctatgcccgtttatggcagtcactgggaccaggtgcgggtgcgttgaagcatccaaagcagttgttgctcggctatggcgcaggcaatctatccgatgccacccatcagggtgccgatgccgcagtgcggtctctggaacgtctgggcctgaacgcttcggcaccgaagggctggtacgcacaagtgacaccagcaaacatgttcacgatgagcgcctacaccagctttttcgtggagttcggcctgattgcttctgtaattctcgtggtactagtgctgtggtggattagccataaccatgcctggaacaagaccactgtctgctggctgctgttgaccatatacctgtatgtgcagttcgaaggatatgccttttatgcccttccactactcctatgggcagtggctgccgtgccaaggcttaaatcaaaatgagaattctgatgactcatatatttggagtattccgatcatggtgattgtgcattggcttatttcggcggtttactcgaagttattcttgctcgtgtgaagaatagcctcattaagcccaatatggcagatacctgacatatcgcttgccggcatcgggatctgctattttcaatagattactactgatgcaggttttaataagtctggatacttgggaggctccactcgccggcagatcaaatctttcgcgaaggctggcgttagtcatcggcaaatagctgccattttctcgttgcgcgaatgagggggatcattaagcaatctggcgacatctacaagagaacttcctggattagtaaattcgatacggccatcgaaaatacagatcataggtccggtaccggtaatagaaaaatcttggtgaataagcatatttgccatcaattcacgaagtgccatatgcgggaacatcctcagggtgacacgtcgtgcaccttgaatgacttcctgctcaggcaacagtgcttcgacatattccaacgcttgatccaacttggcataccctgagaaaaaagttttgctgcgagatggggagattggtgatggaccatcgtaacgaataacgcgcaatgttttacgcgccacggttgggaaatcattgagatcgcgagcgaataggagagcaccaagattggtgatggcgtagtttcccgcatcttgggcgatgataagctgttcgctggcaagtaaatggagcgtctgttgagttgatgccgtttggggtatgtcgaattcttggcggtaccaatccacgtccagcttgtttttgcttttagatgcaaaagagaatcaaaagagaagcaaatggcaggcaaaagagattttgtgtatgccgccatgttctaagcaactcagagggcaagtccacagtcggtgcaaataaacaaggatgcactatgttgttccgcgttgccgcccgtgttgtggcggattggtgaaaaagcacgtattgggtgagctgctcagcaatgagcaacgctgtctgttgctcctctgaacacgaggccccaaatgcgttcaattgttgccgttaccagtcgtgtaaggcgtcggatcagagtggctgaaagggtgtttcgtaatgggagacaccacttttgctaggtatgggggtatcgcttactatccttttcataagtcttagtcactccgcagatacgagttgcagaggcgagttgcagggggcgcgagattcagcgtggtgtttgtcgctggtcacgttcctgttgcgattctgccggtgaagtcgatgaggatgagagaaaagaaagcctaggtaaattccatggctaggtgtagatttctagagtagattggtagcgggtgcggccagcagctacttccaaaaattgccggggaaggtgcggttatgggcagttctgagcttactaatgccgataagggccgttatatcagttttgtgggggttgtggcgtgagtggggtgtcggctgttcagcatgtgttcgttgtggggtcgaaggggattccgggtagttacggcggttatgagacgttcgttgatcgtctgactgagtaccacgagggtgagccggggttgagataccacgtagcgtgcaagtcgctgtcggagtcgggtgagttctcgtaccataacgcgcgttgtttccgggtacgggtgccgcagatcggaccggcgcaggcaatctggtatgacgtggcggcgttggcggattgtgtggcgtatattcgccgcaaccgtatcccgcatccaatcgtgtacgtgctggcgtgccgcatcggcccgttcacggcgcatttcgcgcgcgcggtccaccgtctgggcggcaaactgtacgtgaacccggacgggcacgagtggatgcgcgcgaagtggagcgcgccggtgcgcaggtactggaaggtgtccgagcggatgatgacgaagcacgctgacctgatggtgtgcgattcggtaaacatggagaagtacatccgcgaggagtacgcgaggtaccgtccgcagacaacgttcatcgcctacggagcagagggccggcggagccgtctggcggacgtcgacccgaagctcctggactggttcaggtcgaagggtttggagccgaagtcgtactacctggtggttggccggttcgtgccggagaacaactacgagaccatgatccgcgagttcatggcgagcaactcgaagagggatttcgcgctggtgacgaacgtgagcgacaagttcctcgaggagttgaaggagaagacgcatttcgaccgggattcgcgcatcaagttcgtgggcaccgtgtacgacagggagcttctgatgaagatccgcgaggacgcgtacgcgtacttccacgggcacgaggtgggcggcacgaacccgagcctgttggaggcgttggcgtccacggatctgaacctgctgctgggcgtgggcttcaaccgcgaggtcgcgcaggacgccgcgttgtactggtctaaggagcccggcgacctggccgccctgattgaccatgccgacgccatgagcccggacgagatccacgctttgggagccagggccaaacaacgcatcgccgacgcgtacagctggcagcacatcgccgaccaatacaaaaacctcttcctcggcagagagtagaaggaagggtgaaacgatgaaaatcctcgccattcacaacttccatcgttcgggttccgcaagcggcgatgatcaagtattcaagagtgaaaccagtatgctcgaggaacatggtcatgaagtaatccgttatacggtgtcgaatgatgagttcgacaaggcggacgcagcgggtaagttggccgccacgttcggaatgctgtggtcgtttaagaactaccgagcggtggtctctctgattcgcgagcatcatcctgacctagtgcatgtgcatacatttttcccgctgttgtcaccgtcaattctgta

SEQ ID NO: 3575 - DNA, 11204 bp, Unknown
  R85_18m  MAG No. k141_25234
aaccggcgcgaaatcagcgcaactttaccgcaaacttatcgagccgcgcctgaccgaagccggtatcgccatcggcatgacccaactgccctccaccagcccagccaacgcctcaatgcgtttgccggaccttatcaccgcctatcgcgaagcttttcaaaaggcaaacgtactagagaatgcgtattggaaaaactaaaagtagatacctaacagtatggcgagaccatcaatctcggacggcaaacccagcatcacgaatcctatcttgcatctcattggcaatagcaatacagcgcgcccgcgaaataccagctttcacaccgacaccagtcaaatccgcaacagtgatgttcttcccctttccgttcaccgaagtagtgtgctcgccgttgattccaggggtttccgttaaatcatatccaggcgacaatctccacgcttggcgagaacgatcatagagataagagaaattcttcgcatgatcgtcgcggtttccgatgaacacgttaaagcatatgagacggtacaaccgctcgcactcctctgcgctgttgcacacacgcatagtcagccgcatcaatagtccgtaatccaaattgggaatacgatgcgacgtttccagcaatccgccggcggaaatcatatgcaccttatgttcggtgccatcgtcatcccgcgtacggtcaaaccgccggacaccaaaatatccagaacattgcgctgatgcgaacagacgagtttccggcatatcaatgccgcactcgcgcgcaagtacagaaatttgatactcctgttctccgatattcgccgagtctacggatgaggggaatttgataatccattcttctccatcaacctcagtcagaattttcggccgcgcgccaccggacgagccaccaagggcaaaaagctgatccaaatcctcagaaaaatcagtttccagaagattcgcgcactctctcgctatatcgtccaagtcagtagctgcaacaccattttcaatgtccgccgctggttcatattccaaggctcccataccgcttgatcccacaatggacagcctcgtcaaggttccgatagagtaagggtctattcctctctgacgcagaagacaatccgtgagcaaacgcccccacccgtccggcatactgtcatcgaacgccccaaacaaaccatgcaatggatctcttttggcgacaaagaccccctcacgcaatggcagactcagcggacttatgctgaatccactggacaaccacgagctttcgtacgagaacgccactgtttttgccggcgacagtgtcagcgagccaacaatttcaccatccaaaaacacccgtacccgatcaaccgataaatccaacggcactgtctcgctcatcgcgcttccctctcccgcgcagcaatgacatcatcgatagttgcatagtacggctgtgaaaacagtgtctcaaaatcctgctcgcaactcagcgcaaacgcgatattgatgagcgccgtcaatgagatttcgtgctgctgctcgaaccgtctgattgagccaagactcacaccggattttctagccagagccgtttgcgacaacttatgctctttgcgtctggcaaccatgcgttcggcaatagcggccgaaacatccccaggcataggctcatccaacaaagaaaacatactaatatattagcaatttatgcctaaaaagccaataattactcatatattagcagttactgattgcggcaaattggtcacgggactacaaccggcgtgtcgcggtagccaccaacttgcgttcaagtggggttgaactgttttaatcgaattgttagcgttcacggccggccatgaagagacgacggtgacgattaatcatcaaggagtacacatgaagtatcgcagcgtcggcaagtcgggactgaagatcagcgaggtcgcgctgggcagctgggtcacggatctcaagggcacagcggccgagaacgtgaccaaggagaccgtgaagctcgcctacgattccggcgtcaacttcttcgactgcgcggacgcttactcgggcggcgccgccgaacgattcctcggcgaagtgctcaagcagtacccgcgtaaggaactcgtcatctccagcaaggtctacttccccaccggcgaatgcgtgaacgaccgcggcctgtcccgcaagcacattttcgaaagcatcgaccagacgctgaagaacatgcagaccgattatctggacatgtacttttgccaccgttttgacgagaccaccgaccttaccgagaccttgcgcgcgatgagcgacctggtcgcccagggcaaggtgctgtattacggcgtttccgaagagtggggttcggcccgcctcgaggaagcccagcgcattatcgaccgctacaacctgtacccaatcaccgtggttcagccgcagtacaacctgcaggatcgctatatcgagcatgagatcatgggcacctgccgcaagctcggcattggtatcaccacgttctccccactcgcgcagggtctgctgaccggcaagtatcgcaagggccagccgctgccggccggttctcacgtcacgtgggctgacggatctgcggcttcctccaacgggagcgattgttaagcgccgaaatcggtatcgccttgggcctcggcctgggcgatggcggtttcggcgttttttgctgtttgctcaatgacctggttgtatccggtcaaggccgcgaacggcatgaactgggcggcccgctggtgacgagacatgtgcggatgcttgcgcgaccggtggtgtggcaggttgatgatgtcgtcgtatgcatgggtttcttgcagggtcatgcgcgatggcctccgatctgacggttgcgagcctgaccggtggcaccgtcttccatatccatggctttgatgacggcgttgcggccgaatttacgtttcacatccagcaacgcacgctggatatcacgctctcgagccaacgtctgtgcggcggcatcgtccccacaagccggcatacgcccgcttccgtcgccaccggattccgtgctatcacagtcatatcgcatatcgccatcatcaccgaacaaatcaagctgctcatagcgtttgcccgccgccagttctttgggcgtggccacatcatcggcaacaactgtgagtcgacgcaccagcaaccgcgcatccacaatacgctcgtacagcatggtcatcgcctcgcgaatacgtgcggcagacgacgtaaaatcgcccaatccaatcgaccccacggccgacttaggcacccgacgaccgaaacggtcaacggtcaccggcccttgataggtctttgccgcgcgttcggcggcacgcctcatcgcccggtctgcgcatgaatcaagcttcgaagcatcgagactgccaatgtcatagccgaccgccagtgtcagccgattcgtcatcacccccttatcgaccagatcgagggcgagcgcatcggccatctccttggcgatcagccgagccgtatgccaatcggcgggcccggtgagcacctgcccgctgctgatgctgtgcgcacctggctcataggatcggatatccgcgatttcgcacggctcccagccccacgcatggtcgatgagcagttcggcattgacaccgaacatgcgatacagcaggtcttcgttgtagtaatccgaagcacgacccaccgagcatcgggcgatatcgcccatggtcatcagtccggcatgctcgagcttcttggcatagccgcgcccaacccgccaaaaatcggtgagcggacgatgatcccaaagcagccgacgatatgacatttcattcagttcggccacgcgcacgccgtccttgtcggcgggcatgtgcttggcgacgatatccatggcgactttggccagatacatgttggagccgatgccggcagtggcggtgatgccggtttcatcgagaatttcgcgcacgatggttcgcgccatggcatgcggccccatacccagcgagcgcagatatggcgtgacgtcgatgaacacctcgtcaatcgagtagacatggatgtgctcgggtgcggcgtatttgaggtagatgccatatacctgcccgctgacctccaaatagtgcgccatgcgcggcttggcgatgaccatcgaggctttgagtctcggcgagcgttccaggtcgcgcgcatcgcaggactccccgattaatcggccgccgggagcatggaccgcgcgctcgatgttgactccattcaggcgctgttttacctcgaatagccgcgcacgaccgggaatgccatagttcttcagcgagggtgagaccgccaaacatattgtcttatcggtgcgggtttcatcggccaccaccagatgcgtggtcaacgggtcgagtccgcgcgccgcgcactccaccgaggcatagaaggacttgagatcaatggcaatataggtatgctcgcgttgcgtcgataccgttccgctgcccatcgccatcacctccttaccaccgccggcccgaccagcatatcaatacggtcgaacatttgttcgatacaacatgtctgttcgaagctgccgaagtcgacgcacgcaacgcgcccaagcacgctcttcacccacaccacacgcgcagcggcagagcagcggcatgcatgcgtaccatggggaatatgaagaaaagcattacggcagacagcgattttgcggcgtgggcggcagcccgatcccagaaaacgaatcgatcactggcaggagcccgcctcgcgattccggagccgcaggagcatgccgaaatcaagtctcaggcccagcaatggggcatgaccgtcgaagatgccacgatgaccgacgggcacagcgaggaattcctctgtgacggcacacaaagcattgattccattgccgacatgcgcacggcaagtgggctggaggcaatggagtacgcggaacagcacatgccggtattacgcgacaccatggatgacctcaccacccgcgtcgatttctcaggcattcgtattgccgtctgcctgatactggagccaaaaaccgcgattctgctgcgcaagcttaaggccgccggcgcaatcgtcggcgtatattgcggcccggattccacggatccccgagtggcggaacagctgcgccgggaaggaatcacggtcgaatccagccgagcctggaccgcggaacaggcgcacgaggcagccctgcgcctgctggacaagatacagccgaacatcatcatcgacgatggtgccagcttcgcccgtctcgcctcgctcgaacgccccgagctcacggcgaatctcattggagtggccgaggaaacgaccagtggcgtacgcgcgttccagcagatgcaggaagcgggagcgctcacctacccggtcgtagccgttaacgacagtgtgctgaaaaccggattcgacaacgcccacggcactggggagacatgcgtgaccaccatgcagcgcattctcggcgagcatgcattcgacggcaagaacgtcaccgtcatcggctacggcccggtcggccaaggcttcgcacggcgtattcgcgcgcttggagccgaagtcaccatctgcgatatcgatccagtggcttcactcaaagcggtgttcgacggcttcgccgcacaagacattgacgaggcactcccttgcgcggatatggtggtgtccgccactggcgtgagacatacagtcacacttgagcacatgcgcgcaatgcacgagggcgcggcgctcgcagtgatcggcggcatcgccaacgaaatcgccttggacgaggtaagcgacttcaccccacaggtcaacagggacaccgcgcaactcattgttcccgacggaccaacgctcacgctaatcgccgacggcgatggcgtgaactacacggtgggaggcggcaatccaatcgagatcatggatctgagcttcgccgtacaggccagcgccgtcgcatatcttctggaacatcgaggcacactggatcacacgcttatcagacttgacgcagcgaccgaccagcgcatcgccgccagcgcgctcaaggcgcgcggataccgagccagccatgccgtggaggacaacggctacgattggcgactgaccagattcgcggaaaacgaccgagagaacgccgaccgatagccatagacacggcaccgaacacaacgcagcgaggagaatatgaccgacaacacctggccgaccgtcgataccgagcttatcgatgatgtgacactgtattccgccaaactcatcatccccgtgacgggccccgtcatcatcgatggcgcagttgccatacatggcgaccgcgtggttcatgtaggtaaacgccgctgggtgctggaggcgctgaagcaggaaatgacgtctcacggcaccatccgtgaacggcattgggatggggtgctcacccccggattggtcaacgcgcacactcatctgcagtacagcggcatggtgcaggtcgggcaaggcacctacgatcggttccgcgcctgggaactggcattcaacgaggtgtacgccgaggcgcagaagacccagccatggaagcagtgggccgaggacggtgctcgccagatggtcgaatcgggaacgacggccgccgcagacatcgtcaccgatttggacgccgccggcgcgctggcttcgcagggcatgcacggcatcgcttattgggaggtaatgggctggcacaacgacgaatggatggaaaagggccgcaccgagctcatccggcagttgcgccggatgaacgaggagcagctgccgaacctcggcatcagcccgcatgctccgtatacgctggagtccgaaccgttcgttgatcttccagacattgctcgtcagctgaacatgcgactgcatatccatctggcggagaccccgctcgaggccggcacttatccgccggtgctcaccacttattcggcgtccgactggcgtgaccacgattgggaaagctaccggcagctcaaggacgtgggcaaaggtgcctccgccatccagttcgtcgatcagcttggctcgcttggcccggatgtgcacattgcacacggcgtgtgggccaatggcgaggatcggcgtattctacgtcagcgcggcgtgggcgtggcattgtgcccccgatcgaatcgcattaccaacaccggcaaagatgcaccggtgcgcgaatacctcgaggaaggcaatctggtaagcgtgggcaccgattcgctctccagcacgccgaccctcgatctgcttgatgacgtgtcgatgctttacgacctggcccgcgaacaaggctatgccagcgacgatctgacacatcgcctgattcgtatgatgacgctgggcggtgccgcctccatgggtatgcacgtgggccgaaaccgcattggacagatcaacgcgggcgcattggctgatttcgcgttcttcgacatccccgtcgacacatcatctccggccggcatcgaagaaacgctggaaacactggtgaagcacggcgcaggcacgaaccgagccacggtgatatccgggcgcgaagcctacaacaacgcctggtgacaccgctgacctgacctgatatcaagaagccaaaaaccagcaaacccgccaagaacaggagatctcattatgagcgtcgctttgcgagacatgagtccatacgcccggtccatagtggaacgccttggactggaagcccaccccgaaggcggctggtacacgcgtgactggcaatccccgcacacggatgaggcctcaggccgaccgctatcgtcactgatttacttcctgctgcccgagggagatgccagcgcctggcataaggtcgatgcggatgaggtctggctgtggcatggcccggcatcggtcaagctggaactcggcggcagcggcgagactccggaatccgacgaatccaagcgaaccgtaatcaccctgggttccggcatcaccaccgatcaggccgacgtaaccgtatcgggacatgcggtcgtaccggctggcgtctggcagcgcacagtgcctggccagggcgatgcgctggtctcctgtgtggtcagtccgggattcgtattcgacggcttcacactcgaacagtgaacgccatttcgctctgcgccaatatgagatatccgttcgcttacgcgccagattgcgcggctctagccggccataagcaatggagataaccagcatccgagaatatcgctgttttgtagtaacccaatagccatacaattggcgcgcatgcatcaagcacgactttgaaccgtgtgcatgacgaacacttgaggagaggaagcccatgttcaataagcaacacatcgtccgtaccattgcgtccaccgccagcatcctggctctgtcgttcaccgcagcctgcggttccggccagtccaccgcatccaattccgccgattcgaacgacatcacccagcagacgtacaagccgggcaagctgaccatcgccaccggacagccggcctacgagccgtgggttatgaacgacaagccggaaagcggtgagggctacgaggcggccgtcgcctacgcagtggccgacaagctcggtttcaagaagagcgacgtggtgtggacccgcaccgcattcgacaccgccatcgctcccggcgccaaggactgggatctcaacatccagcagttcggcatcaccgacgagcgcaagaaggccgttgacttctcgtccagctactacaacgacagccagtccgtcgtggtcaagaaagacagcaagttcgccaacgccaccaaggtatccgatctgaagaatgcgaccgtgggcgtcatggtcggcacccttgcctacgactacgccaaggcgaacatcaaggacgacatccagacgttcaatgatgatgccgcactggctcaggcacttgacgccggtcagatcgacgcactggtcaccagcaccgtggaatgcgtgtacatggtgcagtccgagcaggtcaaggacgccaaggtgctcggccgtctgcctgactccgaagacaagagcggcatgggcatcgtgctgccgaaggattccaagctgactgcagccgtgaccaaggcagtggatgacctgaacgccgacggcaccatcaagaagcttcaggacaagtggctggccgagtacaccaccgacctgaccgaactgaagaagtaagtggagtaggctcacatcataaggtcacaacaccttggccgggcgctgcggaaattttcctgtgacacccggccattccggcattcaggaagcgagcgacattcatcacatgaccgcagcaccaaccgaaaccaggcagcacaatgcccctgacggacacgaggtaagtcaggtcgagctcaaacgacgccaatatcgtgttcatcagcaaattcaatcgacgattaccagtctgatcagcaccattgtgttcgttgtggtcatcgtcatcggcctgaagctctcccccggctggccacgagtcaaggagaccttcttctccggcgaatacttcgtcaaatcgtttccccatgtgcttgacggcctatggctcaacatccgcgttctgctcgtcgcagtggtcggcgtggcgattctaggcacgctgatcgcattggtgcgcaccagccgctcccctattctgttcccgctgcgtatcctggcattgatctacacgactgtgatgcgcggcgtgcctattatcgtcgtgctgtatctaatcggtttcggcattcccggcctaggcttgttcggccgtatcgatccctcggtactcggcaccattgcagtggtaatgggatacagcgcctacgtctccgaggtgctgcgtgccggttttaacgacgtacatccttctcagcgagcctcggcccgctcgttgggcctgacctccggccagacgacccgactgatcgtcattcctcaggcattgcgcaaagtcgcgcccgcactgatgaatgacttcatctccatgcaaaaggacgtcggcctgatttccgtgctgggtgcggtggatgccgtgcgcgccgcacagatcgacgtggccagcacctacaacttcacgccgtatgtggtcgccagcctgctgttcatcctgatgagcgtgccgttcatcctgctgaacgactggtacacggaacgtctgcgtaaacgcgaactcagcggaggaacggtatgagcgaaataaccaatatcaacaccgaggcgagtgactcccccgtgagcaacaagacggtgctgcgtcttgatgacgtgcgcaaatcctttggaaacacgcaggtgctgcgtggcatttcctttgacattcaccaacatgaggtggtggctttgctggggccttccggttcaggcaaatccacattgatgaaatgcgtcaacctgcttgaacaggtcgatgacggccagatttggctgggcaataccgatatcaccgacccgcgtgccgaccaggacaagattcgcgcacgtatcggcgtggtgttccagcagttcaacctcttcccccacatgtcggtgctcaagaacgtgacccttgccgcaatcaaggttcaccactggagcaaggatcgcgccgaaacccgcgctatggaactgcttgaacgcatcggcatgcgcgataaagccagcgcctaccctgatcagctctctggcggccagcagcagcgcgtggcgattgcgcgcgcactgatgaccgacccggaactgctgctgcttgacgagatcacatctgctcttgatccgatgctggtcggcgaagtgctcaacatggttgccgagttaaagacccaaggcaccacaatcctcatggccacgcacgaaatgagcttcgcccacgaagcggccgaccgcatcgtactgctccgtcacggcgtcatcgccgagaacggcacacccgccgaggtgatggacgagtcgcaggatcccgagaccatcgagttcttcagccatttcaggcactgagacgaagccgaaaaacaaacaccggattcatacgacgaaaggccaaaatcctaagccactattcatactcaactgatctggtgcttaaaccgcgtccgcgaaccccaacaagttccaccaccccacaacacgcgatgtagccgccgattggtagggttggcagatagttaatcccctgtttgaaaaaggagctttggcttgtcggctgaactcgaagacattcatgaggaatgtggcatcttcggcgta

SEQ ID NO: 3576 - DNA, 11303 bp, Unknown
  R85_18m  MAG No. k141_25310
ccgtctgcgcttcgacttccagtggtccaaggccccggccaagtccgtgatctccgcagtcgaggagcgcgtcaacgacaagctgcgcgacaacctcgccgtgaccaccaaggaaatgaagttcgacgacgccatcgccctcggtgccatgcacctgttcggcgagaagtacggcgacatcgtacgcgtggtctccatcggcgaagacggctggagccgcgagctgtgtggtggtacccacgtggaccacgtcggcaagatcggcatggtcaacatcctgtccgaagcctccatcggctccggcgtgcgtcgtgtcgacgccgtcgtgggccagggtgcctatgacttcaacgctcgtgagcacgcgttggtctcccagctgtccgacaagctcaacgctcgcccggacgagctcgccgagcgtgtgaacgccctgctcgccaagctcaaggactccgatcgtcgcttggcctccatgtacgagtcccagctggccgcctcggttccggcgctggttgctgacaccaagaactccgcggccccggtcaaggtggccgtcaagaacgtgggccacttcggcgcggtcgacgccctgcgcaagaccgtactcgacgtgcgcgcccagctcggtgaagacgcccccgtggtggtggccctcgccggcgtgaacgaggatgacaagccgatggtcgccgtggccaccaacgaggccgcccgcaaggtcggcatcaaggccggtgatctggtgcgtggcgcagccaaggtcctcggcggcggtggcggcggcaagccggacttcgcccagggtggcggtgtcgatgcctccaagatcgacgaggccctcgaagcgctcgagcacgaggcgcagaaagcctgattccgccagtggtgtggttaggcgttgatttgggtaatgcccgggtcggactggcactgtccgacccggagcttacctttgcacaccctgctggcaacattcatgttgccggcgactatttctttgctattgacgaggtcctgaacgtcatcgaagacgaacatgtggaccatgtaatcgtcggactgcccctgcagatggacggtacagaaggcaaaagcgccaaaaaagcgcgcaggtgggcggccaatctggagaagaggctgcaagcagagagtgaagacagtgattctacggagtatcagattccgcaggtgtcattgatagatgagagattgacaacagtcagtgcgcatcgtcaactgttcgaggcccataaagcttcgaacaagcacaggccggtggttgaccagcagtcggcagtggtgattttgcagacggcactcgaccgtacccgggagcagtgaggtatcggttatgaccgatgattttaacgagttctttgatgacaacacgcattgggtcgaacaggggtcagaaccaatgcgcgggaccgagccgccagaaccgccgaaatcccgcaaggagatgcgcaagcgacgtgcacagcgcaagcgcaagcgcgtcagtggcattatcatcgctatcgccatcgtcgccctgcttatcggcggcggctatttcggcgtaaccaagctcatcgcatggcgcgacagccggagcaaccagtcgacggccatcgcggactatcggggaccgggctatggcgaggtcgaattcaccgtgagcgagggccaaggcgcggcggagatcgccgataatctgctcaaggccgaagtcatcaagtctactgccgcgttcaccagcgtggtcaacgccaatagcgcgacactctatccgggaacgttcacattgaagaagcatatggccgcatccgatgtgatcgccgttctctccgacaccaaccaggcggcgggcttccttgaggttcatcccggtgaacgtgccaccgatgtgttcgccgacgccgcgaagctttccggcatttcccaaagcgaattcgacacgattatcaagaacaagggtaaggatattctgcccaatgaagcgggcggtagctttgagggatggctggagccgggaacctacaacgtcaagagcatgaagagcgcttcggaaatcctcaaggccatggtcgataagcgtatcgccaagttggatgaattgggcgtgccgaccggcagtgaccgcgaacgggtgatgatcatcgcctctatcgccgaggccgaggtcaacaaagccgattactacggcaaagtgacgcgagtcatcgagaaccgtttggagcagggcatgtcgttgggcatggattccaccgtggcctatggcaataacgtcaagcccgcgcaggtgaccaccgagatgacccaggacgagtccaacccgtacaacacgtacaagatctccggcctgccgcctacgccgatcagcaatcccggcgatagcgccattcaagcggcactgcaccccgaaagcggcaattggctgtacttctgcacggtcaatctggacaccggcgaaaccaagttcgccgtaaccgccgatgaacatgaccagaatgtggccgaactacgcaagtggcaagccgaaaaccagtagtcatcccgttagcttccctcgccgaggggagctgtccgcaaagcggactgaggggagtaatacgggattaagccccaaccaccaccgccacaatcgcgcccgccaatatcaccggcacatacggcaccttgcccgcatgtgccggtgatgtgcgttgcgggtcgaatcgcgtccacaaggcaagccatgtgatgccggcaacgcccatcgccagccaccagaccaccacaggcaacaggccaaacagtccgacagacaatcccataggtatcaaggcggtcacatcgccgaatcccaatgaccgcggcaccagcaacgccaacgcgaactggatcaggcaacatagcacggtgaacaacagcgcctgcaacagcacgaacaggtcgttcgccaccactccatgcgcgaaatcggcggccaactggattaacgcgcccacggccacccatgcgatcggcacccgccgatgacgaacatcctcaatggacagtgcaagcccacatagcagaccgggtagcgtgaacaggtatggcatggcttaacattaacccctagttagacgtacacatagacgtacacacatgaaacgagggaagttatgctgcgttggcagacggcaggggagtctcacggagaagcattggtggccatgattgaagggttgccggccggcgtgcgcattagcacggacgatatcgtttccgcactggcacgccgtcgacttggatatggtcgcggtgcccgcatgaagttcgagcaagacaaggtccgtctgctgaccggtgtacgccacggcctgaccctcggctcgccggtggccatcgaaatcgccaacaccgaatggccgaagtggaccgaggtcatgagcgccgatgcactcgaccatgacctgccgcgcgaaggccgcaatgcgccgctgagccgcccgcgcccgggccacgccgatctgaccggcatgcgcaagtatggttttgacgacgcccgcccggtactggagcgctccagcgcccgtgagaccgcctcccgtgtggccttgggcgaggtggccaagcagttcctggatcaggcgttcggcattcgcaccgtagcccacgtggtggcgctcggtggcgtgcagaccaaccctgatttgccgttgcccacacctgacgatctggaagcgttggatgcctctcccgtgcgtacgttggataaagaggccgaggtccgtatcatcgaacgcatcaacgaggccaagaaggccgccgatacgttgggcggcgtgattgaagtgctggcttacggtgtgcctgccggcatcggcacgtatgtggagtccgaccgccgactggacgcggctctggcctccgcgattatgggcattcaggcgttcaagggtgtggagatcggcgacggcttcctggaagcctcccgccccggttcgcaggcgcacgatgagatcgtggtcaacgccgacggccgcatcgaccgtctgtccaaccgcgcaggcggcattgaaggcggtatgtccaatggccaggtgattcgcgtacgcggtgccatgaagccgattccgtccatccccaaggccctgcgtacggtcgacgtgctgaccggcgaatccgcacaagccatcaaccagcgttccgacagcaccgccgtgcctgcggcatccgtggtggccgaggccatggtgcgtctgactttggcgaagtacgcgctggataagttcggtggagacagtgttgccgaaacacggcgcaaccttgagtcgtatctcgcctcgtggccggagcacatgcgctgaacgaagtggagtatggttccgagacgactgccgcggaaccatcagcaactgtacccaccaatcgtcgagaggattcgtagattatgaccgcacgcccccgcgccgtcatcatcggcatgatgggagccggcaaaacacgtgtcggtaaggaagtggcgcatatgttgcgtctgccgttcgccgatgccgatgtggagatcgaacgtgaagtgggcatgaagattcccgcctacttcgatgaatacggtgagccggcattccgcgaggtcgaggccgatctcatcgccgatatgcttgaggatttcgacggtatcttttcgctgggcggtggcgctcccatgacgccatccacccagcatgccctcgcctcatacatcgaccatggcggtcgtgtggtctaccttgacgccgatccggcggaggccatggaacgcgcgaaccgcgggggaggccggcccatgctcaatggcaatgccaactcccgttggaagaaactgttcaagcagcgtgacccggtattccgcgaggtcgccaacgttcatgtccatacccgggggcttacgcctcagggcgcagcgaagaaagtgattgatatggtatctgagcgagcagtgcatgttaccggatcggcaattgagccgtatgatgtggtcattggcgaaggtgccatgaatcatctggtcgacgtgctgggacccaagcccgccaaaatcgcgcttatccatacccagccggtgcagcgacactccgatcgtgcccgcgccctgttgcgtcagggcggctatgaggtttccgacatcgtgattccggatgccgaacccggcaagaccattaccgtggccaacggcatttgggaacgccttggcaacgaaggtttcacccgatccgatgccgtggtggggcttggcggcggtgccgcaaccgatttggccggtttcgtggctgccacgtggatgcgcggcgtgcgctatgtaaactgcccgacctcgctgctggccatggtcgatgcctccaccggtggcaaaaccggcatcaacaccccgcagggcaagaacctcgtcggctcgttctacacgcctgccggtgtgctggccgacaccaagacgctggctacgctgcccaatgacatcttcatcgagggtctcggtgaagtcgccaaatccggtttcatccgcgaccccgagatcctgcatatcctcgaagaccacgcagctgaactgcgcgctttcgacggctctacattcctcggctcgccgctcgaagacgtggttgccgagctcattgagcgcacggtaaaggtcaaggcctaccacgtctcctccgatttgaaggagaagggtctgcgtgaattcctcaactacgggcacacgatgggccatgccatcgaaaagctcgagcacttccgctggaggcatggcaatgcggtggccgtcggtatggtgtatgccgccgagctggcccatctgatcggttacatcgatcaggatctggttgactatcaccgttcgttgctcgcttcgctgggtctgccgacgtcgtggaatggcagctcgttcgacgacgtgctcgcattgatgcatcgcgacaagaaagcccgtggcaacgaactgcgtttcgtggtcctcgacgagattggtcacgtcgtacacctcgacaacccgcccgccgaagccgtagaagaagcattccgtcgtatccagcagtaattgaacggccgtaggccgtgccgttcgccatcccctcagaaaaagtacttggctcccctctaacgaaggtgccccggagtcggatttaccttctacctccctctgatgagggaggtgccccgaaggggcggagggagagaagcacaaacaaaaggagtcccaatgaccaaagtcattgttgtcaatggccctaacctcggacgtctcggcgtccgccagcccgacgtctacggtcgtcaagacctcgacaccctgcgcaagctctgcgccgaatggggcaaggacctcggcctcgaagtcgaggtgcgtcagaccgacgacgaagccgaaatggtgcgctggatgcaccaagccgccgacgagaaaaccccggtggtcatgaatcccgccgccttcacgcactattcgtatgctctcgccgacgccgcgcacatggtcattgatgagaacctgccgcttatggaagtccatatttccaacccgtccgcccgcgacgagttccgcaagcgttccgtaatcagccctgtggccaccggcaccatcaccggcatgggtttctacggctacaagctcgcgctcgatgctgtggcgcacttgctgagcgaatagaaccaagccctccagccaatcccgggtatcagtcgacgttgagcccgggattcctgttccgacgaatcggaccagaatcctcgtcctggtacgccttatggacccgaagtacgccgtgtattcgaccatatgctggccaaggcagaacgagatgggctgcctacgcacgactacaccggccacgtcatgaacacgccgggtcatacacggatgatagagtgaaattccatggttagaagaacacatggtaattctcaagaacacgtcaccaagcatattttcgtcactggcggcgttgtctcctctctcggcaagggcctgaccgcatcttcgctcggtcgtttgctgcgcagccgcggtatccatgttctgcagcaaaagctcgatccgtacatcaacgtcgacccgggcaccatgaacccgttccagcatggtgaggtctacgtgaccgaagacggtgccgaaaccgatctcgacatcggccactacgagcgtttcctcgacgtcttcctgagccagaaggccaacgtcaccaccggtcagatctatcaggaagtgctgcgcaaggagcgcgccggcgaatacctcggccagtgcgtgcaggtcatcccgcacatcaccaacgaaatcaagtctcgtatgcgcgcccaggcttccgatgacgtggatgtgatcatcaccgaaatcggtggtaccgtcggcgacatcgagtcccagcccttccttgaggccgcccgcgaagtgcgtcgcgatctcggcccggacaactgcatgttcgtgcacgtttccctggtgccgtacatttccgccgcccacgagctcaagaccaagcccacccagcactccgtgatgatgctgcgtcaactcggcatctccccggacgccctcgtgttgcgttccgaccgcccgctcaaccagtccatcaaagacaagatctccctgatgtgcgacgtcgatgccgaaggtgtggtcaactgcgtggatgcgccgagcatctacgatgtaccgaagatcctgttcgaagagggccttgatgcttacgtggtgcgtgagctcggcctgccgttccacgatgtcgattgggatgaatgggcagacctgcttgagcgcgtccaccaccccaagcacgaggtcaacatcgccatcgtcggcaagtacatcgatctgccggacgcctacctgtctgtcaccgaggccatcaaggccggcggctttgccaactgggccaaggtcaacgtcaaatgggttgctgccgaccgttgcgaaaccactgaaggcgcggccgccgctctcgacaacgtcgacggcatcgtgatccccggcggctttggcattcgcggcatcgacggcaagatcggcgccctgaagttcgcccgtgaaaccaagctgcccgcccttggcctgtgccttggtctgcagtccatggtcatcgaatactcccgccacgtgctgggcattgaagacgcgaactcttccgagttcgagcccgattgcgccaacccggtgatcgccaccatggaagagcagaaggacatcgtggccggcaagggcgacatgggccacaccatgcgtcttggctcctacccggccgagctggaggaaggctcgctggtcgccgaactgtacggcaccacgcatgtcaccgagcgccaccgccaccgttacgaagtcaacgtggcctacaaggatcgtctgcgtgaaggcggcctgcgcatctccggccagagcccggacggcgagctcaccgagttcgtggaactgccgcaggacgtgcacccgttctatgtggccacccaggctcacccggagttcaagtcccgcccgaccaagccgcacccgctgttcgccggcctggtcaaggccgcgctcgaccatcaggcggcccgctgaccgtggatcccgcgcggtcggtccgcgcacgatgaaggcgtgacggcacggcatctcaggatgcttcgccgccacgccttcgccgtttggcgccatccgtgatgccgcatggcccgatggcgcccgcatgtaatcaagcccacagccaatatgcgtcaggacagctagtgtttgcacttgggttctgctaggttttcataggattaagtgtgatacaaggaaggcaggatggtgaccgaaaacacagcaccaaacgccgccgctgacgtggagatgagccagtatgtggctgatcgtacccgcgtcaacgaggacaagatcaagaaggatgacgagatcatcagccagttcggcgactacaactatggttggcatgattctgatgccgccggcgaagccgcaaaacgaggcattgatgagaacgtcgtacgcgcgatcagcgccgacaaaggcgagccgcagtggatgctcgacatgcgtctgcgtggattcaaggcgttcctcgaaaagcccatgcccgattggggtgtggatctctccggcttcaacgccgacgacttcaagtactacgtcaagccgatcgagaagcaggcgaagtcgtgggaggagctgccggacgacatccgcaacacctacgatcgccttggcatcccggaggcggagaagaaccgcctcgtctccggcgtggctgcccagtacgagtccgaggtaatctacaactccattcgtgaggacctgaagaagcagggtgtgatcttcgtcgacacggacaccgctgtgcgcgaataccctgaactcgtcaagaagtacttcggcaccgtcgtgcccccggaggacaacaagttcggcgccctcaacaccgcggcatggtccggcggctcgttcgtatacgtgccgaagggcgtgcacgtggacatcccgttgcaggcatacttccgcatcaacaccccggccatgggtcagttcgaacgcacactgatcatcgcggacgaaggctcctacgtgcactacgtggaaggctgcaccgccccgatctggtccgaggactcgctgcacgccgccatcgtcgagatcatcgtcgagaagcatgcccgcgtgcgctacaccaccgtgcagaactggtcgaacaacgtctacaacctcgtcacccagcgtgcctacgtgcgtgagggcggcacgatggagtgggtggacggcaacatcggttccaaggccaccatgaagtacccggcctgcatcctcgccgaaccgtacgccaaggcatccaccatgtccctcggcttcgccggcaagggccagtaccaggacacgggcgcgaagatgattcacttggcaccgcacaccagctccaccatcgtcgccaagtccatctcgcgcggcggcggccgctccgcctaccgcggtctggtcaaaatcgtcaagggcgcgtacggttcgtccaactcgaccgtgtgcgatgccctgctggtcgacgacttctcccgctccgatacctacccgcacgtcgacgttcgcgaagacgacgtttcgatggcccacgaagccaccgtttccaagatttccgaagaccagctcttctacctgatgagccgaggacttacggaagaagaggcgcgaggcatgatcgtgcgcggcttcgtcgaaccgatcagccgcgagctgccgatggaatacgcgcttgaactcaacagacttgtggaacttcagatggaaggatcggtgggctgattccgatgaccgacaacacaacacccgtcaaggaaatcaagattccggtcgccgaccccaacgacccgtacgcgattccggctgccatgccgtcctccgtggaccatgccgtgcgctcgttcaacgcaggcgactacccggagcccagccgcaagcaggacgaatggcgctacacgcctatcgagcgcatcaacgagttcttcaccgtgttcaagccttccggcgaaacgcagatcgaagtctccatgattgacggctcgccgttggccgaaggcgtgaagctcagccagatcaagctcggtgagggcctgtccggcactgtgtccaagcccaacgaccgcgtctccgcagtcgaatgggaatccggccacaccgcaaccattctggaactgtccggtgagatcgcccagcccgtgctcgtcaaggtgcacggcgcgggggaggacctcgacgccttccatctggtgatcgccgccgccgacaaggctcatgcggacgtcgtcgtggaacacgacggtgacgcacgactggccgaaggcgtggaaatcaccaccggcaaggactcgcacgtctccaccacgttcgttcaggaatgggccaaaaccgccaagcatgtggccaaccaccgcatccacgtcggcgaaggcgcatccctgcgccactccgtcgtgaccttgggcggcgacatcgtccgcatccgcatggatcaggacttcggcggcgaacagggcgacctcaacatgctcggcatctacttcgtggaccccggcgagcacatcgaacaccgcacgatggtggtacacaaccaccccgactgcaagtcccgcgtggtctacaagggcgcgcttgacggcaagggcgcgcactccacttgggtgggcaacgcgctcatccagcccaccgcccccggcaccgactcctacgagctcaaccgcaacctggtcctgaccccgggtgccatcgccgattccgagccgaacctcgaaatcgaaaacggcaacatcatcggtgccggtcacccctcttcggtgggccgcttcgacgatga

SEQ ID NO: 3577 - DNA, 30418 bp, Unknown
  R85_18m  MAG No. k141_25431
cctgattgtcgtaaagtgcgtctaagccgctacttatcagccatccggctccagtgccaatcgccgttccgacaaatgcgccgaccacggtgccggcaccggggacgatcgatccgacgaccgcgcccacggcaccgccaacggtcccaccgaggccatcaacggcaggcccgagaccctacgcggcatcgccctcggcttccgcaacctcgacaactacgtcacccgcagcctcctccacaccggcggcttcagacacaccatacaagcccacctataagcatcccctctacacaccaaaaccggaagagccggatgattccctgcaagccgatcacgccaatccgacccgacgactaatcagattgaggacggctgaattaagcttgtgccctcatgatacaacatgtcctgcgaccgacgccagacacaacggcagcattctgcccaccatagggcgtgtctttaaccagaaagtaccctcaaatacgttcagcaagatatatgcacgcagaacagcccttccgcattatcttatttgacatagagcatgccccttccattccacagaatcaagcaaataaacgagcggagagactgggcacaccgcaaaacaatggcccaacccctccgctcgtttgttatggaaggaagagggatgaataagtatgtttacttcactgacttgatgaagacgatcagcaccgcgccaatcagcgagcagaccgctgcaagcgggaagagtgcgtgatagcccaccgaggaaattagcgccgccgcaacatcccacgcaccatattcaggacaaatccagtccgttgttgtccttggctttgctcaccatatcagtcaaatcggggtcgtccacagacaccgcgttctgctgactgagcgtcaacgatagcgagccattataggagtcgccgtattcgtccttgccggacacgcttatggcaatcgaattcatcagacgctttctgccgtagttcagatccacggtgatagtcggcatctccggctcttcatccgtgccgaaatcccagttgcgcacattatcgagcgcctgacggtactcatcttcagcatcgtccacgccggcatcctcgatttgctgaatcacccaggatttcagatgcggatactgcgcttcatgactgatccagtaattcacgaaatgctgagacaacgctttgatatcgatttggtacgacagctgcgtattgccggcagacttggcagacgatgtcttcgggaacagctggctgcgcacattcttatcttccagctccacgccgaaatattgttggatgaatttgctggcctcggccttcacctcggcagacgttttcgtgcccttgacccggtcgatgtcgttcgagtacccatcgtcgttcatcttgtccagctgatcgtagaacgtttgctccgcgccggtgatgtcccaagcaccgttcttgaccaacgcatccttgacgttcaatatcaagtccgccacatcactaccaacgccgttccttaagtcatcttcatattggtcggccgggtagtagatgtagtaggggtcgtcgtcatgccaaacgaatttctcggcgaatgcgcctttgtaccaagcgaaggtcgttgcatattcgtctgttttgctagtgaaggacgcggaggattcgttggtggttttgcccagcgaatacatgccagacatccgcacgtcaagagaatcgtcagtgatgctgtgggttctgagttcgtatttggtgctgcgcagagtggacagcgagttgatcgcgtcgaaggtgacgaccagcggattggtgggccggaagcccagcatcgctttgacggcggtgaagttggggatgatgaacgccaaggccgccaccagaatcgtcgcaagcaatgcgcagaaagcggcgatcagcttcttgctggatttgcgctgcggtgccaggacggcggttgcatcagtcgcctgatatgcggcaggagcgggaatcggcaaagccggcaggggaacggttggtgccggctgtggggcagcggacgcggcgtaaaccgatggggcaaccggcgcggctggtatcgatggtggtaccgcagacgccggcacagcaggtgccggtatcgacgcaggcggtacggctggcgatgcggccggtactggtgccgtcgcaactggtgcgctgtctacagacgctccacatgccgggcaaaatcgtgccggcccatcaactctatttccgcagtggccgcagtacgccatcgtgtgcctctctccctcaaatcggtctgattgccatcgcttcaatgttactcttcagcattacgcctcagccagcccctacgcgtaacgatacgagacgcggcagccttaatgcggttgttttgacgcgatgccaacatcgagctctggccaacgttctggtactcggctacatcttgctgcgagccaagaagcaggccatcgctcgcgccgacgaggccgaatggcggcctagcctcgctttaagcctcaggccagcacctccatggggtgataggtggcggtgtggtggccggtgatggggttccatacccgttcggcgaatgcgcgcagacgggcgacgccctcgcacagctcgtcggcatctccggcgtaggagaggcgcacgaagccgcgcccctcctcgccgaaggcctcgccggggaccacagccacgcgctcttcgtccagcagacggtctgcgaattcaccggagtcaaggccagtcaggcgtacgtccacaaaggcgtagaacgcgccttgcggttcgatcagacgcaataccgggcatccggccagaccgtccagcacgatctggcgcttggcgcggtattcctcgcgcatggcggccacgttatcttgcgggccagccagtgctgccacgcctgcgtattgcgccaaggagttcaccgaggagtgcatgagttcggcgattttgccggtctgttcgatgaccgcttcgggtgccagcaggtagccgatgcgccagccggtcatcgcataggttttcgacaggctttccaccacaatggtgcgctctttcatgcccggcaccgcggcgatcgatggtgccacggctgcctctcccccaagcgtttccccgaacgtttccccaaacacgaacggatggtaaacctcgtcggagatggcccaaatattgtgctgcttgcatacttcggcaatacgcgccagttcggcggcagaggttaccgcgccggtcggattgcccggtgagttgatgattacggcgcgggtgcgcggggtgatcgccgcttcgatgtccgccgcgttcacgcgcatgccgtgctccggacgcagcgccacggtgaccgggcggccgccgcacagcatcacttcggcgtcataggaagtgaagaacggcgagggaataatcacttcatcgccggtgcccaccacggctttcagcgccagaaacaggccaatcgtggcaccgtcaacggcttgaatctcggtttcgggatcataagtaagtcccttcacacaggcggagtaatcggccacggccttgcggtattcggggatgccaagcacgttggtgtaccgagtgcggccagcctgtgcggcctcgcaagcggctgccacgatatgcggcgcggccgtggcgctgggctcccccacggtcagtgaaatcgcgtcaggcacgcgctctacacggtcgaatacgtctcggatgccggagcgcgggatattcagggcttcgtcggacaggctcgcgggctcggcggtcggcacagcaacccgaccggcagcaggcatagtagcaggcgcagcagcagatgcaacttcggacagagacatgttggaaaacttctgcatatcatccctcctcaatggaattatttcatcgttctcttatttcaaaaggaattattacatccaattaggactttaaacgtaagcattccaccacacaacagaaaacacaggaagaactactgaaattaccaggcaaaatcggaaagccatcgcattccggcaacaggtacagtgaacacagagcacaacgaacggagaagacatcatgaccgcgattgacgagaccgaccagcgcatcctcaccatgctggaggccgacggccgcgccacgctcgcgcaactggcccaggcgaccggactgtcagtctccgccgcccagtcgcgcgtgcagaagctggagaagcgcggcatcatcaagggatacaaggccatcatcgaccaagagcagcgcggcttgcccatcagcgcgttcgtcaacgtgaccccgctcgactactcagccgaatcctcgattccggacaagctgaacaatatcgacggcatcgtctcctgctattcggtggccggcgcccccagtttcgtgctggtggtgcgcgtggcttcccctaccgcacttgaagaactgctcaatctcatccaccgcacggtgccggtaagcaccgagaccacgatgattctgcagacctacttcgcacactgaccgcgaacccggtaacctgcgcgccgaagacctgcggccacacaccccacaaaccccacaggtcacaaaaaccatacgaccccacggtccagccacaccccacaaaccccacagaccgcacgatccccaacagacacatctgacatcacccaagtccgcctttatgtccactatatgaacgtgcctccggtgtgatgcggcttccatttcgacccgattcacgcatagacagacatccaacaatcgcccgaaaaatctaacaaacggaaacttgagccactccataaccacgccgaaagctttcccgttatccgagcgagactctatgcagcaagggcctgcgcgcatagaataaaaccgtcttaattccctagcagatcgaggagaatcatgctcactgacgagtacatcaagcgtgtctacgaccaggtcgttgcccgtgacggcgatcagccggagttcctgcaggccgttcgcgaggtcttcgagaccctgcagccggttgtcgagaagcacccggagtacgagaaggccggtgtgctggagcgcatcgtcgagccggagcgcgccatcaagttccgcgtggcctgggttgacgacgagggcaaggttcaggtgaaccgcggctaccgcatccagttcaactccgccattggcccgtacaagggcggcctgcgcttccacccgaccgtgaccgagtccgtcgtcaagttccttggcttcgagcagattctcaagaactccctgaccacgctgccgatgggcggcggcaagggtggctccgacttcaacccgaagggcaagtccgacgccgaggtcatgcgcttctgccaggccttcatgaccgagctgagccgccacatcggccagttcaccgacgttcccgccggcgacatcaacgtcggtggccgtgagatcggctacctgttcggtcagtacaagcgcatccgcgacgagtactccggcgtcctgaccggtaagggtctggaattcggcggctccctggcccgcaccgaggccaccggttacggcgtgtgctactacacccaggaagccctgcgcgtgctgcgcaacgactccttcgagggcaagaccgtcgtgatctccggctccggcaacgtggccacctacgccgctcagaaggctgagcagctgggcgccaaggtcgtcaccgtctccgactccaacggctacatctacgacccgaacggcttcatagtcgaggtagtcaagcagatcatggaagtcgagcgcggccgcatctaggaatttggcgagcgcgttccgggctccgagtaccacgagggcagcaagggcgtgtggaccgtcaagggcgacatcgctctgccgtgcgccacccagaacgaggttgatggcgaatccgcacagaagctcgtggacaacggcgtgaccgtggtcgtcgagggtgcgaacatgccgtccaccccggaggccatcgaggtctaccagaagaacggcgtgctgtacggcccggccaaggctgccaacgccggtggcgtggccgtctccggcctggagatgagccagaacagctaccgtctgtcttggaccttcgaagaggtcgacgccaagctcaagtccatcatggaagagatcgtcgccaactccctggccgccgccaaggaatacggtcacgagggtgacctgatgctcggcgccaacgccgccggcttcgtcaaggtcgccaacgccatggttgcccagggcgtgctgtgacgcttgcctctgagcagtactaagcagtagcgtaatgcccttgcttcccgtgaggaggcaagggcattgctatatgtacaacgagcaacaagtgctatccccaaatacgtaagcccgataacaactcagcttccacctccataaccccggaactcaccaccgtcgatcagcacatggatcagtgcggctggaccatggccgacgtggtcatcaaagccatcaacggagtctcttcaccgcgcgtgatgcacctgaacaccgatttggtggtgcgtgagtcggcgtaattgccacgtggctgtcggcaggactctagataccgcgtcacaatcacccagtaatgcatcacgcagtgtataactcttccgcggaaacgaacaccattcgttcatcatccatgtagcgggttcgcgtggactcactcaccggattcttggtgaacagcataagccacgcattacctgcctgatagccgcggactaagccagcacgctgatggagcttttcaatagcctccgtttcgttgaatgaattacgccatttgcattcaccgaacagaatcgttttatcgagcgaatccgcagcaatcacatcgatatcggtttgctcgtgagcaatcggatcattgccccaccatttgccgaactgagtggcaacaaaggggaggttgcccatagcgttgtttcgaataagccattgcaggcaaatcgtctcaaattgttgaccaacataggtatcaaacgctggtccaaaagcgagtctgctcgtaacctcctcgctgatattaccatccaaaatgctcatgttgcgccccacaaagcggaaccaatatgcaaagaagggatcgctcaccacatacattcccttgcgcgatttactcggatcttcaccaaacggcacttttcgctcaattaagcgcaaatcgaccagcgttttcagatatgctccaatcgaatcagatccgacacccgcatgttcagcgataagctttggcgaggaattaccacccgcaatagattgcaatatcgaataatacgatgccggttcacgaagctcctgacgcaacagcatcataggttcctcacgcagtacgcccaagttgtcgaacatcaagcgcagcacattggattcaaagccatcggcttcctgtatacgggccagataatatggcgtaccgccgaaagtcgcatagtattggaccagttcttgcggagatgtgttcgttagaaattttgccgcatccgcatagtcgaatggcaggagtcgaatctgtgctgtacgacgcccgtatagcgggcttttacgccccaatacgtcgttttccatgaatccctcgttactaccggatagaatcatcgtcacttttgtggcgaggaatccatggtcaattgctatctgcaacatggagggtaatgctggctcggcggcagctgcataagggaactcatcgaatacgaacaccatacgttcgtcagtctgtgcagcacgttcagcaacaaacgataacgcatcagaccacccgccaaacgacggggtggaatccggcataccaaagaacgacaatgccgctcttgagaaatcttcaagattcatcttggcgctttgctgtatggccgtgaagtacagcacgcgtttatctttgacaaattcgtcgatcaacgccgttttccctacacgccgtctaccgtacagcaccaccatttcgaacgaatcgctggtaaacagcttttccagcacttgtaactcgtgctctcgtgcgacaaacattgcagccctccgatccgcctaccgcccaataataagagtatcatggttaatgtaatcacgattaccttaattatgatactgataattgttgccctaccgcgaggaggatcttccttccgctgtcaaaacgaaagcccaacagtccagactgacgagcagcaacatcggcagatcaaccgctgacgccagccagcctgacagcacaaatcagcctgattgcaggcatataggcactagttagcgaaaccggctcttcgcattttggtgcgtaggggccgtgcggtttgattcggtgtgtgattgaaaaagtgaatgaaaccgcacggcccctacacgccaaaaccggaagagcccataaagtcccctcagtagcgccaacctgccagtcctttggcggaaccacaccacatagaccttcctcaacggcgccaagctgccacacgctggcagaccaacaccgctgtgtgcattctctgcgtcggcggcagtccaaaacttggcccagcaacgacgcttgctgtgcccagcgtcggcagagggccaagaattggacgcaaacgacacagaacacaccctcagcatcggcagaactccaagatctgtaccgctgacgacggtaagccctccacagcgtcgtcagagatacaaaacctgtcccaacaccgacgcctgccacccccagcgtcgccggagtcccaagtctcggcccagcaacgacgcctacgaaccccacacataagaaaccgcacctccgatcatcgaatctgaattacttcagtccaacaaccggggtgcggttcactgaggggagttctgccagtatagctatatcagtcgtcgccgagcgtgacatgcacgccgccgaccagcgagctgaccacgttgtagatcagtgccgcaatggtggccagcagggtgaagatcaccacttcaacaatcgagaagatggtgacgccggagaccacggtggtaagggacaacacgttcttgagatcgaaaccgcctgcatcaagaccggtggaagacacaatctgcgtaatctggctgaatacaccgaccacatcaagcagcacccatacgatcgcggaggcaacgacctgaataatcgccacggcgatggacagcatgaacgtcaccttggccacggaccaagcatccacgcgggtcagcgacaagctcatgcggcgagccctgggggcgctacggcgaggtgccggacgcacgggagtggcggcacctgaagaaggcaacgtggattcttccggatcgctggacacggagcgtgccacgcggggagcgtgctcagtaccgatcagcggctcgacatgatcgttctgcgtattgccgactgccggcggtatgatccggggctcgttgtcttcgagattctcgctcatcgtttctccttaacaggcttggcggtagcctctgctgtatgcgaggctaccagcttttcaggacgctgctcacgcctcgtccgcgttgttcacattctcgccggattgtgcggtctcggcggtgccgttcgccgcggcatcgccactgtcctcgggctcgtccttctcctcgttacgggcgatggagagaatcgtgtcgcccttgtcaggcttggcgaaggtaacaccctgggtgttgcgcccggtgcgcttgacctcgtccacgttggaacgaatcaccttgccggacttcatgatggccatgacctgatcgtcttcggacaccacgagcgcgccgaccagggcaccacggccctcgaccagttgcacggccttgatgcccaagccgttacggccctgcagacggtattcgctgatggcggtgcgcttggcgaagccctcgttggtcaccacgaacaggtccttgtcggagtcgccagggaccacatccatggccagcaggctgtcgtcgttacggaacttcatgccctgcacgccggcggtctggcggcccatcggacgcagctgctcgtcgtcggcctggaacttgaggctcatgccgagcttggagaccaggatgatgtcatcctcggcgttgcacagcgcggcaccgatgagctcgtcggcgttctcgccattctcgtcggccatgaggcgcacggcgatcaggccgccctggcgcggggaatcgtactcggccagcggggtcttcttgaccttgccggaacgggtggcgagcaccaggtacttggccacctcgtagttcgggatggacagcacggtctggatggtctcgtcgggcgcgaactgcagcaggttggccacgtgctggcccttggagtcgcgcgaaccctcgggcagctcgtaggccttgatgcggtagacgcggcccttgttcgtgaagaacagcagccaattgtgcgtggaggtcaggaagaagtgatccaccacgtcgtcctcgcgcagcttggtgcccttgatacccttgccgccgcggtgctgggcgcggtattcgtcggccttggtgcgcttgatgaagccggagtgggtcacggtgaccaccacgttctcttcggcgatcaggtcctcgacgttcatctcgccggagaacggcaggatcttggtgcggcggtcgtcgccgtacttggccacgatctcgtcgagctcgtcaccgatgatcttgcgctggcgttccggcttggcgaggatgtcgatgtagtcggcgatcttgcgctgcaattcctcatgctcggccacgatcttgtcgcggttcatgcgggtcagcgtgcgcagctgcatggccagaatggcgtccgcctgcacctggtcgatgtccagcagccccataaggcccgtacgggcggtgtcggtgtcttcggaggcgcggatgagggcgatgacctcgtccagcatgtcgagggccttgagatagccctgcaggatgtggtcgcgctcttcggcctcgcgcttcaggtacgcggtgcggcgggcgattacgtcgagctggtggttcacccagtggcggatgaaggcgtccaggctcagcgtgcgcggcacgccgtcgaccagcgccagcatgttggcgccgaaggtctgctgcagctgggagtgcttgtacaggttgttcaggaccaccttcggcacggcgtcgcgcttcaagaccagcacgaggcgctggccggtgcggccggaggtctcgtcgcgcatgtcggcaatgccctggatcttgccgtcgcgcacggcctcacgaatggagacgacgaggcggtccgggttgacctggtagggcagttcggtgaccaccaggcacatacggccgttgatctcctcagtgttgaccacggcacgcatggtgatcaggccacggccggtgcggtaggcctgttcgatgcccttgtggccgaggatggtggcgccggtggggaagtccggtcccttgatgatgcggatcaggttttccagcagttcctcgcggctggcgtccgggtggtcgagcgcccagtggacgccgtccgccacctcgcgcatgttatgcggcgggatgttggtggccatgccgacggcgatgccggcggaaccgttgacgagcaggttcgggaagcgggccggcagcacggtcggctcctgggtcttgccgtcgtagttgggcacgaagtcgacggtgtccttgtcgatgtcgcgcaccatttccatggccagcggggccatgcggcattcggtgtaacgcatggcggcggccgggtcatcgccgggggagccgaagttgccctggccgtcgacgagcatgttgcgcatcgaccaggactgggccatacgcaccaaggtgtcgtagatggcgaaatcgccgtgcgggtggtacttacccatcacgtcgccgaccacgcgggagcacttgttgtagccgcgatcggggcggtagccgccgtcgtacatcgcgtagatcacacggcgatgcacgggcttcatgccgtcgcgcacgtccggcagggcacgctcgacgatcacggagagggcatacgccagataggactcgcgcatctcctgctgcaggtccttgcgctggatgcgttcgccggtgtccatcaggccgtagtcggtagtgtccgcctcctgcgggctcaacggctccatcgagccgtccggcgtgaactgctcgtcgccggtgttgttttcatctgccactgttgttcctttagttgtctaagtccgttgtgtacctccctctgacgagggaggttggaggattccgttacgcatcgatccaacgcacgttcttggcgttgcgctggatgaagaggcggcggggttcgacctcatcgcccatcagcatcgagaaggtctcgtcggccgcggcggcgtcctcgatgtgcacctgcttcagaatgcggtgctcggggtccatggtggtctcccacagctcctggtagctcatctcgcccaaacccttgtagcgctggatgccttcgcccttgggcagctggcgtccgttggccttgccttcggcgagcacgcggtcgcgctcggcgtcggtgtacacgaagtcgtgcgggcccttggtccacttcaggcggtacagcggcggcatggccacgtacacgtagccggcggtgatcatcgggcgcatgtagcggaagaacagcgtcaggttcagggtggcgatatgcgcaccgtccacatcggcatcggccatgatgatgaccttgtggtagcggaccttggagatgtcgaagtcctcgccatagccgccgccgaccgcggtgatcagcgattcgatggtgtcggacttcatcatgcggtccaagctggcacgttcggtgttgaggatcttgcctcgcagcggcaggatggcctgcgtgatcgggttgcggccctggatggcggaaccgcctgcggaatcgccctccacgatgaacagctcgcactcttccgggttggaggactggcagtccttgagcttgtcgggcatgccggcggactcgaagatggacttgcggcgggtgttctcgcgggctttcttggcggccagacgggcgcgggaggcctcgatggccttctcgatgatgttcttggcctcgttcgggtgggcgtcgaaccagtcgccgagcttgtcggtcatcacgcgctgcacgaaggtcttggcctcggagttgccgagcttggtcttggtctggccttcgaactgcgggttggtgagcttgacggagatcacggcggtcaggccttcacgcacgtcgtcgccggagaggttctcgtccttgtccttgaggatgcccttgtcacgcgcgtaacggttgaccagcgaggtcagcgcggcgcggaagccctcctcgtgagtgccgccctcggtggtggaaatcgtgttcgcgaaggtgtgcacggcctcggagtaggcggtggtccactgcatggcgagttcggcggagatgccgagcttcaggtcttcggcctcgaagctgatgacgtcctcttccaccggcgtggccttgcgcaccttgaccaggtagtcgacatagtccttgatgccgttgaggtactggtaggtgacggtctggtgctttgcgccgggctcgtccgcggcgtcgccggccacctcgtcgccggcctggtcgttctcacgctcgtcggtcaggctaatcttgaggcccttgttcaggaaggccatctgctggaagcgggaacgcagcgtctcgaagtcgtagatggtggtctcgaagatcttcgggtcggcccagaaagtcacggacgtaccggtggactcgccttcggtcatcggctcgccctgcttcaagggcgcggtggggtgctggtcgatgtacgtctgggtccagtggaagccctgacggcgcacttcgatgtccacacgggtggagagtgcgttgaccacggagatacccacgccgtgcagaccgccggacactgcataaccgccgccgccgaacttgccgccggcgtgcagcttggtcatcacggtctccacaccggagacgccctcgccgggcacctcatcgaccgggatgcctcgaccatcgtccaccacgcggatgccgttgtccggcagaatggtgacctcgatatggctggcgtatccggccagcgcctcgtcgaccgagttatcgacgatctcatagaccaggtggtgcaaaccgcgcgggccggtggaaccgatgtacataccggggcggatacgcacggcctcgagtccttcgagcaccctcagatcggaggcctcataatgctcgggggccatggattcgtcaagttcgccttcggtcaattccgcattgttgatgcgttccgcagccgccttcagctgctcctctttgctggtttcgtctgccaacaggcttccttccgtgactacagggtcaacctccgtcatgaaggtcattcacggaggcgatatggcttacgaggcccgtaaagggctcttctggccatttgaccatactgcatgtgattttactcgtctaacccgacgagcgccatagcgaggcttctgcgaatttgtttggtatcttggctaccgccgccgagcccatttgcgcgtgtatccggcggccggtccggtcacgcgaatctcggcgatggtcaatcctttgagattgcgacggatggtatcggtaagttgggggataaggtaggtcagctgcgtggcccagaccgtggattcggcacggatggtcagtacgccgtccgtgaaatcggcgactgccgaatggctggcgatggcctgccccaccacttggtcccaatggttgcgcaattgcgcaagtttcatattcgccgcccagacgccattgccggcgatggtggtcatcacgctgcccagttcagccggatcgcgccccggtttgccgaagttttcgatggcctcttcacggcggcgtctgtagtccttcaaggtcgccccgcgacgggagagccgctcgaatatttcggccggcagtttggtctcgtccaggttgagttggcgggcgatcggcgggttcatgacactttccgttctacggacgcgctgtccaccgcgggttttccgtcatacttacccaaactctcgttttcccgcgaatcggacaaattgcccagagttggcagtattacggaagcgggttcggccagtgtggccacgtcgatacgatgggccgattcatagtcgggcacatcgccttcagcggccacggtaatcagcacctgatcctgttttctggcgaaatcaagaatctgcgtgcgccggctgtcgtcaagctgggcgaacacatcatcgagaatcacaatcggctgcaatcccaaccggtcacgcacgatttcaaacaatgccattttcaaggccaacgccatcgtccacatctcgccgttcgaagcgaactcgcgggcgggaataccggccaactcaaggttcatgtcatcgcgctgcggaccgataaggttcacgccgcgagccatttcaccggggtagatgcgttgaaaatgctcgctgatctgcggatgtggatcgtcgaacatcagcacttcgtcgaatgaaggcgcatatgtgagcgtcacctgctcgccggcaccggccaagtcggcgtaaatcgcggcaaatggctcggcaagcagaccgatcacatgagcgcgcatacgggtcaacgccacaccggcttcgatgaactggccggtccagatttccaaaccgctcagaaccgcatccatcggctgtccattgttggcattggcattcaattgcttcaacaatgtggcacgctgtttggcgatgcgcgtgaactgttgcaacgtctgcatgtatccgggctcgagcagagccgcagcctgattcatcatgacgcggcgtgctcccggatcgccggacaccaaccgctgatcttcgggagtgaaggaaacgctgggaatcttgccgatgatatcgcgcagatacagcgacgaccccgagttgatgcgggctcggttggcaccacgcgcatgaatcgacgcttcatacgtagtggtttgaccggcatcatcagcgacgttcgcgcggatggtggccgtggtctgcccgcgttcgatcagcggcaacgtgctggacgtgcgatgactcgatccggtggacagcacttcgacggcttccaccagattggttttgcccaagccattcttgccgaacaggatattcacgcctggtacgaaatcgaccactacttgactccatgagcggtagtggtcgagtgcgagacgggagatgtgcattagcgaatcgttggaaattcagggatctcagttgttgaagcgcatcggcacgagcaggtatcggtagtccatggactcgtcggaatcagcttcctgctggccgttgaactcgaccggcttgaccggggtcgtcatcttgatgcgcacgaatggttcggtcacggcggacagaccctccttcaggtaggacgggttgaatgccacggtgatgtcgtcgccatccatgtcgatgtccagtgtttcgttggcctgggcctcgtcgaccgatccggcggacagcgccacttcctgaccggtgaaggtcatgcgaatcggagcattgcgttcggcgaccaaagccacacggctgatggcgtcgagcagatcctgcttgttgactacggcctgaatcgggtattcgtcggcgaacaggcggtcgaccgccgggaattcaccgtcgatgagctgggaggtggagacgcggccggcgttttcgaagccgagcagcgtcgggctatcggcatcgaaatcaaggcggatgttctggtgctcgtcaagagcacgggccacatccttgagcagggagccgcgaaccagcgtggtggtgtcgacgtccgggttctgcggagtccaagtgaaggtggcgcgggccaaacggaagcgatcggtggaggtcatgacgaccttgtcgccttggaattgcatgcgaacgccggtcagtaccgggcggttttcttcgcgggagacggcaacgcatgcctggttcactgcctgaacgaaagtcggggcatcgacttggccgagcatggccggtaccacaggcagatccgggtactcggtgtcgggcatgagctgcaaggtgaacttcgacttgccggacgtgatggtcagcgtggagccgtcggtgaccaggtacgttttctccgaacgcagcgatttggtgatatcggccagcagcttgccctgaaccagtacggaaccggcttcgtcaacgccggcttcgatgtggtggcgagcggaaatctcgtagttgaaggcggagaattgcagcgttccgtcaatggcttccagcttgacaccagcgagaatcgggttggagggacgtgcgtcgatgactcgggaggtccaggctacggcgtcggccagggctgcagtatcgatttcgactttcatgtgtgattgttcccttcgtcggattggctgagaaatattctagccgttaggtggcgaacttacgtacgatgggtgactggctgttactgtggcgatgatgcttttcacgtaactgagtaagtaatcgtcgtaataaggccggtggatagtgtggataagtaggggtgagccctacaaatgcaacggttcataagtccctgaaaattgtggacaaattctgcatggcttgtggataagtgggcgagttttccacagccagttcgtcgaatttgagttttccacatcgaggtcgcggttatgcacgagttttccacaacaaaacagtgggtaatccacgagttatccgccgagtttacccacatctgtgcacaactgtgtggataacttttttggttttcgtactttcgcacggcgtgttgaaggctgtttttcgtcgaggagaatcgattctggagaccgttttcggcacttttttcgtctcgctcgcccaaacccgcaaaatcggtcctcagaatcgattctctcgtttcatgggttttttgcgtgttccccttcgaaactcccctcagtcgtctgcgacgacagctctcctcacaaaggggagccatgaggaatctgatgtctcgaatccgttgcctcgacgtatccaccggaatccgcctgagcaaccaaaaacggcacttttcggactgactttccgaaaagtgccgtttttcgtctctcagaagcgttgtgtcagttggtgttgctttgcttgaggcgaaccgtgagctccataacgtagttatagatctcctgtttttgctgcattcggtcactgattcgagtgcaggcatgcattactgtggtgtgatcgcgcccgccaaagacctggccaatatccatcaggctcatactggtcatttcgcgagccagatacatggcgatctgacgaggaacagccacgtttttggttcgtgatttaccgacaagatcctcaaacgtcaggtggaagtacttcgccacctgactgatgatgtccgtgggcttgatttccacatcggtggtgaagaagtcctgcaacgtctgctcggccaaggcgcgggtcaccggctgattactcagcgaggccacggccgtaacacgggtaagcgcgccctcaagttcgcgaatgttctcggtgaagcgttcggcgatgaggtccaacacatcgctggggattttcgaaccgttcatcgaggcgatcatacgaagaattgcgattcgggtctccagatccggcggcttgacgtctacggtcaggccggattcgaagcgcgagatgagtcgagcctcgaaacccttcaaattcttgggtgccacatcggaagcaatgacaatacgcttatttgcctgatgcagtgcattgaacgtatggaagaactgatccaaggtggcttccttgccgccgaggaactggatatcgtcaataagcaacacatcaacctgtcggtatcgacggttgaattcagcaatctgaccctggctttggttcgggttttgcagcgcgtcgatgaattcgttcgtgaattcctcagacgtgacgtatcgaacctttagcccgggatccttgaccagtgcatagttgccgatggcgttcagcaagtgggttttgcccaggcccgatccgccatagatacacaacgggttgaaatcctgaccggaaccttcggccacggccagtgcgaccgtacgggcaaaacggttggaatcgccgggcacgaaggaatcaaacgtgaagttcttattgagatgagtctcgggatcgcgattcatcttctgctgaccgaccgggaactgcgactcggtggcgggcatcggttcccgcggtgcggctaccggctttgcaccataggattctttaccgaactcggcgacggtcggagaaatttccgaaggatatggctgcgccggctttgccgccgaaagcggttcgggctcggttttcggcacgaccttgaacgcgggaaacatattttcgccggttaccgtacgcaatgcctgaagcagggaatcgttcaaatcaccctgaatggcttgaagcgtatcgttgttgtccacacacagcacgatggtcgaaccgaagacgccttcaggaacaacgccttccaaccagcctttttctcgtgggctgagcgaagcgctgtgtttgagcaccgtcagcgtgtctgaccagatgtgggcggcctcgattacggggtcgccggaagcgttaaccatggtggccccttctatcggtgtggcgaaatctgtacaacagataatatttactctggtttagacaagttatccaccgtgtcgcgtgttgaaataactggattgtgaataacagacatgtaatttgtggataacttttggccgtgaatggttggtattccgccgattataagagatttgaggcgtgtctcgcaacgtgtcgaaatgtgaaaatactccgtccgttttgacttgagggtaggggtgagagtactttggtatagcttgactcacgtgagggcagcgcgaagcgttgccgaatagacctaggagcaatggattatgaagaggacgttccagccgaacaaccgtcgtcgccacatgaagcacggcttccgcctgcgcatgcgcacccgttctggccgtgcggtgatcaaccgtcgccgtgccaagggccgcaagtccctctccgcctgatcattccgatcagtgccacaggcatagtcgaggtggagcggcttcaaagccatcgtgatttcgtcaccgtgctgaaacgccggcgcaaagcaggtggcaaggatatcgtcgtgcactatttggtgcccgacgaccatcatgatgatgacgaccggacggtgcatcgccgtttgggattagctgtctccaaatcggtaggacatgcggtcacccgtaatacggtgaagcgtaggtttcgtgtattggccagagcccatgaggatctgctgcccgcgcattgcgatatcgttttgcgcgccaagcccagtgccgcgaccgcatcgttcgcttcgctagatcagcagatcgcgaaggcttttgccacagtggcgcataaggtggctgaggcatgacagcttctttcaaggcggtgatgattggtggggtgcgctggtatcaacagcacatctcggcaaacacaccgccttgttgtaagtattatccaacgtgctcgaattatgccattgaggcattggaacggtatggcgcgttcaaagggggagtgctcgccatgctgagattactgcgttgccggccgtggagtcgtgggggaatcgacgatgttccacaacggtattccattttttacagattttcgtggtcgaaggctcatgaagagccccgactgacaccattggccacaacccaaagagaggcccaacgatgaactcaaatgaatttctgcttgatagcgggttttggggatttctatataaaatcctgactcccgttgagtggttgcagacctggatcatgaagatcgtgcatgacttcttcgcgatgctgggcatgagcccgattggtgtctcatgggtgcttgccattatcatcctggtgctggtggtgcaggcttgtatcttcccgctgttctacaagcagatgaagtcgatgcgcaagatgcaggcattggcaccgaagatgcagcgcattcagaacaagtacaaaggtaagacggatcaggcgtccaaggaagccatgagtcgtgaaaccatgaaactgtatcaagacaatgacgccaatccggctggctcctgcttgcctatgctcattcagggcccggtgttcatgtccatgttctatacgctgtcggccattccctacattgccaacggtaaacgcggtgcgttgggcgcgttcgacgtagcaaccgccaagcaattcacccaaaccgatgtgttcggcattgtcagtgtgaccgataacttcacccgcgcatctactgcaggcaaggtggtcatcggtaccttcgtgttcctgatgtgcttctgcctgtggtttatgcagtacttcaacatgaagcgcaacatgcccgccgcatcgatgaacaaacaggccgagaccatgcagaaggctatgctgtggctcttcccggtgatgtacatcttctctggtgccaccatgccgttcgccgtgctggtctactggctgaccaacaacgtttgcaacttgtgccgtacgctgtggcaggtgtatgcattcccgacccctggctctccggctgcggcggacaaggagaagcgcgatcatcgtaatgagaatgctcgccgcgcaaaggccggcctgccctctctggaagaagaagcattggccaaggccaaggaagaggctgagcgtaaggccactcagggctatcagcgtcaacagcccgtgcgtaagcgcaaaaagaagtgacgaccatgtcggtgcgcgttcgatgtttcacgtgaaacattcaacacgcaccgacattactttctctgttcgggggagcagggcttagacttggaattcaaacacgacatgaaggagtagcgtatggcacaggatgacgtgaagtcgatcgatcagctcaacgaagaggctgacatcgccgcggattaccttgaaggcctactggatatcgccgactatgagggcgacattgagatgggcgtgcgtaatgaccgccccaccgtgcaaatcgttgctgatgacgataccgacatcaaacatcttattggccataatggtgaagtcgttgatgctctgcagcaattgactcgtctggctgtacagcagaagaccggcgagcgttctcatctgattgtggatgtcgacggtttcctgaagcgcaagcgtcagcaccttcgtgatatcgccctggatgccattgacgcagtgaaggattccggcgagccgtatgatttgaagccgatgaattccttcgaacgtaaagtcgttcacgatgtggttcgggaagaggggctgaagtctcgctcgcacggtgaggagcctcatcgttacgtgacggtgtatctcaagaacaaaatcgaggatgttgccgaagacgacgagcttgatcaggagtaataggtcgacgagtttttgagatgacaaggacgttcaacggatgtcgtctctaaacaaacaagagtgaccgtagggagaatggcgtcgtaatgagcgacgccttttccatgttgattgtttcacgtgaaacatggtgagggagatggctatgacagatcagctgcaggggtcacctgtacttgctgaggtcttgggtgatgcgttgccgaagttggagcgtttccatgccaagattgccgaagagggtgaacctcgtggattaatcggcccccgtgacgtcgatatcatttgggaacggcatattctgaattccgctgcgattgtgccgtacgttcggaatgtgacgaatggtattcgcttcaaaacagttgccgacgtcggcagtggtggtggttttcctggattggtggctgccgcgtgtttgcctgatcatgacttcacgctgattgaaccgatggagcggcgaatcgaatggttgcatgaatgtgttgacctgatgcaactgcagaacgttgagattatccgtggacgctccgatgccgtcatccagcaggtacggaagcgggaaattcatccgttcgctgttgtcacgtgtcgtgcggttgctcctatgaccaaactctctggctggacgttgccgttgctgaaaccgtcaggacagttgatcgcactgaagggacggtctgctcaggctgaaatcgacaaggctggcaaggagattgcaaaattcggtggtcgtcgtccacgcgtcgttgaggcggctgtcggaccggatcttgagcctacccacgtggtgattgtggataagcgatgagtggagtactgattgagttatccacatttccatatgtgcgtaaaagttatccacatttttacgggacgatgtgcagaatgatgaaaacactgatttttcaatgtttttcgtctgcgaatacataatctaacactcaacgtcattcacacttatccacacttatccacattgcatatcgcaattgtggataacgagcatcatgtccatacgaatgagaacactggaacttacgtctgtgcaaggaggagcgatgtccaccaaggatcatcagtcggaacctatagaatcggcttccgaaacgcttcagcgaatattcgatggtcacggttcagtgcttggcagccagatggctgatgaaagctcacgctacgatgtactcaagaaaaccgatttccccaaacctcaacgtacccgtcgtattgccgtggccaaccagaaggggggagtgggtaaaaccacatccacggtaaacaccgctgcggcgctggcgaacaagggcgcgcaggtgttggtcatcgatatggacccgcagggcaatgcctctacggcgttgggtgtatctcatgcatcgggagagccctcggtctatgacgttatcgaggggcgttccgatctgggggatgtcatcacggtctgtcctgattttcccacacttgatgttgtgcctgcatcaatcgatctcagcggtgccgagttggaagtggctgatctgcccaaccgaaacacattgttgaaggaggccttggacctctacctgcgtcaatcagataaacactatgattacgtgttcattgattgcccgcccagcttgggcctcttggtcatcaacgccatgtgtgcagtgaccgagatgctgattcctatccaggctgagtattacgcattggagggtcttggccagctgatcaacacgattggtttggtgcaggagcatttcaatccagtactgctggtgtccaccatgctcgtcacaatgttcgatcgccgaacgctattgagccgtgaagtatataacgaggtcaagggacactatcccagcattgtgctgaataccaccatcccgcgttcagtcaagatctccgaagcgccgagtttctcccaatcggtgattgcctatgatcctcgtggcataggtgccatatcgtatggtgaagcagctttggaaatcgcacagcgttcgcaacaagtccttgacaccattgatgcgaggaggaacaagtaatggcatcaaaatcacgactcggtaagggccttggcgctttgttccccacattgccaggggaggagccagtggcggagcagcccgcaatgattgaggaggattcgtctactccggcggccactgctgacataacccccgccaagaaggctactgcccagcaggaatcaaagcctgccgcgcctcagacggtatcatccagcaaggcagccaagaaagccgccggtaaacgcgcatccatgcccgcattggacaccattactcatcctagcgacctgtttttcggtacggagaaacctcaaaccggtaaggtcgccgcacctcagcagggcggcaagccgtctgcgtctcagacggcacatcgtacatccgtcaccgtcaaagatgtttcacgtgaaacatctcagactgcatcggcggcaaagaccgctgacacagataagaaggacgagctcaagccggtagccggtggttatctggctgaactcaaactgtctgatatcgggcccaatgcacatcagcctcgtaccatcttcgacgaggatgagttgaatgagctgtctgcttccattaaggaagttggtgtgctgcaaccgatagtcgtgcgcaagcgtccggcaagccagattgctgcggccaaagccgccaagcacgacgagacggaatccagcacaaatccgtttgctggtcatttggacagcccgtatgagctcattatgggtgaacgtcgttggcgtgcatcccagttggctgggttggagacgattcccgccatcgtcaaaaccactgcggatgatgatatgctccgcgatgcattgctggaaaacctgcaccgtgtggccttgaatccgctggaagaggcggctgcctaccagcagatgattgaagagttcgggttgacacaagtacaactgtccaagtcggtgtccaagtctcgcccgcaaatcgccaataccttgcgactgctgaatctgccggcctctgtgcaaaagagagtggctgccggtgtgctatcgtccggtcatgcgcgtgcgctattgggcctgagcgatccggaggaaatggacaagctggcttctcgtattattgcggaaggtctttctgtacgcagcaccgaagaaatcgtcgccatgaagattgcgtcgggggagcagccgaagaagcccaagacgtccaagaccaatccttgggttggttccgccatccagcagagtttggaaaatcatttcgacaccaaggtgtcgattaagggcagcaccaagcatggtcgcatcgaaatcgtcttctcgtcaccagaggatatggatcgcatcctgcagctgctggtgccgagccaaggcgatgccgattccaaatgggtgtaacacgataagaacattcgtgttgtcgccggcatcgtcagtgacaacaccgatgcttagcgttgtcacttggcattgtatcggcttgtcactgtcgccggcattattgctgtgcagtgcgttgtacgcgcaagacgttatagcctctgcgtgattcctggcaggggcgtatgcctgcgttgtagcccctgtcgcaatagaaaacccctcaggctggaggatgacaaatcacacatcgtgattctccgtcgcctgaggggcctttctatgcctttgaccggtgcgtactatccaagggcggcatgctgtaacactgacctagcgctgctcctatgtcacaggcagcagtcagaacagcaagccatcatcagatcgacgcaatcagtccgtaagataggcctgcgcatccagcgctgcacggcagcccatgcccgctgcgctgattgcctgacgataagtacgatccacgcaatcgcctgcagcaaagatgcctggcgcactggtcaccgtgctggcaccctgcaccacgacatacccatcattgtcacggtccacaacaccagctgcaaaatcagtggctggcgtatggccgatagccacgaatacggcgttggtgtccagcgtgctttcttctccggtcaccacgttacgtacggcaatgctgctgacactggccggtgccacagccggtcgtttgattgtcaagccaggaatggcaataggtgcaccggtgttctgtgtgggggaggaggtgccggtaatggaggtcaccactgtgttggtcagcagggtgatggtcggattggctttggctcggtccaccatgatctgcgaggcacggaagctatcgcgtcggtgaatcaaggtgaccgaagaaccgaaccgggtcaggaataatgcctcttcaaaagccgaatcgccaccgcctacgaccacgataggcttgttcctgaagaagaagccatcgcaggtggcgcagtacgagacgccatgtccggacagctcctgttcgccgggcaccccaagcttacggaatgacgaccctgtggcgatgatgagtgctgatgcctccaactgggagtcatcggagagcgttacacgataggtcggcttgaccgaatcactctcacacgcctcaatggaagagacatcgtctgtgatataggttgtaccgaagcgcttggcctgttccttcatgcgatccataagatccgggccaagaataccttccgggaatccagggaagttctccacctcagtggtgttgaccaactgtccacctggcgacaacgcaccagcgaccataacaggattaagacctgcacggccaagatagatggcggccgtgtagccagcgggaccagaaccgataatgatgacgttatgtttcacgtgaaacattgtcacacccccatacgatattccatgtcattcagccagacgcgaagaaagggcggcaccgtcgaatgtatgcgaacggtaccgcccttcttgggtcagttatcggtatagatgccgattagaagacctccaccttctcgatgtacagctggttctgcggcaggctacccgatggcacccacagcagcagatcctgcgtattgacggctttggtgaacttcacctcagtagtgccaccttcagcaaaggtgaattcggccacctgctcgccctgagtggggtctccagtggtatttgcgcgaatatagcccttaccaccggatgtgcggatggtgataaccatgcggtacgcatcctgcggctggtcaaggtgcatgtagtatgcgtacccggattggccgccaggattcgacaggaagttggcgctggaaatcgtaaacgccgtgttgttctcatggcgcggttgcggagcagcgctggaatccttatcgccggacttcttggccttggtcttcttggacgacgaatcagcagtctcggacttcttggacttgtctgatgccgagtccctggattcgctctgagtggcatcactcgactttgaggaatcgtcagtggcgccaccgttcgtcgcgttcttgctgccaccgaatggcacagcgtcagcattgatatcgggccagtcaccttcactggagttgctggaagcatcggcaggattgtctccggaggatcggaacgcatgcactgcccaaacagccgctgccactaccaatatcagagccacaatgatggcaacgaccttggtcgacagtttgccgaacagatgttcatcgggcagcttgctgtcatcctcgtcatccggcacatccttcggtgtgaagctcggaggaatggcgcttacttcggcaatgcgggcctgctcctcttccaaggcacgcagcgattcctcaccgggggccacagcacggccgctgacatcgaacacgggaatacgactggtcgtctctcccacggtggcatcggaaataccgccggtaacaataggcaccgtcaaccgagtattatcacccggaccgccgatgggggccggattcatttcgctgtaccagtcaccggtgtcttcaccggaaagattctcgtgctcccaggcgtcagaaaggttgaagtcaaacagacggcgggcgtcagattgagactggttgccgtcagcagtactggacccatcaggcagaggagccggtgacatcgcgtgcggagcggggacggcggccggctgaaccggcagggaaggggtaatagacaattccggaagactgctgctgttaatcaacgtgctgggaataggcacgatatcggtctcgttggcgggcttcagtatcgccttggtaatcgagcaatcgctttccacgctcggcaaagcgatatcagcatcgctcagttcagagagcggcttccaattacccaacaaggcgtcgagttctacaagggcagccatcggcaacgtgtgctcgtcgggcttgcttaaggccaatccacgcttgcaaatcacgcggaattcgccaggggtgtcttgcggcaaggcgcgcagattgaatgtgggtgtcgcttggcttggcgtgcgtgtcagcagggcatagagcaatgccgcaagctggcgaatcgcataccgttcaggaccgtccgtacgcagatcagtagcggacgtgtcggccagcatcgtggcacatggtgcatcggcaatctgcacaccggaggtagtcactcgaacggtgtcggttgtgatgacgatgctgctgggagtatccgcaatgacctcgcgcagcacgttggcgcattctccgataatcgaccggatggcgctgtagctgagcggcttgtcggtatccaccatgtagtcagtcaggcattggccgctgtccaccggcatgacaatgagaagtacgtcggattccatacggtatttcagtacgggaatcacacgatcagggcgagtggcggcgatgcgaccagcgagctcatcaattgcggcgaaagcgctgcgattggtaatgatgaacagctggcaatcctttgccaacacacggtcgttggctttccatgcctgaatgccaggctcctcacgcaacgatgataccaaggtgtatcggttgagaatcgtgtctccgagttgcggtttcatagtgcgttcggctccgtgtgattggtgttcgagactggtcttagatattctacgtgtggggctatccttgacgggctccgtctcaggattgatttgcgtatcgtcgactttttccggctgggctgtcacagcaacgtcctcactggccggagtcttgtgtagacgggccagtatcgagtgataggcgctgatgagttccggggtgcgtatcacccacaacacagccacatatactacggccagcacgatggtgagcaccacgcagatggccagtgcagaccaccagctcatgtgcccgcctaccgatcgaatatccgcgccgaacagtgcgactaccggtcgtttgatcagccagaccacaactccggaagccagcgccgccacaatggccttggcatatgtcctcgtgatctcccgaccgccaagattgccttcgaacttgcggcgcaacatcatcaatgtcagcggcaacgccagtaatccaccgagtgtcaccgagcaggcgatgccgagtacccaatgctcaggaggaagtaccatcatgccgatcatcatgaataccgaggtgaatccatactgcatcaccgcggacaggaaggggtgcaggccgtcctcaaaggcatagaacgtgcgctggatcaacaggaacgccgatcccaaaggagtgcccacagatagggcgataagcgcgtaggaaatcagcatggtctcgtccatcgagacggacggaagcaatgcgcggatgatcggttcggggaacacaatcatggcggcggcgaaaaatatgatcagcagccctacgttgttcagcgcgctcaccagatcgtgccgtgcctcatccagattcgcagctgcgacagaacgggagattttggggaacatagccgtggataccgatacggcgatgagcgaatagggcaggatgaacagtgtgtacgcattctgataggtcgcgttgcctgccacgctgaacaggctggcacccgtcagttcgtgggcgcgctgcggtgcggatgtggcgatacgggtaaggataatgccgcagatctcgctggtgaccaccacgcccaaa

SEQ ID NO: 3578 - DNA, 4352 bp, Unknown
  R85_18m  MAG No. k141_25494
accgccccatggggtaatcaccgccccatggggatttggcaggcatagcaaaggggagccacacattatgtgcgactccccttacagcttgtaccgtgttagcggcttaggctcacttctggccttgagcggcgacagcggcggcaccggcagcagcagcctccgggtccaggtactcgccacgcggcttgatcggcttgaagttctcgtccagctcataaagcagcgggatggcggtcgggatgttgaccttggcgatctcttcctcagacaggttgtccagcatcttgacgatggcgcggagggagttgccgtgagcggcaatcagcacggttttgccggccttgagctccggctcgatggcggactcgaagtacggcttcacacgctcaacaacgttggccaggcactcggcttccggaaccggatcgccggcgtagcgcgggtcgttgttctgggcgtactggtcgttcgggtcgatctcgggcggcggggtggcgtaagaacggcgccacagcatgaacttctcgtcgccgtactcttcgcggatctcggtcttgttcttgccctgcagagcgccgtagtgacgctcgttgagacgccagtcacgctgaaccgggatccacagacgatctgcggcatccagagcgatgttggcggtgttgatggcgcgacgcagcagggaggtgaacacgatgtccggaaggacgttcttctccttgagcagctcgccgccacgcttggcttcggcttcaccctgctcggtcagcggtacgtcgacccagccggtgaactggttggttttattccatgcgctctgtccatgacggagcagtactagtttataagtcatacggttcagtctacagccgcgtgcgcccaaacacgagtattcgtcttattatttcgctctcatagcgccacggcaaccgccagcaccaccgcaaacagcaaggtctggaagctggcggcgggcagagccgggcggaattgacgtttattcacgctggagaccatgcgcacaggtattccggtgcccgagagcaacagcaccgcaccccacggccaccataatgtaccgcacatcagcagggcgatgatccatgcgatgacgcagcacacaatcagcaacgtacgcgcgccggactcccccagccgtacggccagcgtgtgtttgccatgctcacgatcctcgtcgatgtcacggatattgttcaccatcatgatcaggcaggagaacaggccagccgccacagcacccaatagtccgccgacgtccaccgtgccgcacagcgcgtattcggtgcccaataccgcagccaagccgaagaacaggaacacgccgacttctcccagcccgacgtatccatacggatgcttgccaccggtgtagaaccagccggccagcaaggaggccgcgcccacggccagcaaccaccatgcttgggcgagcacgaccgccacaacaccgcatatgcaggcgatggcggcgcaaatcatcgccgcgaacagtacatgcttggctggtaccagtccggatgcggtcagtcgctggggtttgcctgatttcgattcgtccgtgtcacgcccggcgtcagtgccgcggatgccgtcggaatagtcgttcgcatagttgacggcgatttgcaggaacagcgcgactagcaggcacaggatggtcaccggccagaatcggtccatcagcagggtctgctgttcacgggccgtggcgcaggaggccggttctggatatattgcgatgcaggtgcccgaccgctcgatatgcacgtacgccatcaccgccccaaccatcaccgacgcgatggaagtgaccaaggtcttgggacgcgcgccccgaacccacaagccgatagacataagcaatccctttcatatataactctggctcccctctctgaggggagccagagtatgcctaatcagccaacgagcggcttgaccagcgggaaggtgatggtctcgcgaatcgtggcaccggtcaaggcgataagcagtcgatcaatgcccatacccataccgccggccggaggcatgcccacgccgagagcctcgaggaagtcctcatcgatgtcgcaggcctcttcgtcgccggcgagtgcgtccttggcctgggccacgaaacgctcacgctgcacgatcgggtcgttgagctcggagtagccggtagccagctcgaagccgcgcacgtagagatcccacttctccaccacgccgggcttggtgcggtggcccttgaccagcggggaggtttcgaccgggaagtcacgcacgaaggtgggctcgtaaagcttgtcctcgtagaagtgctcccacaggtgttcgacgagcttgccgtggttctccacgtcgtcgcgctccacgccgagcttgtcggcgatggcgcccaaatgctcaacggaggtgccgggatgctcagggccgccgttcggcacgatttcctcgcccaatgcctcggacagcgaatcgtacatgctgatggtcttccattcgccgccgaagtcgtattcggtgccgtcgagcagggtgaccttgtgcgagccgtagacgtccatggcggtcttctgcacgagctccttgaccagctggccgatggaatcataggtgccataggcctggtaggcctcgaccatggtgaattcgggggcgtgcgtggcgtcgacgccctcattgcggaagtcgcggttgatttcgaacacgcgatcgatgccgccgaccaggcagcgcttgaggaacagttccggggcgatgcgaaggtacaggtcaaggtcgaaggcgttcatgtgcgtggtgaacgggcgggcggccgcgccaccgtgcagggtctgcagcatcggggtttcgacctcgaggaagtcgtggtcgtcaaaggtgcggcgcagggaggccacggccttggagcggttgcgcaccatgttgcggatgttctcgtccgcgatcatgccgatgtacggcttgcgggtgcgggtgtcttcgttcaggtccttgtgcagggccggcagcggctgcagggccttggaggcgatagcccactcagtggcgaatacggacagctcgccggtcttggaggcgatgacgcggcccttgaggtacaggtgatcgccaaggtcgacgagctgcttgaactgcttgagcgagtcggcgccaatctccttcttggagatcatgccctgaatcttggtaccgtcaccggcggacagctgcacgaagcacaggccgcccgcgttgcgcaggaacagcacgcggccagcaatgccgaccatgtcttcggtctcttcgccagcctcgagcttgccgtcatacttggcgcggaccgcctcgatggtgtcggtgacgtccaagtgcaccgggtagggggcgatgccggcctcaagcatcatcgcgcgcttggccacgcgcatctgcacctgctcggggtgagccagcgggccgaactccttgttggaggggtccacggcttcgtccagcgtggcaccggacttgatcttctcgcggatggtggcgtcctgctcgagcagcatttccgcacgttcgacggtgctcatctgcgggacggccggggtttcattctcagtgttttcggtattttcgacaacttcagccatgattcatcagtgtacgcaaggccggcgattatgagcccggcagaccgtacggccatctgaacacccgctcacatgacgcaaaaccggctctgcacaaggcttgagagacctgtacacacggcgaatccaccatcacgcaacactcgcgacatgccgatttgcattgtccaccaccacaatgtaatatctacatctgttgccaaacgggctgtagcgcagcttggtagcgcgcttcgttcgggacgaagaggccgcgggttcaaatcccgccagcccgacaactggaccggattgttgagaaatcagcaatccggtttttcgtttcctaacccaacaatcagaccaagcgatcggacagcggtaaacaacccgccgcgcacagcgacaaaccgcgtcgcggcaaggcccgtatttgttggcggaccaccgtaatatatcgctcgaatcaatcgattgccgcactgtttttgtaagtaatactgaagtaattagaggaaccatgaagaagagtctgcttgcactggcttcgggcgcgttcattctcggtgccgccgagttcgtgatgatgggtattctgccgcaggccgcggccgccaccggcgtggacatccccaccgcaggccattacatttccgcgtatgcgatcggcgtgtgcttcggcacactgattctggtgttcggccgcaaggtgccgccgaagaacctcatcatattgtttatggcgattgc

SEQ ID NO: 3579 - DNA, 5196 bp, Unknown
  R85_18m  MAG No. k141_25705
agccaacaagtacgccggccgcgccggtgcgcatcaggtgcaaggctgcagtgtagttggatgctccgccgacgatgaccggcacatcgaggtcatagatgaattttttcaagttcaacggctcctggccggaggagacgtgttcggcggacaccacggtgccgcggatcacgaacaggtccacgcccgcgtccaccacggtggagtagaactgctgggtgcgctgcggggagagcgcgccggccacggtgacaccggcggcgcgaatctcgcgcagacgctgcgcgatgagctccggcttgaccggctcggcatagatctgctggatacgctcggtggcctgatcggccggcagcccggcgatttcgtccaacagcggggtcgggtcctcgtaacgggtccacagaccttccaaatcgagcacgccgagcgcgcccatcttgcccatggcgatggcggtggccgggctggtcaccgaatccatgggggcgccgatcaccggcacatcgaactcataggcgtcgatctgccaagaggtggagacgtcctcggggtcgcgggtgcgacgggaggggacgatcgccacatcgtcgagtgcgtagccgagacggccctttttgcccaaaccgatttcaatttcctgagacatggttgtaagcctattgcccgggtgggacgccaacaaggtcgtttcccacggaccggacgattgcttcaagtcgttacaaacatgcgctatgactaaatcatcttcacaccatctatcaggaggaaacatggccaaaatcaaggtcgaaggcactgtcgtcgaactcgacggcgacgagatgacccgcgtgatctggaaggacatcaaggatcgcctgatcctgccgtacctcgacgtgaacctcgactactacgatctgggcatcgagcaccgcgacgagaccgatgaccaggtgaccatcgacgccgcccacgccatccagaagcaccatgtcggcgtcaagtgcgccaccatcacccccgatgaggcccgagtcaaggaattcggtctcaagaagatgtggaagtcccccaacggcaccattcgcaacatcctgggcggcacgatcttccgcgagcctatcgtgatgagcaacgtgcctcgtctggtgcccggctggaccaagccgatcgtcgtggcccgtcacgcattcggcgaccagtacaaggccaccgatttcaaggttccgggcgccggccagctgaccgtcaccttcactccggacgatggctccgagccgattcagcacgtggtctacaactacggcgaagacggcggcgtggcccaggtgcagtacaacgtcaacgattcgatccgcggtttcgctcgtgcctgcttcaactacggcctgatgcgtcattacccggtgtacctgtccaccaagaacacgattttgaaggcctacgacggccaattcaaggacatcttcgctgaggtgttcgagaccgaatacaaggacaagtacgccgaggccggcctgacttacgagcaccgcctgatcgacgacatggtggccagctccctgaagtggcacggcggttacatctgggcctgcaagaactacgatggcgatgtgcagtccgactccgtggcccagggcttcggttcgctgggcctcatgacctccgtgctcatgaccccggacggccagaccgtcgaggccgaagcggcgcacggcaccgtgacccgtcactaccgccgctggaagaagggcgagaagacctccaccaacccgatcgcctccatcttcgcgtggaccggcggcctcaagcaccgcgccgatctggacggcacgcccgaagtccgtcacttcgccgagacgctggaaaaggtcatcgtcgacaccgttgaaggtggtcagatgaccaaggatctggccatgctcatcggcacggacgaaccgtggctcgacaccgacggcttcatgaacgcgctggacgagaacctggccaaggctctggccgagtaaatcatcgaacacatcgtgcggacctacatgggtcatgtcatgtcgccaactgtcatgattgtcgtgcttcatctggaatgttcctcagcacgacaatcatgacagttgttcgatacacgcgcgaaatacccctaattgttcccggatatgtggcgatttgtccactggtccgggactttttcgtatacggcctactagaatcgtgattcagtttgttttcacgcccgcttgaggaggtttcgccgcttatggtgttcgcacgccgctcaaccaccctgctcgccgccattgtcgcatcctgcgcgatggtgctgtcactgaccgcgtgcacctcagacaataagaccgttgtagatggtcaaaccacggtgacgtccaattctgccggcggcgtggccgtgttcacgccttcggacggcattacgctgaatcagcagacgccactgaacaaatgggcgaagctggtgcccgacctaaccaaggccctggtcgacgccggtttcaagaaaggcgatatcgatcatacgacgtccgactcgttggacaagcaaagccgcgccatccaagactttgtggtcgatcatctttcgaataacaccacggacgattccggcattgccatcgcgcccgacaacatgacattgctcgtggctccagtagtcgaggccgacgcttccactcgccaatacggcgattacgtcagccagaacctgagcaccaacgatgccacggatgagggagctacttctgacggtgattcttccgaagacagctcttccaaagatgactcgtccaacactgagagcgacggcactgcatcggacgagcaggcgcaggccgtggaccggctggtctcatcgctcaagctggccaaggaatccggcatgcatgtggtattgctcggcaacagcatcgaggggtataggccggacgccttcgtcaagttctcggacgcccagaccatcggcaagctacaggcggaaaagatggtgtccaaactcaagttggataaggccagtaaagacaaccccaaatacattgaggtgctgctgccatacaccgccgtggacgaaaaaggcaacgccaacgattccacgttcgcccaagaggcgttccgtggtatctggcaggtactgggctcctactatcagaagggcgttgtggaaagcccttcaggcaccttggacggcaaatccacggaaaacgattggcaagccgtggcctacgatgccgccaaggaaggctccactgcgaaagtgcttgacaagcgtctggcaaaaaccgacgggcagtccacactcacccgtattgacggcatcatcacgatgaacgactatatcgcctccgaggtcgtcaaggaattggacgatctgggatacaccggctctgccgccgatatcaatccgcagatcaccatctcgggcattgtcggcaatatcaccggcaagagggatctcagccgcgacgcagtgccggacccgatcaaatcccctgaaaacgacaacgcaaacgactcatccagttccgatgacgatgcggataaggacacctccgcttccgacaaggaccgtgactcgcaatggcctctggtgaccggatacggcgcgtacgtctcgaacatcccatccatcgtcaatggcaagcaatggatgaccggcatggaagacagacagaccatcgccacggatatcgctcaggcctgcgccaggctcaacaagaacgaagcgctgaattccatgccttcaatcaggaactccgaggtaggcggcgtgaagaagatcccgaccatcaacgaaccgttgctggctgtcagcgccagcaatctcaagtccgcgctgatcgcccccggatatatctccttggccgatgccggtctgtgattcatactcgtcacgccgctagccgcctgcgatgcctcttccgtacggccctgttccggccgacgaacattgctgaatcatgtcggcttcagtacgatttttcgactccccgcatattgctgtgggtcaagatagtcggccgttcctcgcttgaggccccaatgcaggcaacggtcttcgcaatggtccgagttgccctcaacgatgcctacgggctgtctgcgggagatcgtatcccccaccgagagctcggtaacagccggttcgaatgtcgacgtgacacctccacgatgccgtacactcaccacatctttgccagctactttgccagcaaaactcacggtccctgcctgtggtgacagaatcacggtaccttgctccgcagcaagatccacgccacgatgacctggtgcccacgggttgatcggccgctcgaactgttgttcgacctgtggatcgtcgaccggccagtcgaaccgggattcgcactgattgccattgcgccacgccagatcagacatatcggtgaaatcctccaccgtgtatgccgcatctccggtcaccgcagtatccgcatgcgcaacatgctgaggcgtggatgccagtcccactcccaaggcaagcagcaggccgataacggcggccaacgcgattatggcatccatacgccgttgccgttcctgagcccgctgacgcgcctgctgacgtcgcctgctggcacgtcgggcttcgtcgcgacgccaatcaaacaacagtggtgcattcatgagattcctccccatagtgtgagtgtgatgcgattccggcttctttgccggtgatacccaccttgaggggtccgaaacaggatgtccagccagaacgacctatgtggttccagcttccgaagttatccacaatgaaatttcgcgtgacagtatcgccgcatcgtcatcatgttgtatgagtgggtattcgatgagtccgattctgcggaattcggcgcgacatgccctacacgcatgtaatttgctttttcgtggcaagcatgtaagatgtgtgacttgtgcgcgagagaaatctcaaacacagcagacattcctgcgtagctcagttggcagagcatccgactgttaatcggacggtcactggttcaagcccagtcgcaggagctcacctgaacgggtaactccggacgggatgaaaattgaatattcctgcgtagctcagttggcagagcatccgactgttaatcggacggtcactggttcaagcccagtcgcaggagctcacctgaacgggtaactccggacgggatgaaaattgaatattcctgcgta

SEQ ID NO: 3580 - DNA, 6361 bp, Unknown
  R85_18m  MAG No. k141_26113
gagtacgatctgcttgccgagctcgcccaaccgcatcgcctcagcgagttggtcgatggaaatcgcgttattgacaaaagcgcgggcgaacgagaaatacgaatcgtcggcacgatatccgacgatgacgtcagcctgactggcatccggcagaaacacttgtttcagatattcgatgccttgcgcggcgacggcggtggtcggctggaaacgacggttttcgaccagcatggccagccagttcaggatggtgtagggcggctgggacaggtccaggaagaggagcccgtccgtggtcaacgtgtaccgattcgcgaaaccgtcatccattcccgcgcacgcccattccttggccagctcgacgctgcgcgtgcaatagaatccgcggccataatcgttgttcggcttgaccagcccgtattcaggatgcttgatgacatgcgaagagccatgccacagttcgatcgatgcggtctccattggccggctccttctctctccttacatattcttgattatatcactgtggtgatagtcataagggaaatacgagatgaaaaataccgctgtatacgttcgtacacaacgtgaaatgtatacgaacgtatacaacactgatgtccggagtcatgctccgcagtggcgcagcggacgcgccactacaatcggaatatgggactgaagacgtggaagaagtggacggactggccgctgatggtgctgtccgtggtgtttctggtggtgtattcgtgggaaattctctcccgcacgcatatcgcgctgtgtgaaaccgtcatcaacgtgatctgggtggtgttcgtcgtcgattatgtggtctcgctgtggttggccgacgatcgctggcggtggttcaagcacaacctgttcacgctgctgaccatcgcgctgccgatgctccggcccttgcgactgttgcgtttgctgaccgtgctgcacgtgctgaaccgcacctccggcatggcggtgcgcgggcgcatcaccgtatacgcggtcggcgcggtgggaatgctcatgtacgtgggcgcgctggccgtgtattccgtggagcgcggggcgtccggatccacgatcaccgacttcggcacggcgttgtggtgggcgttcgtgaccgtgaccaccgtgggatatggcgacttctcgccggtcaccttccaaggcaagatcattgcggtggtgctgatgttcaccggcatcgcgttgatcggtattgtgacggccacgctggcttcgtggatcgtggatcaggtcaatctggagacggatcggcgcgaggacgctcgggagaaggaagtggccaaggaagccgcgcaagaggctattgcaacatcagccaatcccgaaatcgacctattgcgcgaggaagtgcgtgagctgaccgctacggtagccggtctgcgcaccgaacttgagcgacgttgattggcgaagcgggacaaacaacgattctgccaagaaggtccgcgtcagttgttgtcaccgcggattgcggcagaatcattgtcgccacggctgttttcttcagtcggctcaacccaacttttgataatttttatttttttgatatttttgataatttttattttaggttgattcagcgaggaggcggtccacatgaaggcaaaggaaaacccattcaagccaacggcaggaggggaaccgcccctgctcatcggccgaggcaaagttatccgcgatttcgagaaaggtctcgataacggagtcggtgccccagggcgcattatgctcgtcaccggcgctcgtggaaccgggaaaaccgtgatgctcactgtgttcggagaccgggccaaagcgcgcagatgggatgtcatcgaagaaacggcctctgccggactatgcgaacgccttgttgatgccttacgaaccgggcgaggggcccttgaccacctcactatccgaccatcgttgacttttgctggagcgggcatcggcctcggagaagccgaactatccccgaagcgtatgcccgaaacgttgagaagtgccattgccggacggttggatgcgcttgagaagcgccatgctgggttgcttatcaccattgatgagactcaagcggctgagcgatccgacatgattgccatcgccactgccatacagcatcaaatcagggaacgacgcaatatcgccatcgtgttcgccggtctcccacagatgatttctgatttgttcaatgacgaagtcatcacgttcctacgtcgcgcgaaaacgaacatgctcacagatattcctcttgatgaagtgcgcgatgctttcgccacaacattccgcgcctccggcatgtccatcaccgacgctcaattaagcactgcagccaatgtgacagccggatacccctatatgattcaactggttggctaccatatctgggatgccgcagacatgcgggactcggataccatcatcgacgctgatgttacggcaggtatcgaggaagcacgtattgaccttgataacgccgtgtgcatcccggagttgcaaggcttatccaaaaacgaccgtgagtatctcgaagccatggcagcgtcagatggtccctctcccaccgtgaatgttgcacagcgcatgggcaaaacgcctaactatgccgccacctaccgcaaacgcctccttgacgccttcgttatccgcgaaacagaacgaggcgaagtcgattttgccgtgcccttcctgcgcgaatacttgcgtcggaatcagtaatcggcacaatgcacagtatcgatatattccgttccatataatgacttttcgcattcagatacacaatggacggcctgttgagtagcactcagcaggccgtccattctatttagctattcagttatcggagacacacctcaggccttgaccggagcgtcagcgacctgctgggaggccatcacgccgaacaggtagccgtctttggagaagtattcgaaggtacgaccggcgaagtcgcggcattcgaatctgatatcgttgtcgattcgatcagcggctcacgatactgcccttgcatcgctgtgccactgttgaatgtgcccggctggctcacctttgggtcaccgccgacacatccttgatgccgatggttatagagtcgcaaattcacgactggcgcacctgcccacgcacctatcctgtcatttcgagcgcataatttgctaccacatccggtcagggcaatcgaccttaatggcgtaaacggcacttctcaatacgtaaacggcacttattcttggctcccctctcagagaggggagccaagaaatatcaagctcggcctcccaggagagagccagaataatgcaccggcaaggcattaggatggagggcatgagcgatttgaacgcgttgaatcttgagcccggcgaagtggttggtgggtatacgctgatctcccggctcggctcaggagctatggggtcggtgtggcgggtgcgcgacgacggcggcaccacctatgccatgaagattctgcgcgactccctgaccgacgagtcagtggcaggctccggctctgcgtccacggccctgcacgaccccgacctcaagcccgatgtcacgccgcgcgagcgcctgcggcgcgaggccatggccttgaagaaggtcaatcatccgggtgtgtgcggcatcgtggatatggaactcgacgatacgttggcgttcatcgtcactgaactcatcgagggcaagaatcttaaggatgatgtggccgccaatggccggtatgtgggcgacgatctggaacgcttggcccgcaagctcatcgaagccaccaaagccgtacatgcggccggcatcgtccatcgcgacatcaaacccaccaatgtgatggtgtcggccgccggaccggtattggtcgatttcggtatcgcgatgggcgagggcgaaagtcacgtgacccgcaccggcctagtgatgggtacacccggattcatcgcacccgagattattgacggtgccgaatccgacgacgccaccgattggtggtcggtggcgtccgtgctcgcttttgccgcaaccggcgcgcctgtgttcggcaccaagccgatgatggcggtacttgagcgcgaggcctcgggcaacgcgaatctttccggactaccggccggcacattggctgccttccgttctgcactggacccggatcgcagggatcgttgcacgccggatcaattgctgaatgccatcgccttggatgcgttgaatcccaacgcttggcagggcgagcaggcgggaccgttcgccgcgggagccgtggctggacaaccggctgcgatcgttgccgaagccgcggaggcgatgcccccttttggcgcggccggcggcgttgaccgcaataatccccgaaccatctggcgcgcggccgaggaagccgctgaggctcccaccatggccgtgttctccggcaataagggcgataacggcgatggcgaaaccgccgtattctcgccggctggcgccgctaccgccacgctgcccttagccgatatgccgccacgtccgccggccggtgcggagcaggccacgcaactgttgcccgacgctgctgccgatttcaccgacgacgccggcacacaggtactcaccggcgcgaccacaccgatgccggaccaaaccacaccaatggccggcgccaccacaccaatgaccaacaccgattcgactccggccccgaccacgccgctggccgagcgcaccaccgtactccccacgccgcagccgtcatcattccccccgtccggcaccgcccagagcagctgggatcccgcaagcaaccagcccacagcggtggaccccgccattcgcccggcattgcagcgcatcatcgaccaaaccgcccaagcggcccccaccgaaaccatggtccaaaatcctcccatgcccaatccggtggacgtgaagcgaggggaatatctgcagcgcggcaccctgccattgatcctgctggcggcgccgctggcggcactggcggcaaatgctccgctcgtggccatcatcgcggccactgcgttgttgtggctactgctcaccctggcctataacaccgaaccccagcttgagcgcgagggcaaacgcggcggcgagcgcaaaaactccgattcgtggattcgcgtggcgacttttccctggcatctggtcaaagccctgctactggccattccccgcatactgctgctagtcatcatctatatggcgggaaccgccgtggccaccgcggctctggcactgcccgttcacaccatctcctggtatttcaccgcggattggggtattccggtgccgttgctcaatgatgtgccgttctccgcttccgggctggcgctgggcggtttcatggccatcggctggctggtcactgtgttcgccccacagtcgatgatgattcggctggggggcggcgtactgcgcgggctcaaacacagtcgcccggcgggcgcgccatccaccgaagtgggtggggctccacctgctccagtggcgccggcgcccaagggcggcgggcgcggcaccgtgctgttcaccatatgggccatcatcaccgtggccttgtgcgcgatgccgattctgggcatgccgatcaactggatgccgttcgcctagagcggggcggaatctcacacatcagccatccgcacacatggccgttgtgtatccgatacgttcgttccgtcacacttttacagggaattcacctcagatcagctctgggcgcagtcctcctcaggcccggtcattatgatggggcccaaacattgaagcgattgcaaggggatagctatgtcagatccgaagcgtcaggccaagcgtgccacacgcgctgagcgccgagcggccgaggaggccgcccagcaggcacgggccgagcaggcggctaaggaacgtaagcagcagaccatcatcggctgcattgtggtggccattattgtggtgctggtggccatcgctggattcgccgtatacaaggctatgcggccgtccaacaccagcagcagtagccagcaaagcaacatgaccgtggacgaggcctatagcaagctcaagaaagtcagtacccagccggccaacgccgatgacaaggccggcttcgtgatctcgagcaaggggtacggtcagaaggccgaaggggcgcccaccgtttccatctacatggagccgctgtgccccggctgcgcctcggtgaaccgccagcttgacccgacgctcatcaagctgatgaacgccggccagctcaacatcgatttgcacttcctcaatttccaggacaacaagagctccgacaactactccaaccgcgcgttcaacggtgccatctacattgccgagcatgatgacaatc

SEQ ID NO: 3581 - DNA, 3921 bp, Unknown
  R85_18m  MAG No. k141_26618
aacgaggcgcgattctttggctatgtggccgacaacagcgaggagatggaaccggaccgcatacgcccggccatcctgattttgcctggtggcggctacgccatgacctccgaccgcgaagccgagcccgtggagaatacgctaatgctcatccaggcctgccgggccgccggcgtgagcatcgaagcacacctgttccccgaaggcagccacggcctgtccctggccaatgcggaaaccgctggcaacggcttctatgcgcacatcgtcgaatgcgtgcagtgttggcctgatttggctgaagcctggttgcgtcgcctgttctaggcaaaacgctattacgctgtgcgccaagtgcgccacgcagttatggaataatagcaatcgtatgcatcggcagcagttgcgccggtgtccataaccgcgcagtcctgtgcgtccagccgggagagaaaacccggcagcggccgcaaggctgactactccgcggcaataccaaggagaacattatggatgatctcaaagatcaatccgcagtgtccgcgaccgcaacgaacgaggtcgtggaatcggaagaagtgcgcgcgcaggaagcgctattgggggaagctgatccaagtctgaccagtgccgacgacgtggccaaagccctgaatgtcgacccatcccagggcctgagcgaggaagaagccaagcgtcgactggccaaattcggcccgaatgagctcgccaccgccccgcccgtaccgaaatggaagaaattcctggcccagttccaggacccgctggtctacctgctgatcgcggccaccatcatctcggtgatcgcatggttcatcgaaaaggccaatgcgcagcccggcgcggaaggcggtgaagtgctgccgttcgacgccatcgtgatcattttgattctgatcgtcaatgccgtgctcggctacatgcaggaggccaaggcggaggccgcggtcgaggcgctcgcccaaatgacggccccgcagacctcggtgctgcgcggcggcaaagtcatgcgcatcaacaccgccgacgtggtccccggcgacatcatcgtccttgcggaaggcgactcagtctccgccgatggccgactggtcaacgcggccagcctgcgcatcgccgaggcttccctgaccggcgaatccgtgccggtcggtaagaagccggacacactcaccgaagccaaggcgctgggcgaccgtgccaacatgatcttcaacggcacttccgtgacgcaaggcaccggccgcgcaatcgtgaccggcaccggtatgaacacgcaggtcggcaagatcgccgacatgctctccgccaccgaagatgagaaaaccccgctgcaaaaggagatggattacgtctccaagatcctcggcattgcggtgtgcgtcatcgctgtcgtggtgctggtggcgctcgccgtgctggaaggcttcgacgacgtccatgacgtgattgattccttgctgttggccgtctcgcttgccgtggccgccgtgccggaaggcttggccgccatcctgaccgtggtgctggcgcttggtgtgcagcgtatggccgcgcacaacgccatcgtcaagaaactgcattcggtggagaccttgggctccgcttccgtgatctgctcggataagaccggtacgctgacccgcaacgagatgaccgtggagcgcgtggtcaccccgtccggcgcagtgcagatcaccggcaccggttacgcgccggaaggccgcatggttatgaccggtggcgtcagtcctgaatccgagcaggcccagattgtggccgatgaagtcgtcgccacgcttgtggccggcacgctcgcgaacgacggcgaactacgcgaggagaacggccgttgggagattgtgggcgaccccaccgaagtctcgctgatcgtggccgcacgcaaggtcaaggccgatcgcaagatcacgcgatacacgcgcgttggcgagattccgttcacctccgaacgcaagcgcatgtccatcatcgccaaggacagcgccgattcagacaagctcaccgtgttcgccaagggcgcgcccgacgtgctgttgagctactgcacgcgcatccgcgtgggtggtcaggtccgtaagctcaccgaaggcgatcgccagtcgattctcgccaccgtcgaacgtctctcctccgaggcctaccgtacgcttggcgaggcctgccgtccgctggaaaccagttctttggctgatgtgcccggtgtaagcgtcaacgccgcaggccaggtgtccgacatcgccgatcaggccgaagccatcgaaaccgatctcatctggaatggcatggtcggcattatcgatccgccgcgtactgaggtgcgcgactccgtgaccgaggcccatcgtgccggcatccgcacggtgatgatcaccggcgaccacccgctgaccgccgcccgcatcgcctccgaccttggcatcatcgccaaggacggcaaggccctgaccggcgaccagctcgaccagctgcccgacgaggccgcactcgacaaggccacgtccgaagtgtccgtgtacgcgcgcgtggcccccgagcacaagctcaagatcgtcgaatccttgcagcgtcaaggcaacatcgtggccatgaccggcgacggtgtgaacgacgccccggcagtcaagtccgcggacatcggcgtggccatgggcatcaccggcaccgaagtgaccaagcagagcgccaagatgattctggcggacgacaacttctccaccattgtggccgccgtacgcgagggtcgcgtgatcttcgacaacatccgcaagttcctgcgctacctgctgagttccaatgtgggtgaggtgttcaccgtgttcctcggtgtggtgtttgctggcttcctcggcatccgccagccggaaaccgtgggcgtcaccgtgccgctgctcgccacacagttgctgtggatcaacctgctgaccgatgccgcgccggcgttggctatgggcgtggacccgcagaccgacgatgtgatgggtcgtaaaccgcgtaaggtgacggaccgcgtgattgacgcctccatgtggggcgacatcatcttcgtcggcgtcattatggccatcgtcacgctgattggtatggacatgcacctatccggcggcttgttcaccgaccgctcggtggatgccatcggccatgaagcacagatgaccgaggcccgtacgatgggcttcacgattctggtgtttgcccagctgttcaacgcgctggcctcccgttcgcatctgcagtccgcattcgtgggtctgttctccaacaagtggctatggggtgcgattggtttgtccgtggcgctgcagctcgtggtgatttacgtgccgttccttaacggtccgttcggcaccgtggcattgagcccgatggcttgggtggaatgcatctgcctggccgcaatcgtgctgattgcctccgagctacgcaagattgtgctacgcgcgatagccaagcgttaagccatcgcaatagccctgattgtgggcatatagcagtgggccgggctctggtattcagggcccggcccactgctatatccaaacggctcctcatggggcggtaattatcccatggggcggtaatttcctcatggggcggtcgctgaaaacggcgttattccgcgaaaaaggaaaatgcgctaaccgccccatggggaagttaccgccccatgggaaacgggagaacgctgcagacctcagttggggctgccgtcggggccgtcagtagaggtggacccgtctagagacttctgctgtgcctgctgcttggccttctgctgtgcctcttggtcggccttctgccgagcctcttcctgagcttgcttggcggcatctgcctgctgcttggcctgcatcgaggcggtgatgtcggactcggccttct

SEQ ID NO: 3582 - DNA, 23222 bp, Unknown
  R85_18m  MAG No. k141_26643
agccgaaccgtgaagaaaacgccggaggcgtttttaggtgagggcgaacgacagtgagcaataattcagttggctgaaagccatcatttaattgcgttcgagctggccgcgaagcggactgagggagagacccccggcgaagccgccaaccatccatcaggcgtagcccgattccgtttcacccacgccgcttggccaaggcccatccggccaacgccaatggcacggacgccagcgtgaagatgaatggcagcatcatgcccacatgagggttggaggcgtcaagcacaatgccggccacggacgagccgatcgatgtgccgaccgtgcctgcggtggttacccagctcagtccttcggtcagggattccgccggcaccagatccttgacgatgaggttgccggtggcgaacgtcggcgagacggtcaggccggcgaggatttcgaagacgcccagcaggatgagattgtccattgacagccggaagaacacgtagccgacggtcagcagcgataggaacatcaccatatgcgcccaatgggagcctttgagtcggcaagagccgaacaccagcgcgccgatgcacgagccgaccgcgaacatcgccaattgcagaccgaggaagggctcaagtcccatggatttcatggtggcggtaatggacacgtcgaaggacgtgaagctcatattgaacacgatgaacacagcgagcaacggcagtacgccggcatagagcaatacgctcttgggcttggcgccgctgcgtttgagctggcgcagggtcagctggtcggcatcttcgcttgcagcagggctgccgtcatcgtgcgcggccacggtgacctgttccacgataaccggtggctgggtggatttcagcgagaagaatatggtgccgccgataccgcatgccacggtgggcacgaacagttgggataccgggtgcacggaggtggccagccaagccgccagaatcggccccagaataaagacgatctcgtcaatggcggcttccatggcgtaggccgtgttgagcagctgttcaccatcttccacaccgcgcaacgcataggaccagcgtgttcggaccaatgcgccgaatgagaactgcgtcagacccatgatgatggccaagacgaacagcagcggaatcggcacgcgcaccaacgccgcgaaggcgaaggcgagcatggccacgatctgcacggcgagcgcaagccggcccacgcgggcttggccgaaacggtcgaaggcgcgggcgtagaacggggtgacgcagctcatggccagcacataggcggcgctcatggtgccggcgatggtccaattgtcgtagagatggttgagcgccagaacgatgccgagactcatcatggagatcggcaatcgtgccaccgcgccggacaggcagaacgccttggctccgggcagcatgaacaggcgctggtagggcgagtggacagcggacgacttcgaaaccgcgcgagtcgtggacacaataactccttactggtgcgttgtccggcacgtgcgcccgcccacacgtgccatccgagggtagcggttcccgagcaacgtcacgcggtgcgtttcaaccgcggaccggtacgtggccagtcgtcttcatcgtcggagatgccttgcgatgcataaggtctctccaccggtgaaggccgtccgatgctgtacaggtcatgagcctttgggctcagtcgttgtcagattgttcgggaatgccggagctcaactcggtaaggatttcctgtttggttttcgcgcgggcgtgaagctcgcgcaagccctcgtcgggctcactgacatagtagagagtggcgtcgatactgtccaattccacaccttcgaccgctgccagcagcagtcggtacatgtcgagctgggcaagtttgcgggtgatgtcgtctggcttggtgggccgacgaccggttttccagtcgaccacggtaaagcgtgcggtggtgctggacgggtcaagtccaccgatgaataccgcatcgagtttgccattgaccaggcccacgcccggcacgtccacgacgatggcacgctccgtccacgccgggatgcgcttggcccacgatgattcggccagtctgcgctgccacgccaccagcttggactcggtggcattgtcgctgcttatggaagtggcggaggcagcggctgcggcggatacggattgttgagccgtgggctgtgggacagcgggctgccgtgtggatggcttgcggcattgccgctcccgttcggccaaatcggccaacatggcttcccgggaaacgaatcccgcatcctgacctgtatgcggcatgcttggttcggcttcatatgccagtaccgcttcatccggcttaccggcattgatgaattgctcagcccacgcatggaactgcgtgccggcctcggccgccggagacgatatgcgcggaatcgggcggataatgctacgccagtagaggcgctcctcccgttcgttcatgccacctacgcgggcttgcaggcttgtcacgttctggcgtcctgcagccagaacgcgttgcgccttggctttgactgcctcatcaagcgactggccgctggcggcatcggccatcaaatcggcgtcgtccaccagcaattgtgcccgttgcaggagtgggccggcgtcttggtgctgctcaagtgacgaggaatctgcggcgatgacatcgatgccgcgtgacagctgttcatgcaccgcgtcgctgagggtagccggccacggcaattcggcggcggcattcgtctgcgtaatcggcgtttgccacgcctcccccaccacggcgtcaccgtatgccgcggcatgctctccgataaagaacccttcgggagtggcaatcgcttcgccttgcgccgagatcagcatgggcttcccggcattggcggcttgcagccgttccacacagtcctgagccgatatcgcatgttcacgggcttggagcgcgtcatgcacttcaagccagaaattggatggctgagcggcgcgagagcctttgggcaccactgacgggtcccgcccggattcgcccgtataggcgcaataggtcatcagggcatcttcccgcgcacgggtaagcgccacatacatcaatcgacgttcgtcggcatgcagccgacgcccatattcctccgcctgcgtcaaataccagccggatgcatccacttcttccacgccatcgccgaattcgcgcatggagccgaacacttcatcatcgataagctccacatcatccaaagccgccaacgatgcgatggggtcggcttccacatcggcatcatgggggaatcgcggcaaaatgccggcatcggcgcgcataggcacgggcacggcggtggggttggtgagccaggagtcggcggtctcatgatattcgggtgcggtccagtgaccttgctcggtgcctcccgtatggtgttcgtccagcacgatcttgagatggtcgccctgattgctggggaatccgccggcggtaagccccactaccgcaacggcatcccattccaaccctttggactggtgtacggtcatcagttccacatccaccggagcgtcggggagactggcggcttcatcctccaccgaagccagatgatccacccatgtgatgaacccatgcaacgagggagtttgctcagcggcaatctcttgcgtgtacgtatccaccaaatccacaatcgcatccataggcatatgcgccaaagcgggattggcgcggtgctgcggattatgcagcacaccggccaatacggtgtcgatgtcaagatccaacgcttctatgccggcgcgaatcacgtcgcccagtggccgcccgacggcatcatgcacctgacggagcatcaccgcggcccgggttatggcgttgcgcccgtgtgcgctcaaccgttcaagcagttttaccaggtcgccgcgtagcaatacgtctggcaggaataccgcattggccacctgatcgcggtactcacgcaccacagccgtccattcattcgctggtgtatccgtttgggcaaggccggcctgcaccaatgcttggaagcgttgttccatgttctgttcttcagcaaaacgggccaacatggtcaaatccgctgcggacatggtgaatcgtggcgtggccagcaagcgcatcagcgatcccgtatcggtgtggtcggcggccacgtgcagcaacgccatcagatcgcggatttccggacgttccagcagcgcggaatagccgaccacgaatgtggtcaatccggcctgttccaatgccgcctgatattcgggcatatgtgatttggaccgaaacagcacggcgaccggcgctttctgttcgcccggcatctgttcctgttgttcggctgcggaacggtgccgtgcgatggccgtcttgcagaaacgcactacggcgtcgatctcctgcccggccgtggcgaagcccagtactcccaatgttccttcgggggcatcaggcatggggtcgagcgatgagacatcgacctcacgcatcaatgagctggagggacgcgacggattggagcgcaacggcagcgtgagattattggcggcttcgagcactatacggctgttgcgcctggtgacggacaacgggaatggcttgtatccggcaggcaggtggaaatcttgctggaacatacggaatgcaccagggctggcaccacgccatgcgtaaatcgactggaacggatcacccaccgcgttgacggcggacctccgtgacgcatccacatggaacagtgctgccagcagagcggcctgcgtggtggaggtgtcctgatattcgtcgagcagcacatggctgtacctgcggcgcgtgcgctctccgatggaggggaagcgctcgataagctgatacgcggcaatggtgaagtcggagaattcggccatattgcgttcccgcttggcttgggcataggcctccaccagctggagcagaatatcgcgtttgcgtgtggtctccagcagcgcaccgcaatgataggcgcagcgggcgtgcaaatgttcggcacggtcatcgagcttggcttgccagctggcgtcggtatctttcttcagtcgtttgatcttggggattttcggctcgtcctcgggcatgggttcgtctgcgacggcttgctgcaatcgattgatgaatgccgaatcccattgccgtacttgattgatcgcatcatcgaagctggtgcagccggcaccgatcatggcactgccaatggcatccgacaacgccagaacacggttcgccaaactggagaaggcgccaaaatcctcactgaacgccagatccatgtgactgtcgatgacttcggtggccagttgaagcgctccggctgcgctcaatggttgcgtgttctgatcgaatccgacaagcagtccatattggcgcacgatggtctggaagaaggcgtcatacgtgaaaatggccggcttgaggaatgcccgatcagacaccgtggcggtcgtagagcccgccatatcaccggccactgcggcggagacgcgttccagcagttcgcctgcggccttgcgtgtgaaggtcaggccaaggatgcgttcaggtgccacacctcgattgataagcgcgatgatgcgttgggtcatcgtaaaggttttgccggaaccggcaccggcaaccaccagtacgtcagcatcgactggcgcatcgatgatggcggcctgttccgcactgggagtgaacgtgctcatgcttgcctcgtttcgaaaatcgtgtcgatctggcccgcacaggcagggcagacgttcttcatacggcagaatccgatatgggtgtcttgcggatgggcctcgatgatggccgacctgctggccgccgcggcatagaatacgcgggcgatcatggtcagcgaccataacgtctgcgtaccggcgagcgcggcgaattgcgcccacgcttcggcactcacaccttcgggaggagtagccggatctatggcgggtatgtcgaagaaacggttggggtctttataccagtatcgtggcgtgaacggttcggcattcaacgaaccatcagtgaacagcggcggctggaaggcaccttccggggcgtagcttctggctggtgccgcattctgcccgacatggaacagcgcgctttggctgatatgcggcattgcggcaagtgccttggcaccgcgcggcccgtcttcggggaacacgaggccaagctgatagcacacgagctgcagatcattgaaaatctgtttgaccgtgggcgttctgcctgttttgtagtcaatgaggcgaatgcattcgccgccgtctgcgagtacgcgggtttccatacggtcgatgcgcccggacagtctcacggtcagatgctcgtccatgccttccggccaccctccgaccagtgctcccatcagacggaccagcatgttccgatcgatcgggtgcatgccgggcacggcattgtatgcgtcgagtatgtcacgcacatcgaatcgtgcggcaaactcccgttcgcattcggcaccggccaatgcgccaatgctgaagttgctggagttcttgccaagatacgtttccggatcggcgtcgctgcgcacaaagtaatcggcgatgttgcgcagggcatctgccgcggactcgtccttacgggtggcctcatagcggttccgggtgtcggctatggcattcggatcggggcgtttgctctgatagatggcattaagccgtgccgtgacagcctcgatgcggcgttccgtgccggccgtggagtccaagcccagtgtggccaacgtctgggcattgtgggaaagatggtccagcccttcctcgctgccttgctgtgcaaccgcatggatgagggttccgaagctggtggccacggagctggggcgaggaccggcgaaccggttctccagcatccagcacaccggacatgcccataggctgtcgaccgccgatggagacagggtgaccatgggtgcggcctgcgcatccgtcttgcctttccccgtttggataccgtcagactgtacaccgccagatgacgcgctgtcggatgaggcactgtcggatgaggcactgtcggatgaggcaccgccagatgacgcaccgccagatgacgcgctgtccgattgggccggcgattccacgaacgcccagctctgcggatttgcggcgcgcacaccatgctccgacaggagtgtcaacgcaaccgcggcgtcctttgcggcagcctgctgcggttgagcagtggccagaaccgcgcgggcggcgctgaccaacccacgtgggtcggcgtccaatccggccagatcatattcggcggatcctgtatgcgcccccactgtggtgaaaggcgcctgttgccggttgcgcggatagtattccggcagatacccgaaaagaaagtccgaggggctcatgctgtcgttccataccgcgctgatcatgattcgccgtgcacgggtcagcgcgaccaggaaacccttcttctcgcccgacagcacagccgcgaactgcggatcatgcccggttttgtcactttcttcaagcgctcccctcagcacgagctcggcaaggtcttcaccaccgaacatggtgttgcgcccggcgaggttcggccacacgtcttgctggaccaccggtatccacgcatatccccagtggcgtccggccgcgcctgccggcgtggtcaatgtcacagcgtcttccaccggccctatgtgggccaaggaatcggcctgcacttccatgccccgaacctgtgccatgaatgacgtgatgtctcggctggcggtggaatcatcggcgaactggaacaggcgcattgccgcgtccagccggtcattggccgtgcgcccctctgccgtgttgaataatgccgcacgctgccagaccggtgccagaccggtggcgttccaggcaacagacagtgcataacgcggctgtacgcgctggcttgccggcagccgctccaagccggaagcaacgctgcccaccagatgccacaggttcgcaaaagcgcgggcctgagggtcgttgccaagcaccgcatggatggatgcgagcgcagcctgcgccggcgcggcggcatcatcaacggcaagcatcacgtatagcgcgtcaacgccaaaggccaagtcatcgtcggagggttcaccgagtatttcgacagacactggcgatggaaccattgatgaggatgtttcacgacctgtttcacgccatgtttcatggtatgtttcacgcaatgtctcccatgccgtcgtcagagaggtcagcatggcatcatccgtggcgagatgcgccagcgactccaacgaccccatggccgattcgatcggcgcaagccttgcgggacgcccttgaccgggtctgcccccggcactcaccaacgggccgttcatcaacgtggccactctagtccttatatatgccgcgcaggaagccaacgtcatctggcattccgccattccctcggcacgcaatcgggcaagctccacaagcgcgaacaatccctgcacgaaagtctcgtccttcaaaggacgggtgaccgacgaataccgcaccggcacgccatctcggcgcagtcgttcgccgaacagccgcacggcggcattgtcgtgggtgatgaccgccatgtcgttccaccgaatatgccggtcgagatgcgcccgcttgatgcgccagaccacatcatccagctcctcacgtgaggatcggtacaggccggcggtcaccgtgccgtccgactgataattcgctgcatcgactccgcccagtatggcggtcagcttgccgggacgctcggccggaggcagcggctcgtcttccggcgagggaatcgacagcgaaatacgagacgcgatcacatcagccatcgtcatgtgcgactgatcagcgccggtactgccgccaaccagctgttcttccttggctttcagccacccttccacggcacggcgcatcagatattccggatacgatccacggaaggtctgcaccgattcatccgggttgccgaccagcaccaacttgacgccggcattccccaactcctccaagaagcgcatgccggccagcgtggtgtcttgaacatcatccacaaccagcagccggggcaagcccaacgcctccatacgcataggccggtcggaatcatccgcgtgatcggcggcgaatgcctcatgcaccacacgagctcctgccaccagcaaatacgaggcatccaaacggtattgccccggatatgccgcgctttgggctgcaatatattcacggcgcaacgcgaaagccaaacgccattgcaccgacaatcgcgcgtcctccgtcacggcgtccaagagacgtggctcttcgtgaacgcctacaccgagctcgtccaatcgggccagcatatcgcgcaactggccgataaacgcatctgaaataccgcgagtgaacctatccgcgctggtcgagccgcctgccgacgtcggagacagcgaatccgacccttgttgcgagaggcttgattgtgcggaagcggccgagccgggcatctcgccggcaccggcatcgcgtatgagtttcgcccagtcatcctgggcaaagtagacgcgtagcaaatcacaggtgccgcaatcatctcccgctacggcatggcgcagatgcacggccatgacttgacgcagcaaagcatcctgttccgcaccgttcaacaatcgaggcgacggcaatccagttccctcgcgcgaagctgatatggcccggaatgccacggcacccagcgtggtgaccggcctggcctgcacggaaaacccgagctcacgaatcacccgattgcccaatgcgtcggcggccacacggccggatacggccatcaccgcctgcgtgccaccgtagcggcgcagccccgccatcaacaccgataaggcgaattcggttttgccgcttccaggcgtgccgacaatcagcctcgccgctccatcacggtcgatgccgtccagcactgttccaggttcaagtctcgtcatcatggctccagcctaaacccgaccgtcacagagggaaaaattttaccgaacccgacgaagaatcgtacccttgacggtatcctgtagaacgaatgcagggagagcgcattttccaaggagggagggaacagatggccaatattccgatgaggccgccgaagctgcccggatatgatttcgtccagatgttgggaagcggtgccaccgccacggtgtacctatataaccagcgtatgcccgcacgcccggtggcggtaaaggtcagcgccaaaacccttgacccacgggccgctgccctgttcaaccgcgaggccaacttcatggccaagctgtcatcccacccgtacattctgccggtatatggtgccggcgtcacctccgatggccatggctacatcgtcatcgaatatgcgccgggcggcacctacaacagcatcatgaaggcccggtccatgacctgcgagcaggtactcgacctcggcatcaagctgtcaagcgcgctgttcaccgcgcatcgcagcaatatcatccatcacgacatcaagcccagcaacattctcatcacctcgcagggtttgcctgttctgggtgatttcggtatctccaccgatgtgtatgaccgtaccgaaaccggattctcgccgccgtgggcaccgcctgaagtgcttcagcatctgaccaatggttcggaagccgccgacatctattcactggcggccaccctgtacgccatgttcgtcggctgctcgccattccagcacgaatatcatccacgttcgcaatcggaactgatttcgctgatcgtcaatcagccattgcctcgcctcaaccgccccgacgtaccggccgatgtggaagcggtgctgcgccgggccctgaacaaggaccccgaccagcggtactactccgcgttggagttcgcacgcgccatgcagcgtgtgcaattcgcatatttcgggcatgccactcccgttaccgtggaagggatgccggcctaccccaaagacatcgagcgtcggcgccgggccacggaccagcgagatcagaccacccgttcgtcacggcgatgggtcaaaccggtgggtattaccgtcggtatacttgcggcgatcaccgcagcggcactgatattcgccttcgtggtcgttccccgcatggacagcgccaccggatcagataccaaacaggtggcgacgcccggcaccaaggatgatgacaacaaccgcaataatcaggatgacgtgattaccgataccgcgaacgcccagattccttccccggagaatctgaacggcacctatgcggcggatgggtcatccgtgacgttcacctggacgaatccagacccgcaaagcggtgatacctatgcgtgggccatagtgcagggcagcaataccgaccagagcgcgcaaaccgtcacaacgtcagatcccacggtgaccgtcaacgcgcaggaaggctcgcagacctgcattcaggtgtccattgtgcgcaagaaccgccagatgtccgtcagccccgccatcgcctgtgcggccaagccgcaagagtgatccgctcgccactgctgggcataccaccttggcattgcgtatcgcatcaggcatgcgcccggcagtggcgaattcaccaaatggacaacaggaacggcaggtattggaaccgtaaagcgttgtcattacactagcaaccagagaaaccagggttcagggagttcagatggccacatcgtcccagtcatacgatcgtcgccgacgcatcagcgcggctttgcgccgccttatgccctccggagggcatacgtggacggttcccgtaatcacgctcctgctgcttctgggacttgttgccggcgcggtgatcatgagcaccgtcacgcgccgccatgtgcaactggacgatggcaccgtgtgggtcacttcgctgaagaaccagaaggccgcacgattcaacgtaaagaacaaggaggccgacgccggcgtctcctcctccgccccacgattcgacatcgcgcagcataatggcgacaccatcctgaccgaaacgaccaaagcctccaccatcaaggcatccacggtcagcaccggtgtcaagaccgacatcaaagccaacaccaccactgtggtcggcggggataccgtagccctgatcaacgagaagaccggcaatgtgtggaccggcttgtcggaaaaccttgattccgtggcccccaccacttccgatccgaaaatgaagctgggcgagggcgggcgcatcgcagtaacccacgatggcaaggtctacggataccgtccatccgacggtatggtgctgcgtcttgacaatcccagcagcgccaaggccaaaaccctcgaatcgctgaccgacggcaagcagcagaccgttgaaagctttaccgtcatcgggagcacgccggtaatcgcaaccggcaaaaccgtcatattcaagggcggccgcgtcgatgtcgacacgaccggcaccctcacccttcaggagcctcccaccgatgacgtacagtccgattgggtggccgcggcatcaccgagaggccttacgcttatcccgttgaagtccaatgccaaggcgaatttcatagccaacgggggcaaggcgaatccggcacgaccggtatcgtccaagggctgcgtgtactcggcttggagccagaaggccagcaactacattcgcgcctgctcccccgcggataccagcgtcaagccgcaaaccctcgaatccgtcaatactacttccgaattggtgttccgcaccaaccatcgccttgtggtgctcaacgacacggttaacggcaatgtgtggaaccctgaggattccaccaaagtcatcaaaatacagtggaacaaaatacaggccgagcagaccgagaaagaacagcagaacaacgactcggccaacaaccaccacgacttctccaagacctgttccgcacaatccggccaaatcaaagccgaggatgatgaaatcggcgcacgagccggttcggaacagattctcgacgtgctgcgcaatgacgagcagaccgattgttccgtgctgaaaatcaccaaggttggcgcaccaaacaacaaagacgtcaccatttcgccgatttacgacggccggtatctgcaactcgatgcctccgccacatccgcaggcaccgttacctttacttacgatatttccgatggccgcggccagacctcttccgccacggtgaccgtaaccctgaatgatggaggcaaccacgctcccgtacagttcgacactcctcccgagatcgatgtggagcagggagccagttataccgccaatgcgctgagcagcttcaacgatccggatggagacccgctcactctggtctccgctgtggcccagaacaccgacccggtgcaggtgtccacccgagccgacggccagcttacgttcaacaccggtgcgctggcgtcgggacgcgtgggcgtcgaggtcaccgtctccgacggcacggcgaccggcaccggcatggtgtatttctcggtcaagcccgcgaacaccttggccgcggtcatcgacccggtagcgaaaaccaccgttcccaacacggataccgtcgtcaagctgtcctcttacgtgcatggcacttccttgcagccggcacagctgactcaggtggatacgcccaacggcgcttcgacgaccaccaatgcggcggatatgtcgttgacgttcaaggccaccaatcccggcacctattatgtgccctacaccattactcaaggctcgattccggccaccggattggctcgcgtcgaggtacagcccgccaccggcgaggccgccaaaccggttgccgccaacgatgtcgccctgcttggcgcggataataccgccattgtggagccgctcaccaatgacgtcgatccgatgggcggcgtgctgtccgtcaccacggtgagcgcaccggccgactccggcatcaaggttggtctcgtcagccataagcgcgtgtatatcactgcgcgtcaggtgcccacgaaacccgtcgcccttacctacaccgtggccaacgcctccggaaccgccaagggcaccatcgtgttgcagccaccggctctgaccacctcgaattcagtgcccaaggccagcaatatcaatgcccaggtgcgcaccggcggcatcgtgtccgtggatgtgcttgaccatgtggcctactcggatggcaccacggtcaagctcaagaacaacctgcaatacgacaaggagacgttcaagggtctggccttcgtctctggagacacggtccgctaccaagcatccagcgagaccggcaacttccccatcacctatacggttgaagacaatctgggtaatgtggcttccgccaatatcaccattaccgtgcataagagcgacgcagcgagcaaggccgcgccaaccccgcatgacgccgaagcgcaggttgccgccggacagaaggtccgcatccccatcacactgaccggcatagacacggatggcgacgacgatcagctgttgggtctgggcaacaaggcacccacgctgggccgcatatccgaagtcggttccgactacttggtctatgaagcgtatccggattcgtccggcaccgacaccttctcctatgccgtggaggattggaccggtcagcgcgcacaggcgcagatccgcgtgggcgtattccaaggatcgtccgactccggcgtatacgccagggatgacgaaatcacgttgaggcccaatacggccgcaaccgtgccggtcgcgcagaacgacatctccggcgacaacaccaatctgaccgtcgacaagcatgtcgaggtccaaggtctcgacggggtgagcgcgaaagacaacatgatctccttcaccacgcccggcagcgccaccaccgcctatatcgcctacacggtcaaagacaaggccggcttgtccgatacggccaccctcacggtaaacgtggatccgaatgccgccatcgagccgcctaccgcctacgactatcgtgtgccgtccgccgccaccatcgataagaagtccgtggatgtggatgtttcccagtggatcgccaatccttccggcacagccaatgagctcaaggtcggcgtgcatccctccgccagcgctcacgctcacgtcaagggcggcgagcattcgaccaccatcaccgtcgacctgacgtcacaggcgcgagccgtgccttacacggtgaccaatacgaaatacaacatcacctccaccgcgttcatccaggtaccggcctatggtgtctttccgcccacgttgcgtcccaaggcaccggaattgaaggtcaattcgcgtgagaccattgaaatcaacatcaatgactatgttcgcgtcggtgccggcaaggaaccgtatatcgaaagcgctgattccgtcagcgccaccaaggcttccaactccgatttctacgtgaacgacaagaccctgaagttcactgcggcaaaagactacgcaggccccgcctccattacctttaccgctgtggacggcaagcagggatcggataagaccaagatcatcaattccgcagtgatcactctccagatcacggtgataggccgcgatgtgccgccgcccacgttctcgtcctccactattgatgtcgaggcgggcgcggcccccaagaccgttgatctgacggcgctcacccatgcaccgtccggcgtgtatgacgacgagaagcaatacacgtattccggcggaagctcatcgtccgggcgaatcaccgctaacctgtcccgttccggcagcttgcaggtttccgccaccaaggatgccgctcctggcaccaccgcgtccattcccgtgcaaatcgcatacggcgcgggcaccgtgaatgccggtgtgaccgtgcgcgtagtgtcttccacccgtccgctggcacgcgtcggcgacaagacgctgaagatcaaggccggtgccagcgatgccgtgaacgtgcttaccggcgcgtacaatccgttccccgattcctcgctgaccgtcatcagctgcaaggcggatgacgccgccaaactcactatcgccggatgcgatgcctccggaaacgtcaccatcgccgtcgcatccgatccgggtgcttccacgaacaccgtgctcgtcaccgtgcaagacggcagcaagtccaaggatcgtgaagtcaccgcatcgattaccgtgtccgtgatcgacaagcccgagccgccactgctctcccccgtagccggggaaccgcaggacagcgcggtcagcctcacatggacgcccggtgccgccaatggcagcccgatcaccaactacaaggtcagttggaccggcgccgccactggagagaaggattgcggtgccgtcacctcatgccaggtcacgggtctgaagaacggcaaaacctattccttcaccgtcgccgcgcgaaatgacgtcggttggtccaaaccgtccaccgccgtcgaagccacaccggacaaggtgccgtccgctcccaccgatgttacggtcacaggtggcaataaaaccgccaaagtgacgtggaaagcgccgagcggtgatttcagcgccgtcgacaactattcagtgaccgtcaccggtgcaggtgctccgcagaccaaggaaaccggcaatacggccaccgagctgtcgtttacgttcaacaacaacgacatttccgatggcaccgccattacggcgaccgtcaaagcccataacaaaatcaattggagtgccgagtccgcctcatcacagccaaaggacatctggggagacccggatgcgccgaccattgcgctgtcgaacgacgacaccacaggaacggcgaaagtcactctcggcaacaaccgcaatgccggctgccggcgaatttccttgggaggagacatcaaggacaccatcgattgcagtgacagtggcgctacgttcgatatcaatgagaacgatttgaacacccgggaaatcaccgtaacggccaccgtggtgccgcagcgcgatgcttccgccggcacaggcaagagcaggtttgtcccgcagtacaatgtccagccgcccactgacgtctacaccaccggatccggcagtacatgcaccgtgcattggaccaagcaggggcatgcgcagtcctacaacgtgactgccgatggcatcgattccggtacagctactaaccggaactcactcgacttccgaatgagtccttgggccaaatgcaataccgcatcggtgcaacaggtgttcaacggcgctaccagcgatgccgccaccggaggcccgtacaatggcgctccttacacctatgagaagaaggctgtaatcaacaaaccgcaggagctgcgctggtcagacaacgctcacgtcattaacgtcaccggcggttcggttgaggtctatggcaagcaggccaccgtacaaatcatcatcaatggccaaccgttcacgtggaaccccggccagccattggacgtcaccgacttggccgtggccgccgatggcaactacacgtggagcgtcaaagtcaccggcgggccgggatactccggtctcgacaatacggcggacggcagtagcgtcgcgggcacacgcccctctgattcctcggaggggaccgagtcgctcaaatccggtaccgatgtcaccactttggccaagaacccttggattcttggtttcggtaataccccaatatcgtcaaccaccattcacaagcagtaggagaacatccatgagcgagaacatcgacgacgcgacgcagctgtctgacagcacgcagctatccgacgccacgcacttgtccgatgccacacatctggcatcggaaccgcacactggcaccaccccgaacaccgagacggcacagcaacccgttgcgttgcctaacctgccgcagcggccgtcacaagcgtcgtcagaaaagccgtctcctactactgatgccgcctccattcctgcgggcgatgacagcaccgtgctcaagccgcgcaaggacgcgacgccagccatcccgcagcaggtcggcatgccggcaaagaccagcacgcccaaagtcgcgcttccgcacttcggacgtaaatccggcaagcaggccgctactgcgaatgctgcccccgccacccagacctcccgtcaatggacgaccacaaccgccggcaagaccgcagcctccaacgccgaaaccgtggctggtcgcgggccggtagccaatcagcaggccgccgcgcaatcccagccgcaatcccagccgcagcgtcagtcgagcaaagccgcgcaagcagccgcatcggcactgcccgccagcatcaattccggactactgccccagcccacggctcaggtccgggatttccagcagtccttcaatgcgctggtcgagaatgtctccaaggtggttatcggcaagaccattcccatcaagcaatgcgtcaccgcactgatggtcggtggccatattctgcttgaagacaaccccggcaccggtaagacccagttggcccgaggcttggccaactccatttccaccggtttcaagcgtattcagttcacgcctgatctgctgccttcggatgtggtgggtgtgactttctacgatcagaagcgcggagaattcgagttccgcgagggcccgattttcgcctccatcgtgctggccgatgaaatcaaccgtgcatcgccgaagacgcagtccgcacttctggaggttatggaagagcagaaagtcaccgttgacggcgtcacccatgatgtaccgcagccgttcatcgtgatcgcaacccagaaccccatcgagcagctcggtacctataagctgcctgaggcgcagatggaccgcttccttatcaagacgtcgattggctacccgggccatgatgtgtccgtcgatatcctcaagcaggtcgatatcaccgaccgtgcgcagaccatttccccggtgctgagcggtgacgatgtcatgcggctgcgtcaggtggccaccgaaatctatgtggatgatgcgattcgtgaatacatcgtcaggctcgtcgaggcgacccgccacaacgagaagatcacagtcggctcctccatgcgtggcgctttggcgctgacccgatgcgcccgtatctgggccgcggccgatggccgtgcctacgtggtgccggatgacgtcaaggaccttgcagtggccgtgctcgcacaccgtatcacgctgactccggaagccaccttcgatggcgcgactccggaaagcctgatcgcacaggtgctcgaagacgttccctcccccaccatcggttcctgatagggcctggaaaggtatccgaccatggcatctacatccgccgcattacgccgtcgccggcgcgctgaacgcatgttcaagcgcgcggtaagacgcatcagacggttcttcgcatcctacgtctcgcccttgggctgggcggtaacgggcgcaggcatcgcatgtcttattgcgttcctgcctctgggctggtatgagctgctcgtattcggcatcgtggcgatggtgatgatgctcgcggcaatcgcgctttccctcggcaacacacgcttccacgcgtccatcgccgtatccaatcatcgcgtgaccgtgggagacaccatatccgttatcgtcggcatcgacaacaccggcagaacgccgacaaccacggcacgcggatatctgccaatcggcgatgcgcatgaacgattcaacatccccatgctggctcccgggcaatccaagcaaaccgatgtggagttccgtacggtatcgcgcgcaatactgcccatcggaccattgcgcatccgcaagggagacccgttcggcctggtacgtcacgaaaaggagctggccgaccgcatcaccgtattcatccaccctcgtaccgtgcgtctcgataccctgaatgccggcgtgccccgcgatctggaaggccaaccatccggccagatcgtggatgatgatctcgacttctacggattgcgcgaatacgagccgggcgacgacgtgcgtaacgtccactggctgagctccgcgaaaaccggcacgttgatgattcgccaatatgaagccacgcgccgcaccgacacctcggtgaccatcagcgtgaacccggatgagtacgtcaacggcgaggaattcgagatggcggtgtccatccactcctccatcggcgtcaaatgcctgctgcagaatcgcccgctgttctgtcacgcgggcaacgcgcacggccagccgcgcaacgccatggagttcctcgacaacgccagtgccatagagcctgatcgtgaggacaatccgaatctcgccgagggcacgctgaagcacagtcctgatgcttcgttctattttttcactgttggatcgctgaaagacatcgagcaaatcaagcgcatgaccttggccttgccccgatcggccagctgcgtggtattgcaggccagcgccggcgccaatcgcggcatcagaagattcgccaacttcacattggccaccatcggcgaactcgatgatctcccactgatcatgggggtgctcgcatgaccttcgaccagtccagtatcaccaataccaataccgctgcgtacgccggatcgagcggcacatacaccggcacttcctccggcacgtacaccggaacctccaccaccaccggctcctgggccgactccacacattcggttatctggatgaccagaggcaatgtgcttcgcggcatgggcctcagtcgccagccgtggggcaaacgaatcaccagcctcgtactcatagcggcgatgatgttgctggcgcaagccaatctcatcgacgtgtacggcggcgtggccacttgggcgatcgccgccgtaccggccaccttgctgggcgcgatcatcgctctggcgggcatgttgccggcgttgcgactgtggtggcaaatcgtgtttctggcgtttgcccaattcatcatcggtccggtggtaacgctgagttccaccacgtcccattacgtgattcccaccttgaagaccttgagttcaggttgggaaatgacgtttggctcgttcaagtacattatttccgtcgatccgcctctgggcacgcaagacggcgtgctgctggcggtatggaccatcggcctgtggcttacgttcctcaccggcgtgtttgccattaatgccaacgcatggttgtctctggtgggagtgccgccccttgcggcggccgtggccgtatgtgctctgctgggtacggacagcggctggcaacgtgccatctgcggcattgcctttgccttgctgctgattatctggctgtcttggcgtcttgaactgctggaatgggggcgctggatatccgcgctgatcatcgtcgtgctcgctgccggccttgctttcggaggcacgttgctggtgccgcaggaccgtttcgtgctgcgtgaccgctacgatccgccgttaagcccctacgattacaccagcccgctcagcggcatgcgatcctatatcaaggaccacaaaaaagacgtgttgctgaccgtccataatctgccggccggaacaccagtcaaacttgcggtgatggatcgattcgacggcacagtatggaacctgtccgattcttccgaagccacggactcctcgaattatcatcgcgtgggcaccacgatcaaggcggatgagcagggcgaatccttcactgcgaccttcaccgtcgatcagggattgaccgacacctggctgccgctggcgggagcggccactggcgtgagcttcgccaacgatgccgacaacggcaatgacacgttctactacaacacggataccgattccgccattattcccgccggcacgcgtaaaagcctcacctataccgaatccggcattatcgcccgcaagcccaccgataagcagatcagcagtgcggccgcggcccgcatcacccaaccggaagcccaggatgttcccgattcggccagcaaactggccacgtccattgccggcggacagtcctcgggcggtgccgcagccacggcgttggccgacacattgaaagactccggatggttctctcatggactcgaaggcgattatccctccgatgccggccatggcaactaccgtatcaacaagctgctggcaggcacggccatggtgggcgactccgagcaatatgcctccgccatggcactgatggctcgtgagctgggactgccctcccgtgtggtcctgggattcctgccgaaaaacgaggatggcgaaatcaccgatgcccgcacggagaagacctcgggcaatggcaccaaaatcgaattcaccggcaacgatgtcaccgcttgggtggaaatcaaattgcagggcctgggatgggtggcgttctatccgacgcccaaggagaccaaggtgcctgatgaaaaccagaacctgacgccgccgaatccgcagacgctggtccggcaaccaccggtgccgttgaccgacccgctgcgcgatcagacgcaggccaaaggccagagttcgttggccggtaccgacgccgatgattcgccgaccaacctgttctgggtgcggttctggcgagttactcgtgcggtagccatctatggaagccccctgtggactctgctcatcgtttgcggactaatcctgatatttaaagctgcattgctggcacgtgcacgacggcacggcagtccgaaagcccgtgtggcagcggggtggaatgccatacacatacttgccgagcaaagcggcatcacagccaagggcactcgtcgcgatcaggccggcgcaatcgccagtcagctcggcacggacgatcaggcactgattcaactcggtcgggaagccgactacgccacgttctcggggcaagacattgcatcgggccaagccaccacatattggaatggagtcgaccggttgcgcaaggcaatgctcgcttctttgccgcgtttcaggaggatacgtacacggctttcgctgaaaagcgtgtctatattggcaaatagacacgcagcaaagccgtatacagcgcgagtcaagcacaagcgtaagaaggggaagacgtcatgaccacaggctccatccgtatcgcgatgaccagtgacgcgggtcttaggcgcaagaacaaccaagacaccggattcgcccaacagggcgtgttcatggtctgcgacggcatgggcggcggcaaaggcggcgagcaggcaagccagttggctgcccagcatttcgcgcagctggcttccat

SEQ ID NO: 3583 - DNA, 3699 bp, Unknown
  R85_18m  MAG No. k141_26684
cactgagttccatgttggtgccaaggactgccgctggatgactcttgatgagatgcttgccgaccccggcatcaacaaaatcaatcatgatgtcgttgcgatggtgcgggataacttgtaattgttgccacttcgggcatatgacgattgagccaaagcatgttctatgtttcgataatcatcaaaagcagagcatagtatgctctacggggatttttctataccctgaaaacaccgaaaatcaggatatagggcagtagcacgaattagccaacagcggcttgtctgcgggcaataatgacgttgctcccgcggattcggataaggagaatcgtagcgaggatcatggtgagggccatggcgagtaatcgatcgtatcggagacttgcccaacacgcacgctaagatgggcatcgcaataatcggcaatgagcaggtaatcggcgaggcggtgcatggagcaggaatccaacgagcaagaacctaacgaggcgacggaaatcgtaggcggcaaagtagagaccgtcgaggtttccaagcaccccgaggcttccatacccgagaccgatttgtctctggcggatatcgagcgccgtcgttcgcatccgttgcgttgggcgctgattattcttgccgtactgtgcgccatcatcgcgccgtactggttcggccgttcgttggcggtaaataatactgactccattgtgaccgtgctcgggggagtgtctccgcaaggcatcgcgctggtcggttgggtgaccgtggtgattgcgtacgtcggattggcgatggcggtggtcgtctcgccgtcctggccgtggttgatcgtgttcgtgatcgggttggccggcgagcagttcatcgcgggactcagtatgctcaatctcaatttctggtattccacgtacgtggtctacggcaagcaggccggcctggcgaatgccgcgaatctgggcattatgggtgcggcgatcggcatcgccgtatatgccctgatgttcgtgggtctgctggtgattatccggaagacctcaccactgaacgtactgaccaaaagctgggcgagcttcattctgtacttcgtgattgaaaccatcgccctgctcgtggtgttgtttggcggattgctcaccactgtgtgagcgcgtgtgccccagtccggcccctgccgtatagttttcatttggcgtaatttcgcccgcggatagagagcgtttcgagcgaacctgcacgaaacaccgcgcaacgacacaataaggaggacgccgtggcactgacggctgacgagaagacccagattatcaacgagtacgcgacgcacgaaggtgacaccggttcccccgaggtccaggtggctctgctgtccaagcgtatcgccgacctgaccgagcacctcaaggagcacaagcacgaccaccactcccgtcgtggtatgcagctgatgatcggtgaccgtcgtcgcctgcttgactacctcaagcgcgttgacatcaaccgttaccgttccctcatcgagcgtctgggtctgcgtcgataattgaagacttccgcccgagtacctaggatggtgctcgggcgttttacatatcgccagccaacggcaacaacggcaagagggttagaggataggccagcaggtaaggccgacaagagaacccgaatgaaggggttgacacgaggaacgacggccaaggggccagtcgaaacaaggtatgtgacgtccgctgaagaggacagttgcggttcaagcgagtcgccaaaccgcagcacagtatgtaggaataattagaaaattaaagaaggaggaaccctatggagggtcccgaaatcaaggccgttgaggccgtaatcgacaatggatcgtttggcaagcgcacgctgcgcttcgagaccggccgcctcgcccagcaggccgatggcgccgtggccgcctacctcgacgacgattccatgattctgtccaccaccaccgccggttccagcccgaaggagaactacgacttcttcccgctgaccgtcgacgttgaagagaagatgtacgccgccggcaagattccaggctcgttcttccgccgtgaaggccgtccgagctccgaggccatcctcgcctgccgcatcatcgaccgcccgctgcgcccgctgttcccgcacaccctgcgcaacgaagtgcaggtcgtcgagaccgtgctcgccgtgaaccctgatgacgcttacgatgtcatcgccctgaacgccgcctccgcctccaccatgatctccggcctgccgttcgaaggcccggtctccggtgtgcgtctggcgctgatcgacggccagtgggtcgccttcccgcgttggagtgagcgtgagcgcgccgtgttcgagatcgtggtcgctggccgcgtgatcgagaacggtgatgttgccatcgccatgatcgaggccggtgccggcaagaacgcctggcacctcatctatgacgagggtcagaccaagcccgatgaggaggtcgtggccggtggtcttgaagccgccaagccgttcatcaaggtgatctgcgaggctcaggacgagctcaagaagatcgccgccaaggagaccaaggaattccagctcttcccggagtacaccgacgaactgtacgcccgcatcgacgagatcgcccatcaggatctgaacgaggcgctctccatcgccgagaagctgccgcgtcaggatcgcatccatgagatcaaggagcacgtgcgcgaggtgctcgcggacgagttcaccgacatggacgacgccgagaaggacaaggagctgggcaacgccttcaaggagctgcagcgccagatcgtgcgtcgccgcatcctgaccgaggactaccgcatcgacggccgtggcctgcgcgacatccgcaccctgtccgccgaggtggacattgtgcctcgcgtgcacggttccgccctgttccagcgtggcgagacccagattctgggcgtcaccaccctgaacatgctcaagatggagcagcagatcgacgctctgtccggtccgcagtccaagcgctacatgcacaactacgagatgccgccgtactccactggtgagaccggtcgcgtcggctccccgaagcgccgcgaaattggacatggtgccctcgccgagaaggctctcgtgccggtgctgccgagccgcgaagagttcccgtacgccattcgccaggtctccgaggccatcggttccaacggttccacttcgatgggttccgtctgcgcctccaccctgtccctgcttgccgccggcgtgccgctgaaggctccggttgccggcatcgccatgggccttgtgtccggcgctgttgatggcaagcacatcttcaagaccctcaccgatatcctgggtgccgaggatgccttcggcgacatggacttcaaggtggccggtacttccgagttcatcactgccctgcagctcgacaccacgctcgacggcatccccgccgacatcctggccgccgctttgcagcaggccaaggaagcccgcgccacgattctcgaggtcatcaacgagtgcatcgacggcccggccgagatgagcgagttcgctccgcgcatcatcaccaccaccgttccggtcgagaagatcggcgaggtcatcggcccgaagggcaagatgatcaaccagattcaggaagacactggtgctgagatcgctatcgaggatgacggtaccgtc

SEQ ID NO: 3584 - DNA, 3881 bp, Unknown
  R85_18m  MAG No. k141_26738
cgccaatcgcgttgccgccagtcgtttcgtcgaccggctcgcacagccatacgccgtacgtccagagcagcgtctggtcgatgatcgacatcagcgccacataaatcgcgccgttctgcggccaaagtgccataatcaacggaatgccgatgaatccggcgttgccgaaaataagcgacgcctgaaatacatggctacgcgaacctttgagccgcaacagttcggcgaccagccagaacaccaggatgagcagcgcgtacatcacggcggtcagcagcatcacgccccagttggcggcaagctgcgcgcggtccgcgccgtcgacggcgttcgagaacacaagcacggggatgagcacgttgagcagcagcgagcacatgccgtccaacgccgtctgaccatagaaccggagcctcacacatccgtatccgaccatcagcatgatcagaaatccgactaactggccaatcatgacgccgaactgccccatgcacactcctctcgtttgctctcccgcgatttcctgtcactggttcatataggcagccatctggacaggctcggcggcacacgcatcagtatgttcgataccaccacatgccaatccacttctcgttcaaccgttccccgtgctaatgcgccgcctgccaccccgtgttgccggtgctgcgcgagcaccgctacgtgtattgcattccggtggccctcgggcgcaacgtgtgggtcggcgcgaacgtgtcgattctgtcgggagtgaccatcggcgacaattgcgtgattggcgccggtccggtcgtgacacattccatccccgccaactccgtcacctacggcgcgccctgcgaggtcgtgcgtgaaatcggcgacaaggaccgcgagtatttctacaaaaatcgcaagctcgacgtgtgggagtgagctttcgcgctactgctctttgagcttaaaacgctcactgaattggcggtcgcgccagtagtagacgtcgtcgcgttcgttgatttcgcgaattaccttgcacgggctgccataggcgaccgtgttggcggggatgtccttggtgaccagcgagttggcgccaatgaccgcgttgtccccgatggtgaccccgggcagcacggtgacattcgcgccgatccagacgttctcgccgatgtggactggcaacgaatactgggcaccctgatagcgcaggtccggacgcacgggatggccggtggctacaagcgtgacgttggggccgatcatggtgtgggatccgatgaagatctcaccatcgtccaccagcgtcaggttgaagttggcgtaacagcgctcgccccaataagtattgcagccccagttcgcatacaccgggcattcgaggtacagaccctcccccgccgcgccgaagaacgcctgcatgagttcggtacggcgcttcgggttggtcagcggcgtggcgttgagttcgagctggagatcacgctgggcggcctgcagatcaaaaaagccgtccacatcatccggcaggtagacctcgccagagaacataagcgccattttctcgcgcgtcgcatcatcgataatcggcttggcgatcggcttgtcttcggtcatcattggctcctgttcggcgttttggcgattgtgtcggtcgaactattctgtcacagactcgttttcgacacccagcatcgagcgcagccagtcaaggattcagatgtgcgattggcaccgtgcgggcctcacacttttcttattgagaacgattcgccgtgcagtcaagccctccatccacccaaaaaggactcgcttttggccgcgtcatcgcggtaggccttgccgaactcgtcaatgagcccatggaattcctgcaaatccttgacgctgaggctcgtatccagcaccacgggcgaataggccctgtggaatgccggatagccggccggcacgtcgaatccaaggaaggcgaacagccgccgcgcgtaggtatcggccacgaatgtgcggcgcgagaacacgtacagcatcagatcgtcggccgtctcgccgccaataccaaataatccaagcaactcggcccgtaattcggcatcggaaatagccgcggcaccctcgggcgcggccccgcaacgctccacataccaccaactcagcgactgtacggtcttggatttgttgacataaaagcctgacggtcgaatcagttcctgcaaacgctccggctccatggccaccagcttatggggttcgagcacaccctccgcgttcaacgccgcaagcgaacgattcacattgccccacgccgtattctgcgtcagcaccgcgcccaccataatctcgaacgtggtctccgccggccaccatccggtcgggccgagtgcgtcagccatggtgcggtacagcaattcgatgcgctccggcacaggccacttgtgtgcctggttggctttcatacgtttcatattctgcattcaggctccgtattagccatccgccattcatttattaggtcgattatgcgttcattaggtcacttgtgatgaacactgccttcaagaatggcttcattccaatgctcattatctcatgctaagcagggcaccgacctaatgaacgcataatcgacctaatgaacgcaacggtaaggaaaaactacagagattcagcgagatatgctcggtccacctggtctggaagtcgaaaatcttgatgacatctaccgcaattcgtgcaggattcgccgcatgaacgggatggtgaccacgaatgtcagcacgtcggacaccgattgggccatttccacgccgagcacgccgaacatcatcggcagaatcagtacgatcggtgccaaaaacagaccttgtcggcacagggccaggaaggaggcgatgccggtgcggcccatggtctgggtcatcatattgcccatcatgttgaagccgttgagaatcaccgtgcagcattggatgtgcagcgcggccacacccaccgccaccacggccgggtcggagcggaagatctcgaccagttgcggtgcgaacacccacagcaacaccgccaacaccacgagcacgcaggtggcgagccgcacgcagaaccagtacccttctttgacgcgcgcgaacaggccggcaccgtagttgtagccgcacaccggttggaaaccttggccgaggccgacgatcaccgagttggcgcccaacataatgcgcatcacaatggccatgccggcgatggccgcgtcgccaaacggattggcggcgatgttcacgcaggtcacggaaatcgagccggcgccttggcggatcagcgagggcaggccgccgccggccacttcgcgcatgagcagcacatccggcctgcaattgcgcagggacagtttcttcaagccgaatttgcggctcattgtggtcagaatcgtgaagctcaccgtctggcagatggcggtggccaggccggcaccaaaaattccgaggtgcagcacgaagataaacaacggcgcgagcaggaaattcagcaatgcgcccgaaaccagcccgatcatgccgaacgccgattgcccttggtatcgcagcagtccgttgagcgcgaacgacccgcatacacagggtgcggcgaccaacaacggcgtcaggtattgcacggcgtatggggcgatcgtcgaggtcgatcccagcatgacgaccagcggccgcagggtcagcaatccgattgtggcaatcaccaaaccagagagcaccgcacccgcgaagcccacggccagtagtcgggaggcgcgctcattgttctgtttgccgagttcgcggctcatcgagttgcccgcgccgttgccaaagaagaagccgagcgcctgcatcacggtcatgatggagaacgcgatgccgatggcaccggac

SEQ ID NO: 3585 - DNA, 25589 bp, Unknown
  R85_18m  MAG No. k141_26867
ggcaaaacggtgtcacgcacacagacggccaaggaatacatcagcatcgccgaatcattcttccgcaagctgcgggccatcaaaaacacggaggcacgaaccccgcagacgggtatcccgtccctgcgggaactgctgaaggacacccgcgtaaccaacctcgacgagtatgaaggaatgcttgagatcacaagcgcggatacggagaaatccacttaacaaattcaaccaatttctgccagaagccaacaaactccaaggccactggactcaaccaagacaaacgggctcatcaaagacaacatgccataagccaatctcattgcaaccaacaaagcctattcgtcttattctgaacgccttatttcaccgcagaatcacttgttttcgttgaaattccaacgatttcacgaccacacatctagttcaagcttcagccgttttcaacctttgcgctccttggaataacgtcatattctgaattccagcttcccaggggccggcaaaaacctggggaacatgcaccggtgcagccaacaaccacaacagaaccatctagggcgaagtgcgtccgaattcgacggaagcacttcgctcctcaggctctgttccgcacgagagcaaggaaacatatggctgcaattccaacgaagaatgactacccgcgcctcaccgccaagccagcgcaagtggcggagatgctgggctacaaggacgtgaaaagcgtttacggattgatcagaaccggaaagatacgcgctcgcaaggtaggcaacacgtttctggtgattctcaccagcgtgcgcgaattcgcaggtgaggagtgagcatggcaacctcatacgagcgagtgctcgaagccgcgagacgctattctcgagatcctaggctccaagagcttccgcgcgacacctccggaagacaacacgctcagtgcagctgccccgcccatgacggagacggcggcacttcgctgcacatcacctacgaccagtccaacggcaaaaccatgctgcactgcttcggagcggaacactgcgatgccgcttccattgccggtgcacttggattgaaaatcatcgacctgttcgatcaacaaagcggacctcaaggccatgccgattacagcggctacaacagttacagctgcgatagccggctcactgccgccgatttggcggccatacggcatgcgaatgctccacttctcaacagaaatgagacaacgacgattacacctacgcacacggaaaactctgcggaaatcagacaacagtacgcgatgcccaaaccgtacttggaaccattggccctaggccaatcccctatgttcgccgccatctgcgcagctattgcagttcagccaaataccggcctgttgcacggcgcttgcccaaactgcggcacagccgactcgctcactgtgctgtattccccgctggaaagcgccacattgctccgctgcagcacttgccaagccgacgatgtgctcaacgcgctgaacgctcccgctacgctggctcgttccaatggctatgaagcaatgatctacgacagcgagcgcggcacagcatatgaatatgcggacggtctgattgttcgtcgctctcccaccaagcgaatctcgcaaagcggcaacaccgccggcaagcacccgttgtggatggccgccgacgcgaaacgtgccgtggcatcgggcaagccagtgtatctgatagagggagaaaaagatgccggcacattgcgagcgctcggctatgccgctgtaaccgcatcgggaggcggcggcaacttcgccgcgaaactggatcttgattcagcgtgcttagcccttagtggagctgatgtggttgccattatggataaggacgacaccggcactcgctggaaggagcaagtggcgcagacgctgacaccgttcgtgcggtcgttgacgtttatccaggcggctggtgaggctcacgacgcttccgacgcggcgatgagcggcttggagtttgagattttgccaagcgaaagcagccagcctgagtctgagcttaagactgaactgacgccccgcgcctattcgctgacccgtttagctgatgtggaaccggagcgaccgttgtggttgtggccgggccatcatccaagactacttcgaccacaacaaggagctcacaccggatggcttgtattggggtgtgccgtcgtacagagtaatcaacgaagcgaaaggcgagttcagcaagcagcaagttctggacggcagacgacgcccaaagccactgctggcaagcaagaagtacggcaacatgtggtggtggctgtcgccggattatgcggatcatccgaatcaggagagctctgaagatttgaatgcggaagccacggacaccctcagcggtgaacaaactgagactccagaagcaactgtgccggatccggtcgctgtcacaagagctactgccatcttgccgccttcgtcaaaaccaagctattgcaacgttctgcacgaaccagacaagacggcgtttcccaccttgtccgacgatgccgatccgtgggcgatcccggagaaaacgcaagatttgcaaggccttacggcaaacgaaccgacatctgaactggcaagacggcaagacggcgcaagcgagaacgccactcatcatcccgcaacaggcgaagccgacggttccgtcacagacattgccggatggaaggcgagtctccctccctacgcaacagacctgcactaccaacagctcaacgccacgcaattgaatgagctcatcggcaagggaggcctgtgggcctgcaaggcccgccgcgagatggctcggcggaagtacaaataatagcggcttccaagaccatggccgtggatgtgataagttcacagcaaattgagcatagcgacaacactccatgcttgacatgcgctatttcgcactgtaaatttgtgactgattgaacaaaaggccttgattctatgtcaggggtcctaccaggtggggcggcgctcttgtagcgtgcgccccattggttattgtgaggtactatgcggcgtccgaaatacagcgtaagtcagcagatcgaatctctgaaatcgcatggcgtcacatttaatctgtacacggaagcagacgcgcaagagttcctaaccagccgtacgtatttcttcaagctcaaagccttcgaaaacaatttcgagcgagataacggccggtaccgtggactggatttcgcatatctcgcagatctatccaccatcgactgccacctgcgaacgctactaagctacctttgtctcaacctcgaacacgccttgaaagtgcgtttcaatcaactcatcatggaagacgctaatgaagatggctacaacatcgtgcacaacttcgacgaagccggtgaattctcattccatggagactatgtgaactcacgttatcatcactccaattacaccgaaggcttgctgaacaagtatttcgaagatccttcaatttggaatctttgggaagtgattgacttcagtacactatgcaaactctacaaggcatacttaaaccagcggagctacaaagacaacgcgacgaatctgttccaatccatccggattatgcgcaatgcctcttcgcacaacaactgcctaatgatcggtatcgaaaaacagattaaaccgaccttgtatgtgaaaaaactgcgtcaaagagctcaaccatggagaaaaccccaaacaattattcgacgcattccgcacttaccctttgacacatgattttgcggcaacgatctgcggattcctcatccttgtcgatagccccggcgtgcggaataccgccaaactgaaaacacaggacttcctacatcgcctaacgaaaaggtacgattattcggcaatgtcttatcaagactgcccgaaactgatcgagacgataaatgcactacagtcaatctgcaagatggcaattgactattttgaccagcaccccgaggattttcgcaccaataagatactccacacgaggccggagccaatcagccccgcaaaaggacgcgctcagatcaaccatatggctaaggctatgggactataaaccagctcacggcataatgcttgagacatatgcaccctaatgaatgcactggtagtgcccgaaaagttgcgcactttggatcgtggccgtccatggcgcgatgaccggttcgcttccacgaggttgtcatcgagccgggacgtgtcgaggtaacgccggttgggccattcgttcgcggtgacgtacctgatgcgcgcgcagacgagcatgagcgcgctgttggagtcggggaagccgcccacgacccgggtgcgccggcggatctccttgttcaatcgctcgatcatgttgttctattcttcccgcctatctttttcttgtgggggcgttggaaaaccgccgttttcgcgggccggtcgcgccggtggtctgacttatggtgcaactatggcgtgcctcgggccgcgatatggttcgggaaggctttcgcttcgcgcaacctcgtcgcgggtggagggtgatgggctggcggggacgggcgcagcgcccatggtgtcgttccccgtgtgtgctccgcgcagttttttcgttttggttcgcaacaatcccagcctccgtatcgcaagcgcatcgcagcgaataccggtcggcccagcgcgaaggttccccctgaccccctccgatgaacgccacacgaacgcatacctgaacctaggaaccttacccacaccacttcctaggttcctaggtaccttcctaagtaccgaagcgacttcccaagttcggacgatgcccagcacaaagcacccatacaggcacatctgccagcacatcactttcgcccggtaaagccaccgatcgtatagcgcgcccccttgccacggccaatgaccctcagcttcccacccttaacgagcttggacagctggtagtacgcctggttcgcatcgacatgcagcagttccatgacatccgcccgcgtgacatcattctgctctgcaaccaatttcataatgagctccggccatcgcacccggtcgatgcccgtctgacgtacgtactcgatggtcttgccggtgcgccggtagaccgtagaccccaaagtgtatgtccgccgagaaccgttgccagaacctttgatcatgccggattccgtaagctgccccagcatagcgcgcagacgctgctcactcatatcgagtttcttgttcatggtctcgaacgtgcagcgccgttcgttcctgagcatattcagaatcagcagaccgttgaccggcatagtcttaccggtgcgctcctgttcctcggcaagcatccgcacgaattcgacgtcgggtgcgctgcgctgcaggtacacggacacgttacgctcattcgacgccgtgtaatcgggcaggggacgtccatagtgcagcgacccttcgcagatgcgatcgatgccgcgccccgtacgctcggccaatccggttcgtttcagagcatccatcaggcagggattgcgaccatgcggttcggcggtaagcagattatggatgttgatgccctccacgaacccgtcgggattggcgatggtaagccccgcatcatccaactgcacgcgcacacgtcccagcagggtgtagtcacgatggccgaaggcgttcaccagcgcctctcggaacgcccgatggtcgaattccggcaccatcattgagaacagaccgacggatagctcgacgcttggattccaaggagagaacatgtcgttgatttgctcgatggtcttcagcaatggtccggcatagtcttggttgactttgatatccgtaccagacatgacttggaaagacgcccgatgagtcggaacgaagcgtttcagagactcccccttgcccagcagcagcaaaccggtcagcgtcggcatggtcttgccatcgacggtcaccgtcaattgcagggatttctccagctcctcatcggtcagttccaacaaattacggtcactggattggtaggtgccgataatccggcgcagacggtcgcgttcaaggggatcgaaatcatcacgggtcgcatccggcaccggctgcgcggaaaagtccaaacgtcccaaatcggacaggcgcgtggcgatctcgtacgggtacatcggcacgctctccggcgtaccatccaccttcatacggcgtcgcaacaccttgcccgacttggtcgagaccacgctgcgggatttcggcacatcgatctgcatcaccggcgtcttctccgtcccgacgatctgcgcacgagcggaaaccggaggaaccgtacgggagtagggagtagagtggcggcgtcgaccgacgcatgttctcgccataatttcaatcccgaaaaggagcctcgtcgcaaccatgacatcacatcttgccgaagcaggacgcacgttggttccccgcaaggaagacagatacggtctgctctcccccgccttggtggtgctgacgttcgtcgccgggctggtggacgcgctgagctacctgtcgctggggcatgtgttcgtggccaacgtgaccggcaacatcgtgtttcttgggttttcgatcgcccatgcccaaggcttcgtctggtggacgtcggcgctgacgctcgtctccttcatggtcggcgcgcttatcggcgggcgcatcatccggcgattcgaggagaaccgggtcaagcatctgttggtttctacctgcgtgcaggcgtcgttcgtactcgccgcgctaatcggcgtctatcttttgaaccagctcatcaccggccccgcagacgatgcgtccggcgtctcctcgattgcacggcttgcacagaccacccaggcctcacaggcctcacagccgagcctgaacttccccaccgcacggcacatcgacctgcacatcatcctgctgatcgtgctgctcgccccggcaatgggcatccagaactccaccgcccgcaagctgtcggtgccggacctgcccaccaccgtgctcacgatgacgctgaccggcgtcgtcgcagacgcttcggcacacggccaccagcagtcgaagctcgggcggcgtgcggtcgtaatgctggcgctggcgtctggcgcgctgaccggcgcgcttctgcaggcgcacggacacgagaacatcatcttgatggtgatgctcgggtgtctgctggcggtcatcgcgatgatgattccgcacgtccattcggatgcgccgtgggtcaccggccggcaatagcctctggcgcatactttcgccatatgagacaaaaacggccacgccacagcgcaaccagtaggaaacgcccggcaatctcggctctcctcgatatgttggatacccgttgtttgaaacaggccctccgcaagatacaaacaggggcagtgagaaggagaggtaaatatgactgacgcacagcaggcgaacggcaaccagcccgaatcccagaaccaagcagaagcgacggcacagccgcacaacaagcgagtgacgaagtgggtcgctatagtgattgccatcgtggcggtggcgattatcgccgcggtcgcggtgttcggcacccgcgcatacagcgcgtctcagtacgatagcgcagtggccgcctgcgccgccgcctcggaagacgtacgtaacgccaccaacgactacaacaacttggtcaatggcgatgctgcagaagccgccgctctgaccaaggcagacgtctcggacgcctccgctctcgacgcgctgtccaaggaactgaccgtggaactgccgacgtacgaaggctgcgtggccgacgacaccaagggctaccaggccgcgaccaagaaactcgaacagcaggtcacgtggtaccacgagcacaccacgtcgctgcagaaggctgttgacgccgtcaacgcggtcaagaagtaaacgagggcggtctccctcacgttttcaggatcggacagcgctcaagtcgcggcaacgcgcgatgtcggccggtcctgcacggcccgaaacggcagaaatcccgcgccccttacgttcggacgcgggatttctgccgtttttgagtcacggattgggactatagcccagtctttgccccagagttgtctattcaggattaccctctcggccgtatctcatgagcaggacgtgtaaaaacaaaaaaccctcgctaatccgcgagggttattggctggggtgcctggactcgaaccaagaatggctgaaccagaatcagctgtgttgccaattacaccacaccccaatttggcttggcgtagcaactccgaagagttgttcgtcgtacccccaaccggatttgaaccggtgttggcgccgtgagagggcgtagtcctagaccgctagacgatgggggcatattcagtttttcaaccggctgcgaggcgaaccgcgcaacaggtagatatattacgcgctaccctgctctcacgcaaatcccggcgtgtcgcgccattttccgccgttctgcgggaacaccccatgcaacgcgaaagcgggcatccgtatgtacggatgcccgccatgcgtcacgctcccatcatccgccggcgtgcggtggacgacgcatcacagatgcgcccgcaggcccttgagacgggcgacggtgatcggcttgccgacgatctccatcgattcgaacagcggcggggagacgcggcggccggacatggccacacggaccgggccgaaagcgaggcgcggcttgtagccgccctcctcaaccagagccttgttcagggtctcatgcaggttgtcggtcttccagtcagcttcatccacagcctcaagtgcggcgatggccttgtccagcacctcgccggcggaatccttcagctgcttcttggcgtcgtccgcaggctccagatactcctcggtggacagcagggagccgaccatgccggcgacctcgcccagcaggcgcacgcgcggctgaaccagcggagcggcggcggtcagcacctcacgctcacggtcggtcagggcatcccagttgtcggcggaaaccacaccatcgcggtgcaggtacggcaccgagcggcgcaggaagtcctcgggctcgagcatacggatgtgctcggcgttgatggagatggccttgtcgatgtcgaagcgggccgggttggccttgacgtcgcgcacgtcgaacttctcgatcatctcgtccatggagaacacgtcgcggtccggtgcaatggaccagccgagcagggccaggtagttgagcaggccctcgcggatgaagccgttgtcgcggtggttgaacaggttggactccgggtcgcgcttggagagcttcttgttgccctggcccatcacgtacggcatgtggccgaacaacggcatctccttggcgatgcccagctccatgaggtaacggtagagcacgatctggcgcggggtggagctcaggaggtcctcgccacgcagcacgacgttgacttccatcatcgcgtcgtcgaccgggttggtcagcgtgtacagcgggtcgccgttcgggcgcacgatcacgtagtccggcacggagccggccttgaactcgatggtgccacgaatcagatcgtcgaaggcgatgtcttcatcaggcatcttgatacgtagcgcaggcttgcggccctcggcgcggaaggcggccttctgctcatcggtcaggttgcggtcgtagccatcgtagccgaactcggccggacggccggcggcaaggttgcgctccttgatttcctcgggagtggagaaggactcgtaggcgtagccggcttcgagcagcttggcggcaacatccttgtagatggcggtacgctcggactggcggtacgggccgtgagggccacccacatcgatgccctcgtcccagtcgatacccagccaacgcagggattcgagaatctggttgtagctttcttcggagtcgcgcacggcgtcggtgtcttcgatacggaagatcagcgtgccgccggtggcgcgagcttccgcccagttgaacagagcggtacgaatcatgccgacatgcggggttccggtcggcgacgggcagaagcgaacacgaacgttcttgggcagttcgggtttggtgttttcagcatcagtcataatcccctattgtgccgcgcgcgccggacgcggagagcagcgctcctcgctcttttgcttcgttattgacatttcgggccaacaccatcccaaaacggccattttccaacgaaatctcttttgcctgtctttggtagtgcccgatatcttgatgcctgtcttcacacctgttttgacgcctactttggcgccatccacacgcccgcacgcaaggcttcgacaccatttggcgcaattgttgagttttttacccaaacgatggaagaataggagtcgacgcaatcgtcttatgaaaggggaatcaatgaccgatcccaacaacgtgccgttgccgcagatgcccgcgcccaacggtaccccggcccagcagaatcccagcacgccgcaatacggcgcacctgctccggcccccgcacagccagattatgggcaattcaacgctccggcccccgcacagccggcctacggccagcccgcatacgggcagcccgctcccgattcttccgcacccggcgcagcgcccggtgcaactcccgcctatggtcagcccgccgccgacccgtacgcggcgaatgcggctccgcaattccccgctcccggcgcggctcctacctacggccagcccggaccggacgccaacgcttacggtcaggtgccacccgcatacaaccagtacgccgctcccactgccacagcagccgtgccgttgaacaagccgtattacgactgccccttccctgaggcattcctccgtttctggaagaagtatgtggtcttcaagggacgtgcctcccgcagcgagttctggtggtggacgttggcctctgtcggcatcagcgtcctgctgagcctcctcagcagtgccacggacgacaagctcgggttcctttccagcatttggagtctggccatcctgattcccagtctggcgctcgccgttcgccgtctgcatgacacggacaagcccggctggtgggtcgccatcttctatggcgcgatggccctcggcatgatcatcatggttgccggcggtggcgcagcactgtatggcgccttcggcagccttagcaactccagctatggagccatggcaaccggcggcctcggtgccatggccattggcggactgattacgctcgctggttcaatcgtctacatcgtgttcatggctatgcccagcaagccggaaggcgcacgtttcgacgatgacgcagtagctgccccgatgcctcagggtgcttacggcgcaccgtacggcgctcccgcaaccccggacttcaaccaggccgctccgggcaccgctccgaacgcacccgctcctgacttcaaccagccagccccggcctatggtcagccgaccgcaccggctcctgactacggccagcccgctgtgcctacgcccgattacggtcaggtaccggttccgcagtacggccagccggagaccccggccccgcagtacggccagcccgacgctcaggccccacagtacggccaggttccgccgattcccgaaaacgttgatgatgggtccaccgtgctgtctccgcacacggctcccaccgatgacaacgcacagaaaccctggcaaggccagtgactgacgccggcgaagttcgcttaagaagttcgcctcatcactcatgaagcccaacaatgaggccccactcatcaagcggcggtagtattccccgccgttcagtaagccaatgccctgtgtactggatcattccagcacacagggcattgtgcgttattgcggcccctctcttcgcgcaacattccccggaatgcgttacggtggaggatggacgctgcgccgagctactcctacaagctgcctacggagagcgtttgggagatcacatgggattctcccgggcccagcgtcacgatgcggtcgcggcataccgccgcttcaaccgccacgaaaccgcgccattcgcccggcttggtgtagctcatattgtcgccgtccgctcccggattccacaccacggtttgcggcgacccggtacggctgatatgaatcgcacgccccaacatgtcatcgcgcagttccagacgcgcatccgagtaatacacacgattcaccggctgctcgccaaacgtcaccacttgcgcgtcctgtgttttcggcggaaacccttcttcggtggcatccagatacgtcgctccctgcaatccgatcagctgagcaccggacacatcgccgacatgcagataggaatgcaacgcggcctcgtacgacataggcgccgtgccggtgttggtcacggtcaggctcatggtcagcgcattgcccgtttgcacgtcatacacggcatgaaactgagcacccggctcgtcatcgaaccaaggcacttcattgtcgttcagctgctgcgaatccaacacataccgtatgtggctgtcgtcgaatgaaccctcgtccaacgcccaccgacgcagacgtgcaaaaccgtgggatggattgagtgccagctgcttgccatgcgcaaaacccgggccgaaccacgggaagcagatcggcactcccccgccgagcgacttaccggcttcgatatgccacgtactcggcgtccacaccacatccgcctgcccggccggggcccagcgcaacagatgcgctccgtaatcgctgattaccacgctgccgccattgttggcgagcatacgcaaatcgacaccattgcccataagtttcccattcccattgtgcgaacgatacttttcactaaataggatacttccttaacaaaaaagaatcgcaaagtatggccgcaggatgcacaaaggccgtgccaccccattcgccgacgaccgccacgcgccaatcgtgcgcaagatcatcggatgcgactggcaatagatgctggtcacgcgggccagtgcccggctcaagcacgacttccccctcgcgcaccagttcgccgtgctcccaatggtgcacataaacgcgatccgcacccaaatcgctggtcagcacgcggccgtccggcactggctgcacccagtgggcgacggcgcgtccgacagcagccgttcgcggcgtagcaccttggcgtcgccactgttatcgccgccggcatccaataccaattgttcgatgccggggcaagccacatgatgcagtttgccgaatccaccaaccagaatatccatgaggatgttccgttttactacgaactacgaaactcttttcgccacacaatacgccgtcgccggcggggcaaaatatgccaaaattagccaattgcagaaaaagggcgatccccgtataggaatcgccctttgcgcaaacactcaggcggagggaagtgcctcaggccgtcaaaccggcgaagagcgccgaccagtcctgagactcatcctcaaggtcgaatcgttcggtgttcatcagtgcctccttcaccggtccgggagccctcccctcaagtttgtgtattgagtaatcggtgagatcactgatcgtggcccccaatgcccatccggaatgcggcaaatacacgtggaattggattgagcagacgaagacgccgacagtgatcatcgaacgtgatctgccgctgctgggttcccgctacgtcgattcagtgcgcaccaaccatccctatggcgtgcgtaaggcggcggtgcgcttcctgcaacacggtcacacccgtgtgggcgcggcgttcaccgatacaccgacttcggagctgattcaggatggctggaagcaaatcgtgacggaaagcgacgccatcgaatgcccgttcaccatcaccggcattcagccgtacaacaccagggacgtcaaccaaatcgtggacaccattctggattcgggcgtgacggccatgctggtgcactccgattatctggcgatcgccatcgcgcagaccctggagcgccgcggcaagcgcgtaccggacgatatctcgatgatctccgtcaacggctttgccacgcccagctcccgcccgctgaccgtactgcgctcgtccgataaggatctggccgaggcggccatcaacctgctgatcaaccgcatccaaaacccggattctacaacccgccacatctacgtggacccgacgctgaccgatcgcggctcggtaatcgataagcagtaaccccacctccctctgacgagggaggtggcatcgcaaagcgatgacggagggagaggcaccaggcctctaaccgttacgagcgaagcatcggccagagcaacgcccttactctttacaactccacggtctctttgccgggatcatccttgacatgcgcgaacttggcggccagagcctccttattgcgcttttcgtcttcttccttggcctgacgcttagcctcgtccgggttccagagcacatcctcacggtgcttgttccattcggcaacggccagaggagcgatgtattcggcggtggcggtcagggtgtctgcgtcggcggctttggcacgggcattaagcaacccgaggatctgctcgtcggtcaggcagatgcgcggcaccgagcactgctcgcgcagttcgttgacgtagagcagaatcggcagaatcttggcggcagcattggcgacactgtccgctgaaccatcggccacagcatcaccggacacctcacccaataacgcatcgcacacggcgagcgcggtggcgaaccgaacagccacatcggcgggcttggcagacgtggccagacgaccatcggcttcagcgtcggcctcgacctgggcttccatggccgcgaccgcctccctcaccgattccgccgtcgcggaatcccagtcgattcccaacacgtcggccgcctcaacgatcagcctggcatcaccggactcggcgtagtcggccatcgtgtcgtaggcgtcattggcggcgagcagggcgtccacgatgctctgcgggcgaccgggaatctcatcggcaccttcgtagacgaactcggcgtccggcacggtgacgtcctcgccggtcaggatgcgggcgaatgcacgggtgacgcgcacctgcaggttctccgcgtactttgcgtcattgtccatctgcatggcttcggtcagcggccacaggccgatcagcgccgagccggcttcggcggcctcagttaccgccggcaatgccgcgacctgtgcgattgcctcacgattgagttcaatggtcatctatgctcctttgcgtccaccactcgattgcagtgcgtcttggctcccctctctgaggggagccaatgtcctaacaccagtgtgccgttacttgacgttggctgctgggtcgacatacgtgattgacatcacacggccggtttcgttgtcgtacgtcaccgaggtcacggaggcgagcgccgtgtgccgcaggaacatccagtgctcggggtggccggtctccagataatggcgataactgaaaatcggcgattcgtggctgaccaccacaatctgctcgccggggtgctgggccaccttctcgcgggcgaagtcgtccatacgcgccgcgatgtgctgataggactcaccccagctcggcttgtacaggttggtgacgagcttccagttgccgttcttccacagcgcgccctcgccatggccgatgcgcttgccacggaactcgttgccggcctcaatcacccgttcatcagtggtgagcgtgagcgaagcctcgccacgagcctcgcgcacggggttcagcgcatcgagaatcgcgccggcggtctcgcgcgtacggtcgagcggcgaggagtagacggctgcaatcgtattggtttggggattcttggccaagtacgtggcggtggcttgagccatgcgacggccaaggtcggaaagatggaagtcgggcagtcgctcatagagcagatggtcggggttatataccttgccatgccggacgaaatggatggtggtagcgctcatgagccgcctttctgcttcccgccctgaagggcatgagaacgttgtcttaatatctccaatctaccgcgtgtcgcggagtggacacccgtagagtatccgtgacgcaaatatgcggatgggaaaatccgacgcaaactttgcgcgaccatggacaacacatcattcgatgagggcttcgccggcaacgccacgccagcgggggacatccaatcgggagcggaaaggagcgtagtgctgttatgtccaataactcgtccaactcgaactcgagcaccattctggccggcatcaaggaagtaggccacaaagtctttggtgggtatgcggaactactgcgcattccgcataccgcccgttattccatcggctcggtcatcgcctgcatgccattcccgatggtcggcatgaccatcaccatttccgtacagcattattacggcaactattcgctggccggcatgctcaccgccattcaggcgattgcgctggccgtggccacgccgctgctgggcaagctgaccgacaagttcggccagaggcaggtctcgattccgacgattatcgtttggattgtggccgccatcgcgctggtgacggcgattaccaaccgcgcgccggaatgggtgctgtactgtctgacgccgttcctggccgccattccgccgtggggcgcgatgagccgcgcgcgctggaccaagattcttaagggtgaccgggagcgcacgaaccgcgcgctgtcgctgtgcggcgtgctcgacgaatgcatgtgggtgatcggtaatccgctggcctccacgctggccgtgatctccggtttgctggcgttctcgttcaccggcatgtgcgtggtggtcggtgcgctgatgttcctgaccgagctgaccactgagccaccgtcgcagaccgcgctggcgcgtgccgagggcatctcccgcaaggaataccgtgagcgcgaggccgccaaggctgaggcgctgaaggtggaaaccgccgccgaggagacccgccgccgtcttgagcgtgaaggcgtgaccgatgaggccacgattaacgcagccattaagcaggcggtcgccgatgcgcgttcgggcaagaaggcgtccatttggggtccgggtctgattgcggtgtgcgtcacctggttcggtttgggcgcgttccagtcggctacgggcatctccatcatcgcgtttgccaccgaagcgaatatgaagcagtacacgggctttgtgtttgcctgcttctccttcagctcgctgatgggcgcattggtgtatggcgcgaagaactggtcgattgccctgtggaagcgcttctacttctgcctggccgtggtgaacatcggcatcagtacgttcctgttcgccaagcatctgtgggtgatcatgatcatctacttgattattggcgtatgccaggccccgacgtggatcaacggcaaccagctcatgttgcatctggtgccgccctctcgcttgaccgagggcatggcgtggatgggtgcgatgaattctatcggctcctccgccggttcggcgattgccggccagttcatcgaccgcatgggctcgcacggaggcttcatggtggtgaccaccttggcactggcctcgctggtgattgcactgatcggcttcaagcagatcaagggctccaccgagcagccgaccctgactgaagtgagtgtgtgagacgtatgctaagccccctctgacgagggggcttagcatacgtcaaaacgctacttcggccagcctttgggcgtgtgctccaaggaccagatgccgagcttgtgggagaagctgttctgccacttggcttcaagctcctcggcattcagtcgattttcagcggacttcagacggttcatcgcattggtgtgcgtatcgtcgagcagccacttgcgaatcaagaagttccagatcattaccacggcagtggccaccaacttgccgatattggtgcgcaacagatattcggcatgctgcgatacataggcatcatggttcatgccataggtggaaatccagataatcgcgtcattcatgaacagaccgactacagcgcccgccacgaagataaggatctccatccagcgtgccatgtcatcacgatgcttgaatacgaatttcatgctcgccagatagttgaaaatcagcgagatgatgaaagagatggtggcagccagcacgttgtgcatgtggaatatgccaaccaataggttgaggataccccagtcgataacaaaggcgataacgcccacaatgccgaacttcatcagctgttcaatcagttttctcacaagagtattcaacactattgggctgactgcggaacgtgtattggctggaaaggccaataatatccccaattggccttgccccggtccgttctgcaagcagcttcctacgtccgcatgccatgttcaacagcagccgctgaggctagactggaagtgaaccgaatcaaggaggaattatgcccgttattcacactcatgtgtccgtgtccaccacccccgagcagcgtgaggcactgaaggccgcctacggcaaggcgattaccgctgtgccgggcaagtccgaaggctggctgatgtgcccgttcgaggacaatatgccaatctacttcggtggtagcgatgaccagcccgccgcctatgtggaggtcaacgtattcggccgctccgtgccgggctctgcttgggaaaagctgaccgaaagcattatggccgcgctgaactccacactcggcattcccgaggaccgcacctacatccgctacaccgccaccaccgattggggctggaatggcggcaacttctagttgccaccattcccctcgcagcatagctgttcgcatcgcctacggaaagcccagtgggctttccgtttaatggctcagggtggcaactagtttgcgtattctggctcccctcagtcagcttagctgacagctccccctcaaagagggaagctcagatgtagaaagcccgccggtggcgggctttctacgtttcaaggggctgatttccaacattcagaagctctactagcgtttcaaggggcttttaaaacaagaaacccggagtataaacattgcaatttcaatggtcatactccgggtttcgcaatcgaagagcccctcgaaacgcagatagacctccggaaaaccggaaatccgcccctcgaaagcgagttacctcacctcatgcctgtcatcacacaatcttgggcatgggggtggtgaggctggtggtcaggttgacgtggaccagaccggcaccggcatgcacctcgaccttcttcagggtcacggtgcgctcttcttcgggggcgcggtcgttgtcggtcatggtcgccggggacttgaccgccacgaacgccagatcatccagcgagatgcctgcgctctggcacagttccatggcctcggacacagactcggtgaagcccggcttgtagattacgcgctcggccggtacgccgtaggcgttctcggccacccacttggcgttctcggtcagggccatgcccttgtgcgaatgcggttcggccggcatggagccgttctgcagcgcgtcgacgaaaccgtcaagctgcggggccagcgcctcgccgccgtcgcggaacaggttgccgatgatcggcgtgcggaagcccagctcgtcggcggtggccttcagggacggaacctgatcgtcctcgccttcccacaggttgatgagcgggaaggtcggaatgtccaggttctccaggcgctgcacgtggaacgggtagcgccaggccagctcgggatcgtcgcgccaggtggaggcgcgggtcaccacgatggcggcggacggccactgcgcgccatactcgcgacaggcgatgtccagccacttctgggcaccggcgtcggtgccgtaaccggcttcgacgacaaccacgtcatgcagagcgcaggccatttccacggaaaccagcgtcggaatgccgatggacacgttggcgaacgggccaccgtgcacgtagaccggggagccgttcacggtctcggtcttggccggcttgaccgcgtcggccagaatgccggtgatgcgccacaaatccacgaactcgccgaaggtcacggccttgccgtccttggtgccggcgatcatcttggatacacgctcggaaatctcgtccatcgagcgggagagcaccatgatctgcatgagctcgcaggtcggcgtgagcacgaccttctccggcacgttgcccttgccgtagtccacggcggtggagcgcagggagcggctcggcacctcggagacacgcggcacgagaatcgtgtcaagcttgccttcatcgatggccttctcggcgaaggagacgagcaggttctgggccgcctcgatggcgcccatttcgccgcacagaccccagtcgatgagctcggggtgggtcagggatgccttgccgccgccggaggcaccgcccttggaaccggctgcggtgatgcccatgctcggctgacgcagcacggcggccgcatcaatgccacgcttgttcagggcgtcgatcaaggcgatggtcgtggtggtcttgccttcgccgcgcgatgccttgagcggcgtatcggcggtgacgagcaccaccttgccgtgcttgcacggggcgtccgggttctcagccaggtacttcatgtaaccgaatgcgtcgatcttctggaccaggccgtactggctggtgaagtcttcgatggtggtcatttaatgcctttctgtgttgatgatggcggagcggggtggtggggcggccgccgccgcctcttcgcctagaaacagcccactgggctgtttcttaacagcttagcccctcagtccgcttcgcggtcagttcccctcagggaggggagctcaatacggactaaaagtcggacatgtggaagccgttcttcatttccatgctgcgagtgtacagcacggagtcaagcagcttgtcggtttcctccttgagctggtcggccatggtctggttggcggcggcgagaatctcgcgcacctcggggttacgcagcgcggcgatggtctcgtccggggtcatcggctgcacatcgccatccacgttgtcggcctcgaattcctcttcagcggcagactgcgcggcttcctcggcggccgtcaagcccagacgggcgatctgctcgtcggtggcggcgaccaagcggtgacccatcgcaccggtcttctcctggtagcgctcgacggcgttggacgtggagcggaaggcgccatcgcacagggcggcgatgatgcggttggcccagtagaagttctcggacgtcacgcgggtggtggtgtcctcaaggtaagcgggcgtggtgtccacgttcgggaagaacggcaccagcgtgttgaacgggttggagccgtatgccatccactggatggcgcgggaggcctgcgggcggtacgggcgaatctgcatcaccgcaagctggctctggcggttgatgccgatcgtgcggtacatgtggcgggtgcgctcatcgcccagctggccgtatggatcgaacggggtgccctggtagtgggagctcaacacgtacttgatgtcctcgatggtcaccttgcgctcgggctggcgggcccacggaatgtcgtcggaggtgggcttgtggtcggcgtccgggccgtcccacacctcgtcgtacgggttgaggaagcgctgcatgtaccaggcgcgcggggtgttgtacacgtggtcggagtcggagtgggagccgaaggcgtcgcgcgggttgaacggggtggtgttctccaccgcgaggtccaggtggttggtttcgatgaattcggcgagatcttcggagcacatgtgcgcttcctggtcgcccagagcgtcctcaaggtcgaattcgtcgataccgagctggttcggcatggtcacgtaggcctcgtccggcacgcgcttggcaatccagtgatggccgcccacagtttccagccaccagatttcgttggagtcggagaaggcgacgccgttcatctcgtaggtgccgaattcctcaagcagcgcgccgaggcgctggacgccctggcgtgcggtcttgacatacggcagcacgatggtcaggaagtcctcttcgccgatgccgccgggcacctcgggctcatcgcccctggccggcgtgtattccacgaacgggtcggcgccgagcacgcgctcgttggtggtcagggtctcggtggcgctcatcgccacgttcgcctcgttgacgccggcctcgccccagatgccttccttgaggtccgcgttcggcacggcggtgtactgcagcgggtcgtccggcagagtgatggtcaggtgggagatcactgatttgtattcgcgcggctgttcctccggtttcacgacgatgaagcgcttcgggttgaactcgccgttcgcggaatcctcgttgcgggcaatgatggtcgaaccgtcatagctcgcgtctttgcctaccagaatcgtggtgcaggccatagtgtgatggtgtcctttctcttattcaagctccccttgtcaggctgagccgttcagcaaacagcccggtgggctgtttgtaggcgagggtgggagataagtcccaccacagatgttgcgggcggtagcccgtccgtaattgcaggacgagctgtctcgcaaagcgagactgaggggtagtcactctagctgtctctcccccagtccgcctacggcggccagctccctcatcagagggagctcacatacgccaactaaaaatcacgccttaccggtcaggaagatgccgtcggtgtcgggcgcttcgccgctgttgcgcagcgcgtgcaacagctcgttgagccagaagccctgattcaagccgggcaacggcttcttggtggcccacacctgcaggtagtactcgtggtccttgtccggcggctgcggaccgttgtaccgcatgatcaccgctgggtcagtgctgcggcccaagaacttggaggccgaagaattgcggccttgcacggtctcgggaatcatggccggcagctgacgggagaagtccggcgggatggccaacgcatgcgaatcattgaagtcgtacatcagcgcgtcaatcggcagattggccacggaccagtgaatccactcgaagccgcagaccggaatcgaatccgggtccacgaactcccagtgcaggtaacgggcctcggggttcacatcaccgatgtagaacgggaaggagacgaccggcacgccgccgttgaagtactcaggcgcggcggccttggcaaaatcgtccggaatgacggtgaaatcggcggaaatcttcatatgtcccagtatcgctcatatgtgtgacgtactgggggctgtgcgttacgggggtctctcccccagtctcgccgcgctcgacagccccctcgtcagagggggctggttgcgtcgggttatggaattagggcgcagaagagggattcgaataccagtagcgggttgccgttgccggctagacgcttgcgggcgtgggccacttcgtccagacgggtcacggcaccggcccggttcaaccgcaccgacaattcggtgatcggcgagcggttctccaggttgatgaggcccaccgaatcctccgcattgttctgcagcaccgccacatcccggtagatggaggcgatggagttcagcgcacgatccaatacgtcgcgcgtacggcgggtgaccaaacgcttcacatcgtctttcttggcgatctggttgaacgcgccacgcagtttcggcgggatgcggtcgttcggtgccagtccgttgatgcggcggaattccgcttcctggccggcggtgatgcggcttgcgtccgcctcggcctgggccttggcattgtcgataaggctgccggccagcagcaccgtgtccgaggcgcgagcgaggttcagtacgcccaccaccaattcgtcgcgatccgtcatcacctgctcgtcagtggcgtacaacttggcgatgccgatgtgtccctcggccagacgggccgcacgctgcgccacttttggctcgacattggtggtggaggtcaggaatccggccaccgcctgggtggagggcacggcgaggttcacgatgcgcgtgcgcgagcggatggtgggcagtacatcctgggcactcggcgcacacagcagccagatgcagtgttcagccggctcctcgatctccttcagcagcacgttggtggtgcgctccagcatgcggtccacatcctcgatgatgatgatgcgccatggtgccgtggcaggcatttgctcggaggcggtgatgatctcgcgcacctggtcgatgccgatggtcactttgttggtggccagcactgtgacatccgggtgggtgccagcgagcacctgttgggtgacgcgcgtgggctcatcgttcatgccgtggtcggggctttccagcgccgccgcgaatgctcgggccatattggaacggccggagccgggaggcccgcaaatcagccacgactgggtgatctgacccgggtcgccctgcgcgatgcgactgagcatgtcgattaccggctgctggccgactagtgaatcccatacgctcatcggacaccgcccatcgtcacggctcctgtagacgccccggatcgcgccatcaccgtatccacatctgcaacattgtcccgcagcagtgtctgaatgtccgcttcgatggcggaccacacctgttcgatggactggctggcatcgatcacgtggaaacgattcggctcggccacggccaagtcgaggaacgcctgacgggtgcgggactggaagtcgctgccggccgactccatgcgatcttcggcatgctcaagacgattgtgggaaagcgccggatccatgtccagcagatatgtgcggtcgggcagcaggttgttggtggcccacatgcttaaggctcgaatctcttctggcgtaagttcgcggccaccggcctgataagccaaggaagagtctaaatagcggtcggtgatcaccacttcaccgcgctccaatgccgggcggatggtttcggcaacgtgctgggctcggtctgcagcgaatagcagcgcctcggcgcgcggtgcgatgtcgacggcgcccccatccacaccgtgcaacagcagttggcgaatggccttgcctagcgcagtgcctcccggctcacgggtaacgaccacggtacgcccctgagcctcaagatacgcacgcagccgctcgacttgcgtggtcttgcccacgccatcgacaccttcaaacgaaacaaacagaccgctcatgctattgaccttagcgttaggcgcagagttgtgcccaacaggcagttaaaccagctctacctccgtttcaaggggctgatttggtcttttctgaaggtctacttccatttcgaggggctgttgcccaagtagacaacgttccaaaacggcggaatgacgttggcgtggagccgttcatactcgtggttcagcagatgaccagccccttgaaacgcaagtagatattctcaaaacgagaaatcagccccttgaaacgcaagttgagcaataatcccgctcagccacgcttgggaattacggcggggcgctcgta

SEQ ID NO: 3586 - DNA, 9227 bp, Unknown
  R85_18m  MAG No. k141_26994
attcaggacaccaaaccggacattctcgccgaccagatcaacatggtgtttgaggatattccgccggtcgcggtgaaaatcggcatggtgtctgccactgacatcatcgacgtcattgctgaacgactcaccttccatcacgccacgaacatcgtgctcgacccggttatggtggccacttccggagccaagctcatcagcgacgacgcgatcgccgcactgaccggcaagctgttcccgatggctacggtcgtgactccgaacattcccgaggccgaagtactgaccgatacgctgattcgcgatcaggaggatatggaggccgccgcccaccgcatcgtggagcgttacggctgtgccgcgctggtcaagggtggtcatggcaccgaggatgccaacgatgtgcttgccgagacggatggaaccgtgacctggtttgatggcgcgcgtatcaataatccgaacacgcacggcaccggatgcacgctgagctccgccatcgcctcgtatctggcgcttggcgacacgttgcccaaggccatcaagcatgcgaagaagtatctgaccggtgcgctgaagacccagctgaatctcggccacggctccggcccgatggatcatttctggaagtatcgctgacataagtgtggttgttaagctccccttgccaggggagcttaacactactgaaaaaggagaatcatggttcttgaccgtaatgccgttactcaggaagtgccgatcgacccggaaaccggcaaaccgtacctcaacaccgtggcagccatccaggtgtcggccaatggcgtgggctccgaggtttcaccatacgtggctcaggccgtcgaagtgattcgcgaatccgccctgccgcaggaaaccaacgccctgttcaccaacgtggaaggcaatctggacgacgtgctcaaggtggccggtgaggccgccaagaagctcgccgagcagggctaccgcacttctctggtgctgcacatggatatccgtcccggcttcaccggccagctgaccgaaaagcccaagctggtggatgagatcctcgccgacaagcaggcgaaatagcaaagcatcgcttccaccagcaagggcatgctttgttattacacgtttcatggggcggtaactcacccatagggcggtaaatatctcatggggcggtaaaaccctcatggggcggtaggcgaaaacggctctattctgcggaaaggcaaaatccgctaaccgccccatgggccaaataccgccccatgagtgttttaccgccccatgggaatcacggttttgccttctttcaacggggtaagagcgtaagtggggcatatataggagcgttacaaactctgttatcgttcacaatgtgaccgcaacgcggcgtgccacaagatcgaacctatagttaagccccatgtagtgagctatctcacaacgattggctcgctacgtggaattcaagacttggactgcaaacgtcgttcatcccacacaatgggagggcgaacggaacacgcagtccaatcaagagttcgctcgccgcaacatcattgagcagttgcacgcgggcaggtttgcaagaagagggctcaaatatgactgctgctgaacagcagatttccggcaatcccgcggctatggaaagcgcacaagcacgtaccaccgtgacggatcaagccaaggttcaggatattatctcgcgcgtggatcgcgcacatgaaaccccgatgttccatcgcatcgtggcgctggtcgccgctggcatgctgatggacagcatcgacgtatatattggcagcgccgttgcctccagcgcgttggccacacactggtccaccgttgcgcaaaattccacctttatgtccgcaggcttcctgggtctgctggtcggttcgctgctggccggcttcgtcggtgacctgaagggccgccgcgtggcttaccaaatcaacctgctgctgtttggcggcttcaccttcctcggcgcattcgccccgaacatggccgtgctgtccctgtgccgtctgggtgccggcctgggcctcggcgctgaaatcgtcaccggcttcgccatggtcaacgagttcgcaccgatgaaccgccgtggccactggtgcgcgattgtctcgctcgtggccaactgcggtgtgccgatcgctatgctgctgtgtgcatggatcatcccccgctggtcctggcgtccgctgttcgtggccatcggtctgggggccgccatcatctggtggctgcgccgcgacatccccgaatccccgcgttggctcgccgtgcacggccgttacgatgaggccgacgccatcgtcaagcagcttgaggccaacggctccgaactgatcgacgcagccgccaaggccgacaccagcgacacccgcaacgccggcggccgttcgctcggcatctgcctgcttgtagctgtggttgctgtggccgccacgaacgtgtgctcctacgccttcacttcttgggttccgacgattctggtcaagcgtggtattaacctgtccagctcgctgctcacctccacggcgatgatgctcggtgccccggtcggctgcctgattggctctctgcttatcgaccgcatcggccgcaagcgcacgattgtgccggccttcctgttcactggcgtgttcggtttaatgtatgccttccagacctctaccgtgagcgcaattatcgttggcttcctgctcatgatgtgcctgtacgtgcttatggcttccgtggtggctgtgtacgctccggaactgttcgccaccaaggttcgcttccgttgcgtcggcttcgcgaacgccgtggccaagctgctcaatgtgttgatgcctatggtggtgggttggatgcttacctcgcttggtgccacgtccatctttgtggccatcagcgcaattgctattgcatcgatgctgattgtcggcttctttggcgcggagactgcgcagaagtcggttgggtgatcggtttcctcacagtggaataactgctgataatgtccattcggcgtcttgcgtggtgatatgcagggcgccgttttgttgttctagtaattgtcggtaacggttgagaccggtaccggtggataggtccgcactgccatccgcatccgaatccgatgacgtgcgggccgtgtcgatgcaggcgatgcggacggtgtccagtccgatgccaatcgtcattacatagcccgcttccgggtcggcatgtttggcgatgttgccgtacagttcctccagcagcccggcgatcaggccactccgaccggctgcgccatgagcaccggaaataatcgtctgaccttcaaagccaagctctgataatcggcggtcaccattgctcgcaacatcacgaatttgctcggctagcgggcaatcagcgtctgtgatgccacatgcaatgccagaagcggcatcaacggtcgaatcatgcggagtcactgcactgtgcgccgcttctcccctgccttcaataacatcaatgacctgatgcgtgcgatccaatgcgcccatagccacgctacgcagttcgcgtaattcttcttcagaaggggtcttgccatcggcaatatccttgtcgaatcgcaaaatcaggtatgccaaatcattggatacgtaatcgtgaatgtcctgagctgtgcgttcctgctgacggcggtgagccaactccgctcgaaccaagctgcgttcgtgattccatcgcgccgccatgccaccaagcatgaagccaataaacaacacggccactggcatcacaccatagagggcaatcgcaccaagaatcacttgcccagtgcgatgctcggcagaagaaccgctcgattcataggcgcttccggtgaagtcgcttcccgactgccctgcgctgtcagacccactggatgaagagccaccatcagcagcgccaccatcagcaacactaccgtctagggcactactactcgccgcgccatccgcagaaccgctcatcgtgtctgagccgccatcaagccaaggaatggccacgccaccacgcgacaacatccacaccacaacggcaatgccggcaaccgccagcgccaatcgcttatcggcgtatccggcaatacccaccgccaataacacggcgagcattgcacccgacggcatccagatcggactcatgcacaacactatccaagccaccgctaccgccacgcatccggtgaccggacgaaacgccatccaccccacaatggcaacgaatatgaactccgcaaggcagtccgccgccgagacactgtcagcagccaagcccgccatggtttccatcgtgcatatcaaggcaacaaccagtatggcaatcaacagccatgcattgcgaacaccgctatccagctcggccaatcggtgtcgtaacgctttcatagcagttcctttcctaccatccatgccgttgcacataccgcccatgccaactcttaaatctcatgccgtttcacgcagattgatatggcatgagcgcgactgcgagcgccgagtttggcgagtgcgcggcgttcaaaagtcgccacagtggccacactgatgcccaatcgctcggcgatttccttggtgatcgacccatccgcatacatacgcagggtgtcgcgttctttaccggaaagcgcgccacggtgcgcgtatgacgtatcttcgagcaccgcgtaggcggttgcggcatccatgaaggacagcgaattaccgctcccctcatctcccagtaccagctcattggtcgacaatccttgggctgcattgcgaatagcgagcgcaatgccgttcaaatcggttttaccaaccaaggcctgcgccccgcagcgagccgcctcgtcgtgaaatgacgcgagcgcgtatgaggtgacacccaccagcccaacctcgggtgttttggtacgaatcgcacgacagacttcggtaccgggcacgtcgcccatagacatatccgtaaccagcacgtcaggccgcttggtggggctcaggcatcggctgatggccacggcacccaaatcgcaggtccatatcacggcaaaatcgctggacatgcgctcgattagcgcgccgaacactttcagcgcatacgggtcattgtccacaatgccgatgcgtatgttgcggttgcgcgcttctcccattacattcaccccttcagtgtgcccgacgccgaactgctccgtcctgacatgtcatggtcactatgacaactatcattccacatttcctgcgcgatttacgatggaatcatcatcaatccttgacaaggcggtaaaggaggactgcaatgaaccgtgcacaagcactcagcaagctcaacaggagcgatatgcgcaatgccgccgccgagcgcgggacgcaacgaatattcgcgtggaaccgcgcgcattggattggcatggttgtactgatagcggtgttgttgctgctgcagtggagctcatcaatgtatctcatgcccgacgaggtccttgacagggctgccaaaaacctgttcgtatggttccccggtatggttctgcactggccattggtgttgggaatcaccaacctgatactcggttcgatacgatccggcagtctgtctttcccattggcgagcgcaatcatcggaccgctggcattcggctgtaccaatcttcgcttacggccggggttcccataccgttcctgggctcagtggtggaagctaatgcacgctgaaagcggccatcagctattggttcattcgttgatcggctcggccatgctgttgatctgttatacggccgttgcgttcatctgctatgcaatcggacgctacggtctgcgcgaattgtttgtggatccgaatccgcagacggcgagcggacgactgctcacatggattcgtcaggatgcgattcgcttcggctgctggctggcgacggcaatcatgtacggcttgctattggcgctgaccttacggggcggcatggctgcgatggccgccgcgttgctaatcaattttgtgattccgcccgccttgctggtcatcaacggcatctacgcgctacgcccggcctcactgacgtatccgtggaaaagcctgctgttcccgttggcgtgcacactggtacctgcgccgatgctcatggcgctcatcacggtgtatgaagacacgtgcccgataggaagtacctgcacgctgatcggcgaccgatacctctcctggggctcgatggatcaggtcttgcatttcgtcatcgtgttcgccgtggcgagcttcctcggattcggcgtggtgtgggccgtgcggtggattgtggctcgtcgcacaaaataagagagaccaaaatatactggaatcaggggcttcgtgcaatgatgcacgagccgatccaagcaaaggggctgaccatgagcgagaaactgatggaacagtaccggttgcgcaaacaacgcaaacgccgtaacgcttgtatcgccgccatcgtgacagtagtgcttgtccttgccgtcgccggcggcgtatggtggacggccggcgatggcagcgcactggttcgcaatatgttcaagccgaaggccacgcctgccacgcagccggtagtcgacagcaccgcagccttcgcctaccgcaccgcaccggaattcctggcgatggaaaccggcgaccgagacaccggcaatgtgaactactcccctgcttcgatgtggatggcgttggccatcgccgcgcagggcgccaatggcacgacccgctcgcaactgaatgagctgctgggctccggttcgctggccgacagcgactaccaatcgctgctgagttcgatcaacgggcaatattcgggggcgaaatccgagatgagcgccgcgaactcgctgtggatcgataacgactactctcttgccagcgattaccaatccaccgtcaagaagatattcgaggccgaagtcaccacgctaccgttcgacgatcaggccgccgccaagatgtccgattggattgccaaacatacgaatggttcgctcaagccgaagatcacgctgcgtgaccgtgaagtcctgtccatcatcaacaccgtctatgcggatggccgctggaaggatccgttcgaagagcagtccaccggcgacggcaccttccacggcgaagccggagatgctcaggtgccgatgatgcaccggaccttcagccaaatgacttacagccatgatgagtacaacacttggcagcgggtggagattccgttcgacaacggcggcaatctggccatcgtgctgccggccgaagggcatttcgacgagctggccggcgatgctcagaaactcggatgggcgttcggcacgtgttcgtcggcatcccctggcgaggacgcaatgggttgcgccgcggacagtctgcccggatggggcgtctccgtcaactcggccacggtgaacgtctcgctgccacgattcaccgtcgacagcatgttcgactcggaagccaccatcaaggcattcgaaaaactgggggtgaccgatgcgttcagtgcaggcgacgccgacttcaccaagatggtcgacaccgattcgcacggcgagaatctgtatatcggttcgattctgcaaggcacgcgcatcgaggtgaacgaggccggcgccaaggccatgtccttcaccaaagccggcgcagacttcactagcgcgccggtggacaacatcgagttcacggtggatcgcccattcctgtattcgtacgtcaccccggacggcataccattattcatcggtgcggtgcgcaacctcggcggagtcggtggagaacactgatactttcccgacagtccgtcaattagggtgtatcgtttgacgcatggctacgatgaaggaaatcgcgaacaaggcgggggtttccgtctctacggtgtcgctggtgctcaacggacgcgacgaggggcgcgtaaagtccgaaattgcggacaatgtgcgcgccatcgccaccaagctcggctaccggtcgaatccgctggccagttcgctgcgtacaggcaagacgcacatcctcggtttcatcagtgaggaggtggccaccaccccgtacgccggcggtatgattctgggcgcgcagaccgccgcaagccagttcggctatatgctcatcaccgtgagcaccgacggtgagaacagcgagagcgaggaaatcgccgcactcaagcgatacggcaccgacggtttcctgtacgccaagatgtcgaaccgcatcacccatgcgccttcttcgctggccaagacgccactggtgttggtggatgccaccgactcgcttggcaaaatcccgagcgtggaaccggacgagttccaaatcggctacgacgccaccaccagattggttaaggccggatgcgcacgtatcgcctatgtgggttgctcggaaccgatgattgcgcaggatggtcgtttggaaggctatcaggcggcgctcagggacgcctgcctcgactatgacgatcgtctggtcgtcaatgtgctcaataacgggccggcactgaccgcagtcagcgatttgttcgacgccgagcatccggacggattcttctgcttcaacgatgcccgcgcctggtatgtgtacgaatgcgccgcacgccgaggactcacggtcggcaaggacatctccgtgatcggcgtggacaaccatcgcgtgttcgccgaaacgctggaaccgatgctcaccactgtggaactgccgcatttcgagatgggctactgggccgtggccaagctggtgtcaattatcgaaggacgctcgatggacgacgtctcacggccagcgaccaccgctcccctgccgccgatcgacgcgccgattccggcgaagatccactgcacgctgatcgaaaaggcctcggtgaagtaaccgaggcccacacgatttctcaaggcctccgtccagcacggaggcctttttgcatgtcgaacgggtacgacacgccgatgacgtcaatcgattgacgtaaatcgattgacgttgcatgattattacgacccccccaacttttgcaaaggcgcagccgcccgagccgaagcatcacatggcaaataaccacccaagtagtaatcaaaggatgattatggcaagtgcaaccaaatccgcatggaagaatccttcctatctgcagagctctttcggcatcttcatgttcttctgctcctggggcatctggtggtccttcttctcccgctggctcaccgacccgacccacggtctgggca

SEQ ID NO: 3587 - DNA, 3411 bp, Unknown
  R85_18m  MAG No. k141_27078
gtccacgccacatccggccaccaatgaagcgccgaccaggacggcacgaatcggcttcacgccgttcacgcctttccaatcggggccgatcggcgcctcgatatccaccacgcgacccttggcatcgaacaaaccgaaccgcttgcccttcggctcggacgccaacttcacccggcccttggcccacataccctcaatcggagcaacggcagcatcaatcacacgcaagattcccacggccacccaacatagtccgccctcctcgacctcgttagcggccagtagcaacccatattcgaaaactcgataaccatcgtcaattcgcatagtttgaacgttttaggcgttttggtcgctttggacgttttatactgtgatagataaaaaggaggtcaccatggcagaatccgacaaactcaccattccacgaacaatccttccatccatcaacattgacgacatgacgacattggaggcattcaccgcacgatttcttgatgagcggatcttcatcaaagatgccagcggcgtggagactcccctaccttcgcagctttgcgacgccgtcaggcagacggccatccttctcgccgaaggcaaaagtgtaatgatcagtgccaccgaacaagatctgactaccgaacaggcggcggcaatgctcggcatttcgcggcaaacactgataagactgcttgataaaggacttattcctttttcacgtccgtccaatcaccgtcgcatccggctggaagacctgcttgaatacaagcgagcctcgaaacacaccaaggattgcgccctgagccaaatgatcggcgtcggggaagacgccgaattgtacgacctgcccgagccgaccccgcaggaagccatgcatgcggtatcggaggtaaggagagtacgggccgatgctgtcggtgtttcttgatgccaatgtcatctattccatcaccttgaccgatgttctgctcaccttggccgagcatgacctttttcttcccctgtggtcgcctaacgtattacaagaagcacaggaagccgcctcccgaacactgcctgacgccgcacaacaagccttccgaaaaagactgataatgatggaccaggcattccccgaatcctccatacatgttgaggaatcggaatggagccaattcgatctgcctgacccggatgatcgtcacgtacttgcggctgcggcacagggacaagcagacgcactggccacgcgcaatatcaaggattttccccagaaactgcttgactctttctccattcaggtcatcacgccagatgatttgctctgtgtattacttagacgaaatccggaagccacagctagcgccatacgtgagcttatcgattctcgacatcggccaccgataaacattcccgactttgctaaaagacttgaacgctctggcgcaacacagtttgcagccgctattgcgcatatacgacagcctttcggcaatcattcgtactttgaccagtaacccatgaattctggatgaattggggtgaaccggcgggtctggaggcgagcgggcggcggattatggggcacaatggtgtcaaggaggccgccatggtcgatgactatactgccaaaatgactgagctgatcgaactcatgcgcctgatcggcaacgatacgcagcagtgcgaggtcaaggaatgcaagcgcaagatctcctcgaccatcaccgatacgctgtccgcgttctccaacggctccggcggctggatcatcctgggcctgtccgaaaagaacgggttcacgccggtcgagggattcgacgcgcgcgccatgcaggaggcgctgagccaggcgtgcgagaagatgacgccggtggtgcggcccgtgatcgtcacctgcccgttcgaaggcgcgaatctggtgttcgcgcgcatcgacgagatgctgccgcgcgacaagccctgcttcaccaccgcgctcggaccgcacggcggctcgttcatccgcaccggcgacggcgaccggcgcatgacctcctatgaggtcgaccggctcatcgaggaacatctgcagcccacgtacgatttggatatcgtgcccggcgccacgaccgatgacctcgacccgcagcttgttgccggattgttggcgcgcgtgcgcgaacagcatccgcgcgtgttcgccgaccgggacggcatcgatgtgctgctggatctgcaggtgttgcgccatgatgattccgacgagtcggaggtcggcggaatactgcgtcccaccttggccggactgctggcgttgggccgctatccgcagaagttctatccgcggctcggcatttcgatagccgtgtttccggggacgagccgggacgatgtgttccggggcgacgaacgattggtcgcctcgaagtcggtggtcggttcgattccggtgatgatcgacgatacggtcgactcgctgatgcgttggattggcgcgaagaagcccgattatccgccactcgtgttgcgcgaggcgattgcgaacgcgctcacccaccgtgattattcgcccgatgcgcgcggcacgcaggtgcatatcagcgtgttcaccgatcgcatcgagatcaccaatccgggtggcctgtacggcatggtgacacatgatgtgctggcgagtccgcatccggtgacgggtgcaccgttcgtctccacccgaaaccagttcctgttcacgctgctggagtccacgccgtatccgggcggcgggtttgtgaacccagaaggcggcgacggctaccagcgcatcgccgccgcgttgcgcgaggccggcatcgagccggcgaccacgcgcaacgacatcaacacgttcacgatgaccatcaccaagcagcgcacgatggcgaacagttcgccgggtgacgtggtcaaggcgattatgaccgtactggagcggcattcggcgatgagcgtcaaggagatcatgcgcgaactgcagttgacgccgctggccgccacgtccggcatgcgcgagctgatgaaggaagggcgggtcgcccgagtcaagttcgccgacgactcggtacagcggtatcggttgaaaggctgattttctcactcggccagctgcgtggtggcgggcgcggccagggtgggacgggatcggcggaagcggccggcggccaggccaatgcagatgaacatcacgccgaacagtgcgaccaatcccagcgagccggcccagccggcgacgcttatgccggtttcctccgccgtgccggagccgagcgcgttgtcgatcgcggtgcaataccaccagccgggcaggaacttggctatggtcaccatcacgccgggcatcatgtcaaccggcaatgcgacgcccgacgtgaacatgatgagcaggccgaagatgttggcgaacccgttggccgcctcttccgagagcccgaa

SEQ ID NO: 3588 - DNA, 2843 bp, Unknown
  R85_18m  MAG No. k141_27324
gccaccccgcccgaagaccggttgccggtgctgacctatgtgggcgcctacgaggatgcgcaggccaccgcagccgtacgccgcgaactgttgcgaggcggccaggtgttctatgtccacaatcgtgtgcaggatatctcgtccatcgccgacaagatccacacgctggtgcccgaggcgcacgtcggcatcgcccacggcaagatgggggagaagcagctcgaccagatcatccgcgacttctggcatcgtgacatcgacgtgctcgtgtgcaccacgatcatcgagacgggtctggacatatccaacgcgaacacgctgatcgtcgaccatgccgaccgtttcggcttgagccagctccatcagctgcgtggccgcgtcggtcgcggccgcgagcgcgcgtacgcttacttcctgtacgacccgtccaagccgatgaccgagcaatcccacgacaggctcgccacgatcgcgcagaacacggcgctcggctccggtttcgacgtggccatgaaggatctggagctgcgtggcaccggaaaccttctgggcgacgagcagtccggccatatcgagggcgtgggcttcgacctgtacgtacgcatggtgtccgaagccgtggagaagtacaaggagcctgaggagaacgtcgagccggtggccgtgtccatcgacctgcccatcgaagcgtcgattccgatcgagtacatcgattcggacaagctgcgtctggaagcgtaccgcaagctcgcctccgctcgcaacgaggccgatttgaaggatctggaagaggagcttaccgaccgttacggcaagccgccggtcgaattcgagaccctgttcgacgtggcccgtctgaagttcaaggcccgcaagctcggcatttcggagattctcgcgcaatccaaccgcgtgcgcatcggccgtatcgacccgcccgaatccatccagatgcgtatgggtcgtatttacaagggcacccaataccgtccggtcacacaccagctcatcgtccccaccccgttcaccggctccctgggccaaggccccatgagctccgaccaggtagtcctctggactaaccaactcctcgatgacttggcatggaggccacaacgatgaaaaaccaacacgcggcaacacttgccggctatgagattccccgcctcggcatgggcacgatggcgctcgccatcgaggggcgcccctctaaccatgatcaggcaatcgagaccatccatgccgcgctcgatgccggagtccgttatttggacacggcttggtcctattatctgcccagcgcgcccggcaccggcgaaccggaggatatgggctatggcgaatatctggtccgcgatgctctgcactcgtggcatggccccaaagatcaggtgctcgtggccaccaaaaccggctggctgcgtacgcttgacggcaacggcaactacggctggcaggccgacgcccgacccgaaaccatgatcgccaatgccaaggaatcagcccgccgcctcggtgtcgatacgctcgatctgctctactcgcactgcaatgatccgcaggtgccgtacgaagaccagatgggcgcactcaagcagctcgtggacgaaggtgtggccaaagcggtcggtatctccagaatcgacaacgcggacatcgaagccgcccacaacattttgggcgatcgtctcgtggccgtccagaaccagttctccccggttcaccgcgaccccgaacacacgttggagacctgcgaaaaactcggtttggctttcgtctgctggtcgccgctcggtggattccttgacccgttcaacgagcatctgttcgaccggttccgcgaagtcgcgaagtcccacgactgctcctaccagcgcgtcacgctcgcgtgggaacttgcgcaataccaatatctgttcacgattccctcggccagaaacccgcaggagattcaggactcgttcaaagccggcgaactgaaattgtccgacagtgaaatcgactacctcaatggcaaggacatcgactgagcgatttcgtccgtactgtcttgcaatcaggcggcacactggcattgtgagcgctaacactaaattttgggcgtgttgttcacaacgtccacaaatcgcactactcttaagaatgtcattcaagatacacaaccgttttaaggagtagttgtggcagtaattgaaagcgtgtacgcgcgtcagattctggattcccgtggcaacccgaccgttgaggtctacctggagaccgaagacggcgctcagggcaagggtctggttccgtccggcgcctccaccggtgaagctgaggcttgggagcgtcgcgatggcgacaagtccgtctacggcggcaagggcgttcttaacgcggtcaaggccgtgaacgaggtcatcgctccgaaggtcatcggcatggacgctgctgaccagcgcgctctggacgacctgatgatcgagctcgacggcaccccgaacaagggcaagctgggcgccaacgccatcctgggtgtctccctggctgctctgtacgcttccgccgagtctgccggcctgccgctgtaccgctacatcggcggcaccaacggccacatcctgccggtcccgaacatgaacatcatgaacggtggcgctcacgctgacttcgccaccgacattcaggagtacatgatttccccgtacggcttcgacacctactccgaggctctgcgcgctggcgttgaggtctaccacaccctgaagaacgtcctgaagaaggaaggcctgaacaccggcctcggcgacgagggcggcttcgccccgaagatgaagtccaacgaggactccctcaagtac

SEQ ID NO: 3589 - DNA, 3326 bp, Unknown
  R85_18m  MAG No. k141_27342
cggctccaccagttgccgagcgcgaagcgcggcagtagcggcgtcgggccggtgagcttgtagaagtcctgcacggcttcgatgtaccgatggccgtatccgaagacatacagatccttgccggggtgctcgcgcggaatgacccacatgccgaatgggttggcctcgcccttgacggtggcggcttcggcgccttcgacgatcacgtttgatgcggaatcgtcgagcacggcccagccgtcgcgggagatcacgccgagccccagttcgatctcaccgtcgaccgcgtccagcgtacgcgcggtgccgcgcaggttgccgtcctgggcttcgccgtagtgccacgtattcatctgggaattcgccacgcctttgacgacgatgctcagaccttccttactgaacggctgcatgtcgtaggtgaggcgcagcgccggcgtatcgatgatgagcagcccgtcgcgctcggtcttcgtgaacttcggcgggtttgaagtgccgtccgcacggttcgcgccatccgcaccgttcgcgtcatccgacaaccaatcgcgattgacgatcatttgggtggcgtggtcttcgaacttgccgttgtcctgccattcgaggcggacgagcgattcggtgatgatgccgatgcgccaacggtcgccttggatgaccgcggccgggttcatgcccggatgggtggccagctgtggaaaggtggacattggtgtgctcctttgctcgtgttattttccacgttgttgttagtgtatccatgaaccatcgccgccgtgcgggcctcagacatcgcgatacgctccgtcatggtccttttcatgcggatatactgttaccgacggcgacacgcatcgggggcattcatgcggcgatggccgtggtgtcgcgcagcatcagctgcggggccacggtttcaaatcgcggttcggacaggggtccttccatcgcggcaagcgctttgcgcgcggcaatggcgcctaggtcattcgggcgttgccgcaatgtggtcaggcccattttggcgctgaaggggatatcgtcgaagccaattactgacaggtcacgcggcacgcgcagcccatattgcggcaaccggtacagcaccggaatcgccatttcgtcggtctggaagcagactgcggtgggcgtgggcgacatggtggtcagctgggcgagcgccgcgccggtcgtatcctcatggccggagcagcgaatctgctcaagcgtgacgtcaggatgggccgcagcggcatcgataaggccttgcagtcggttttccgcactgaagcgcagttgactggtgtcatccggcgcgccgtacacgtaggcgatgttgcgatggccgagcgaaatcaggtgttcgaaagccgtatgcatgcccagcttgtcgtcaatgcacaccgcgccgtcaagtccgatggtggacggggtgttgatgccgatgagcggcacgttcacgtctttcagacgactgacctcatccgggtcgatgtcgaacgagcagacgatgaccgcgtccacattgcgacgaaccggcagttcagtgaagaaatcatgccgttcccgcgcgttcgacaggccgtatacggagatgtcgtatccggccgggccgaatacggaattgagcccgcggaagacattggcattgaaccagacggcaatggtatcggcatgcaggagtgcgatgcggaacgattgtccggatttcaacgcggccgccgaccgggagacctggaagtcgagtttgcgtgcggcggcgaggactcggtcacgtgtcttcggcagcacaagattcggcttggcgaaggttcgtgacaccgttgacacggatacgccagcctctttcgctaccgcttgaatgctcgcttttgccatggcaacctcgctcatcaacagtggataacaatcccgctcaaaagacaacgttatcatacctaagcgagcaacatgcacgccacgctgtctatttagaagtgcaacgcccctgttcgtcggctaattctagcagttcgtcggtgaatgccccgggccgaacccgggttctagatagaagcgcaacacccgctctatggttggaagtgttcaggttctaactggagaaggtgttgcgcccatgaggaaagtgtattcccacttgtcggcacaggaacgcatccggatcgacgaattgcgcaaccgcgaggggctcggcgtgcgccagatcgccctgaggatgggccgtgacaagtccaccgtcagccgcgagctgagacgcggcctgtggttcgcgtccgacgagaacgagtcccaccgcccctaccggccgaaacagctgaagacgggcgcgtggacgtcccgtccgttctactcggcgatgaccgcgcagcgcaaggccgagcggcgcgcccgccagctgcgcaagcccatgcgcatggcatacgacccgctgctcgaatgggtcatgaccgcgctgcgcaagggatggacgcccgaactcatcgagggacggctgaaggtcgaatggccgtccgacccgcatatgaggatcagctacgaatgcctctaccagtggatctacgccaagccgcgcagggcattggacctcaggcagtacctgccgcggggcaagcggcatcgcacgcgcgccaggggcaggaggtcgaaggggtcgcgcatcccgatgcgcgtgccgatcgccgacaggcccaaatgcgtggactcgcgccgcgagttcggccattatgagtccgacacggtcgtcggcgcctccccgtcgaggcggtgcatcgacacgcaggtcgaacgcaggagccgcaggctgttcgccaggttcgtccccgacaagagcgcgctggccacggcgcgcgccgaatacgacatctacaaggacatccccgcgccggcgcgcatcgaccgcacctgggacaacggcaccgaatcctcctgccacatgctcgtggacgaggcgctgggcatgctcgcctatttcgcggacccgtactcctcctaccagcgagggtcgaacgagaaccgcaacgggcgcatccgccgccaccttcccaagaggaccggtttcgacgacctgacggacgcggacctgcaggccatcgtcgatgagatcaacgacacccccatgaaggtcctgggctgggaaacgcccaacgaggtttggtaccgcgagctcggcaagccaatgtcaaagacaagccacccgaagacgagcgttgcacttacaaattgaattcgggaggagggaacccatgaccgcgaataacaagcgcgatgactggtggaagcaagctgtcgtcttcaggtctatccgcgtagcttcaaagacg

SEQ ID NO: 3590 - DNA, 7964 bp, Unknown
  R85_18m  MAG No. k141_27400
cccgacccagtccatcctgaccatcacctccaacgtggagtacggcaagaacaccggttccttcccgtcccgccacaagaagggcaccccgtacgccccgggcgccaacccggagaacggcatggactcgcacggcatgctgccgtccatgttctccgtcggcaagatcgactacaacgacgccctcgacggcatctcgctgaccaacaccatcacccccgatggtctgggccgcgatgaagccgagcgcatcggcaacctggtcggcatcctggacgcgggcaacggccacggcctctaccacgcgaacatcaacgttctgcgccgcgagaccatggaggatgccgtcgagcaccccgaaaagtacccgcacctgaccgtgcgcgtctccggctacgcggtgaacttcgtcaagctcaccaaggagcagcagctcgacgtcatctcccgtaccttccaccagggcgccgtcgtcgactgatgaccaaccccgcgaaccgcggcaatgactaactgaaggggtggggcacggctccaccccttccttatttcccacagactttcgcatcatttggaacaggaggacaactatgcccgcaacacccacgttccgcaccacgaccaggcatatgctcaaggaatcgaagacctatgcctcgcagactttgatgggcggcctttccggctttgaatccccaatcggactcgaccgacgtgaccgcctttccgccctgaaatccggcgatatcggcttcgtccactcttgggacatcaacacctccgtggatggaccgggcacccgcatgaccgtattcatgtccggctgcccgctgcgctgccagtactgccagaacccggacacttggaagatgcgcgacggcaagcccgtctaccttgacgccatgatcaagaaggtcgatcgttacaaggacctgttcaaggccacgcatggcggtatcaccttctccggcggcgaatccatgatgcagcccgccttcgtctcgcgtgtgttccatgccgccaaggagatgggcgtgcacacctgcctcgatacgtccggcttcctcaacacgagctacaccgacgagatgctcgaggacatcgacctgtgtctgctcgacgtcaaatccggcgacgaggagacctatcacaaggtcaccggcggcaccttgcagcccaccatcgattttggccagcgactggctaaggccggcaagaagatctgggtacgatttgtgctcgtgccgggcctgaccgactccgaagagaacgtcgaaaacgtggcgaagatctgcgagtccttcggtgatgccgtcgaacacatcgacgtgctgggattccaccagcttggccgcccgaagtggcacgaactgcgcatcccatacccgctggagaaccagaagggacccaacgccgccacccgttcgcgggtggccaaccagttcaaggaccacggcttcaccgtgttttaaattgcagggccgaaccgcgcgtaaataccacgattcggcccgttcgcccataccctagagatatggccgacatctacgcatttcctatgggagcgtccaacgacggacgccccgtacgccctcagggtgtgccggatgaagtatgggcagctgtcgaatccgtcagcaccatgaagcgcatccatgacgtgcgctatcgggagattcccgtgccttccaccttggccgattatggtatcggcgtggaattcgaagcgggagagcgtgccctcggcgatgccttttccgccggtcttggcaacgatgccgaatcacgaatcgccacaggctggatcatgatgctttatgctcatgagctgcgcattgaccgggattccaactggcgttgcgtggcgttcgcgcggctgccgctggaaaccgccgaaaacgattctctgacccccggcatgtactgggatgacatgtgcgactatttcgacggcatcgagccggattcggtatccggcacagtcaccgtgacccaaaacacggcttttggttcgatggccggctccaccagcgccgggtgtgagattcgcgtctcatggaccccgcttgacgggaccggaccggacggtactatggacgccggcgcacaaatccgctcgtgggccgcattcatcagatccaccatccgttttgaggaggatgacgccagttgagtgacgtccgtgacaccgaaccccgactgctgaaagagcctcgcgggggagtgcccgatgtcacttcgtcgctggatggctatcatcgtgcctgcgatgcgctggccgaggcgacgggctcgctggccgccgacgccgaacgggcgtccggattccgctatggacatgaggattggctgattcagttcaaacgtgaaggtgcgggcatcgccttgcttgatcccgtcgccctgacacgggccggagctgactggaatgaattcaatgacgccgtgggcgatgctacatggattctgcatgattctctgatggacttgcccggattcgccgaaatcggactcaaacccaaggccttgttcgacacggaaatagcggcgcgattgctcggcctgcaccgcttcggtctggccgccgtcaccgaacactacctcggcatcacgctggccaaagagcattccgccgccgattggtcctaccgtccgctgccgcgcgactggcgcaactatgcggcgctcgacgtggaggtgcttatcgaactcgaaaccttgatgcgtcgtgacctgaaagccgcaggcaaggacgagtgggccgctgaagagttttctcacgctttggttgcgggccttgccccgcgcaaacctcatccgattccttggctgcgtatctcgcgcatcacccagctgagtcgtgatccgaggggcttggccatcgccaaatccctatgggaggagcgcgaccggctcgcccggcgatacgacatcgctcccagcctgttattgaccgattcgtcaatcatcgaggccgcgaccaacaagccgcacaatgccgcccaattccgcgcactccgatccctgaacgagcgtgtgcgcattcataccggcaccgagcaggacaaaatgttcgagcggtacgcgccgattcagcgtacggtcaagccgaaggtctggaagcaggccatcgaccgcgccatggccctgaagcccacccaatggcctaccatgcccgcccccgaacaggacgaaaacggtgtggtgaacgcgccccgatccatgcgactgtggcaacagcgccatccggagcgttatgaccgtctgcagcgggtacggcgtgtgatcaaccgcatcgccgaagacacccgcacgccggccgagatgatcatcaagccacagatcctacgcaacctgtgctgggtggaagacccggtggaagtggacgtcgagacgttcctgatcgagcagggcgcaagaaactggcaggtgaaactcattgcaccgtccgtaagtggcgttatcatgtagaggttgccttacggcagaactgtaagaaataacgacttttgaggagtcattagcgtgaagatcagcgttcgtaacctcgagcccaccaaggtgaagctcaccgtcactgttgaaccggaagagctcaacccgtatctggatgcggcccgtaaggaaatcgccaagcaggtgaacgttcccggcttccgtaagggccacgttcccggcaagatcatcgaccagcgcatcggtttcgccgccgtcgccggtgaggccgtgaacgacgcggtcccggagttgtactccaaggccctggatgagaagaagattcgtccgatggctcagccggagttcgacgtgcaggatgttccgcagtccgccaacgacgagaccaagctgaagttcaccgccaccgtcgagcgtcgtcctgacatcgaactgccggaaatcgacggtcttgagatcgccatctccaagccggaagtcaaggatgaggacgtcgacaagcgcctcgagaccctgcgtcagcgcttcggcaccttggtcggcgtggaccgcccggccgccaagggcgacttcgccaacatcgacctgactgctgagattgacggcgagaccgtcgactcccaggaaggcgtgagctacgagctcggctccaacaccatgctcgacggtctggacgaggctcttgacggcctgtccgccggcgaggagaccaccttcgaaggcacgctggaagccggcgagcacgagggccagaaggccaccgtgaaggtcaaggtcaactccgtcaaggctgaggaactgccggagctgaacgatgagttcgcttccgaagcttccgagttcgacactctggacgagctcaaggctgacatccgcaaggctgccgctcaggacgccgaaggtcgtcaggccaccgaggctcgcgatgccttcatcgccaagctgcaggaaggcctcgagatcccggtgccgaagggtgtcaaggccaacatggtcgaagagcagctcaagggcatgaccccggacccggagaaggccaccaaggagcagaaggctcaggccgaggagaccgtggagaaggatctgcgcgatcagatggtgctcgacgccctggccgagaagctggacgttcaggtgtcccagtccgacgtgttcaacttcctcgcttccatcgcccagcagtacggcatggacccgaacaacttcatccaggccatcatcaagaatggccagcttggctccgctgtgcaggaagtcggccgttccaagggtctgctcgccggcatgcgcgccgtcaagttcaccgctgatggcgaggttgtggacctctccggcttcctgggcgaggccgctgaggacgaagagtccgagtccgtcgaggccgcttccgctgctgccgccgtggccgacgaactgtccgccaaggatgacgccaaggacgctgagtgagcatagcctcatcgcgttagcgtgattgtttgagcccggaatcgtgtttcacggttccgggctcttcctattctggtaaaaggactatttctttggctcccctttggggggagctgtcgggcgtagcgagactgaggggagttcccaaggcatactcgttgcatagcgtgcggaggttgacatgcagccaacggttactatcaaacgccttggttggctcgctgcggcgaccattgtgctcggcgtgctcatcggtgtgggagcaggtctgctgaccctgttgctctacggcgttgaacatgtgctgctcggctacatcgaaggcccagaattgtctggtccattcggcgtgcccgctgcacgccgtgtgatatcggtgaccgtgggactcggcatcgcgggcattatctggtatctgctacgacacaaaacgactgtggtgccctcagtcaagaaggccgtggcgggaaagcgaatgcctttctggcaaaccattgtgcatgtggtgttgcagattttcatcgtcggctccggtgcctcgatcggccgagaagtcgccccacgcgaactcggcgccatgatcgcgcaacgtttttgcgacctgttccatatcgagggcgttgatggtatcgaccggcgcatggtggtggcagtggctgccggtgccggtctaggaggcgtctatgacgcgccgctggccggcatgttcttcgccgtcgaaatcctgttggtggatgtgacgatcgaaaaggttgcgtttggactgggcgtgtctgccattgccgcattcgtggcggttgcgatcaaagggcattgcctgttctacgacatcaccgccatgcaaccggaatccacgccaacgttaatgctgttcgctctgatctgcggtgcggcatgtggagtgggcggcgcattgttccgaaaaggttcgcaatgggcggaagcacacaagccgaccggcaaggccattctgtggcagatgccgctggctggtctcatcaccggtttggtggcgattgttgtgccgcaggtgatgggcaacggccgtgccgcagcgcaacttggattcagcacgttcattcctgaaaccgccggcactgctggtgccatgcagtcggcatcttcagcggccgcctctccatggaacttgctgacgggcggcggtaatgtatccgattcggcctctggcgggggagcgggctctggaatggcctcgttttgggccatgcttcagggtgggagcggctcttctggatccgtgatgaacgccggtttcccgctgtcccagtccaatatctggatgttgctgggtgtgttggcactcacctttgtcgccaaggcgctggtgacgctgatgaccattcgctccggtgcatcgggcggtgtgctgcagcccggcatcgcattaggttccacgctgggtgcgatgctcggcctcgtatggatactgatgtttccgactgattcggtaaccgcgtgtgccttgatcggtgcggcttcgttgctttcggcctcacagcaggcaccgcttatggccatgtgcttggtgatggagctgaccgaagcgccgattaccttcttcgtgccagtcggcatggccgtggccacgtcgtcgttgatatcaaagtggttgctgagtcgtaagtaagtagatgcatatattctggctcccctctctgaggggagctgtcgaacacagtgagactgaggggagccgaggtaaagaaagctatgtcagaaaacaccgaagtccgtgcggcacttgaatcgcttgccgctgagccgctcactgagcagatcgactactatcgaaagccattcatggtgttgtgggccgccattcaggaggccgccagcgatgtggccgaagactacgacttgcctgcggatatggcccaattatgggtggccgaacagatgcgccaagtcgccgattcactggtcgatcggctcgcggaaaaagccgtggcccatggtgccagcaagtccaacgtggcgcgagccgccggtgccagccccgccaatgccgcccgtcgcttcccgcgtctgggcgacgatgccgcctcccagacccgcctcctcattgacgacgtcctcgacaccttggaataacccgaaatccctacgctacccgccaaaaagcacgcgaaaagccgccttcagtcgcttcaaggcggtagtctgaacaatgttcgagtaattagaaggagaatcaaggtgagcaatacctttgcgaccttgccggtcatggcgggcgatgacgtcccggccggccccgtcgacccgattttcaaccgtctgctcaaagaccgcatcatctggatgggtgaagaggtcaaggacgatatggccaaccgcatctgcgctcagctgctgatgctggccgccgaggacccgaagaaggacatctggctgtacatcaactcgccgggcggctccatcaccgcaggcatggccatctacgacaccatgcagctcatcgagcctgacgtggcgaccgtgggcctgggcatgtgcgcttccatgggccagttcctgctgagctccggcaccaagggcaagcgttacctgacctcgcacgcccgtgtgctcatgcaccagccttccggcggcatcggcggcaccgccactgacgtgcgcatcaacgccgagctcatcatggacatgaagaaaaccatgagcgagctgaccgctgagcagaccggccacaccctcgaggagatctaccgcgacaacgaatacgaccactggttcaccgcccaggaagccctcgactatggcttcgtggacaagctcgtgaccacgccggacaccatcggcaacaaccagcagggggagtgagactcatggcaagtgaagaagcaaagttcgccgcccgtgccgaccgcttggccggccgtcatggcgtagccggtttcatgccggccgccgcccgcgcagcccagcccgcgccgaccagccgttacatcatgccgcagttcgtggagaagaccccgtatggcatgaagacccaggacgcctactcccgcctgttcgaggatcgcatcatcttcctcggc

SEQ ID NO: 3591 - DNA, 2979 bp, Unknown
  R85_18m  MAG No. k141_27634
acatcatccgcgagaaagtgaccaacgatgatccccgcctatgatgagacatacttgccggacgccatggccaacttggccggcgccttcgattatgcgctgaacgattgcgggttgccggtcggcctattcatggacttcttcgccacctccgaggcggccgcgcttttcgggcgaggcacgcccaaatacgtgtgtggcatgtccggcgaagagctggtggccgaaatcatgcggcaaaccggttgggcgcgcattctcgatatgccgccagccgcactgcgcgccggctcaacacccgaatactgggccggctgggcgctcgcatactgccaatggaccaggggagtgcggttctcggacattctcgacgtgctgccgttcggcgatatcgtgcgactgtacccgactctgcacgaagccgacgaaagccgattcgtcgacgtgtacgacgagcgggccgcccataatcgcaccgagggcgactcccggctgcacacagtccgcgtgcgcgccggactcagccaatccgggctggcccgccgctccggcgttaccctgcgctccatccaaatgtacgagcagcgccgcaaagacctcggcagagccgccgtctccaccgtgctcgctttggcccgcacgcttggctgccgcatcgaagatctgttggagccgtagggctgacagcgccatatctttactcccgaccgattgtgcgtgcgaaacgacaggttgtgtaatacgggcggcgcggcccgggcgaacctgattcaatcaaactagcgatggatcgtgcgttcgcggactgccacatcggcctcggccgagtcgggcactgcgccgagttggcactgcacagacgcggtgcctgcggcgtgacgcaacggattcgtcagacagccgtacaacagtgcaagggagaacgatatggaacttgaagaactatcggtcgccgagaaagccgcgatgctctcaggtggctccgaatgggattcccgcggcaacgagaaggccggcatccccagcttcgtgatgagcgacggcccccacggtgtgcgccgccagctcggcgaaggcgaccatctgggtctggggtcatccaagcccgccacctgcttcccgaccgccggcaccgttgccagctcctgggctccggcgctcgccgaagaaatgggcaaggcacttggcaacgaagcgcacgatctggacgtgaatgtgctgcttggcccaggcctgaacatcaagcgcaacccgctgtgcggccgcaattttgagtactattccgaagaccctatcgtggccggtcgtatggcagccggtctgattcgcggcattcagtccaacggtgtttccgcctgcccgaagcatttcgcggtcaacagccaggagctgcgccgtcaagcctccaactccgtggtcgatgagcgcacgatgcgcgagatttacctgaccgcgtttgaaatcgccgtgcgtgaggccgcgccgatgaccatcatgacttcgtacaacgagatcaacggcgtctacgcacacgagaacaagcacctgctgcaggacatcctgcgcaacgaatggggcttcgacggcatggtcgtctccgactggggcggctccaactccgccgtggccgcggtcaaggccggtggctcgctcgaaatgccgagccccggctacacctccgtgcgcgaactcgaaggcgcggtcaaggccggcaccttgtccgaggccgacctcaacgctcgtgccgccgaagtcgccaagatcgcacgactgaccaaaaccgagggcgtaggccgagacgacctgctcaaagatgccgtcgccgctgcgcaccacgaaatcgctcgtaaggtggccgagaactcgtccgtgctgctcaagaacgcttccgccacgctgccgctacagtccggcactcgcgtcgccgtaattggcgacatggccaaaaccccgcgattccaaggctccggctcttccaaggtgaatgccactcgcgaagagaacatccttgatgagctcaagaacgccgcagcagccaccggcgtgaccgtggccggctacgcgcaaggctacgaccgccaaggaaccaagaaccagacgctcatcgacgaagccaaaacgctcgccgccgccgacaccactgatgcggtgatcgccgttgtcggcctcgacgagcgcagcgaatccgagggcctcgaccgttccaccatggcgatcccgcaagtgcagaacgatctggtcgacgccctgaccgccaccggcaagcccgtcatcatcgtgctcgtggccggctctccggtcgagctgccatggttcgacgccgtgtccgcaatcctgtacgtcggcctgtccggccaagcgggcgcatccgccaccgtgcgcgccctgaccggccagatcaacccatccggtcacctggccgaaacttggccgatcagttacgtcgactgcccgtccgccggctggtacccggccatcggtcgcgacgccatctaccgcgagggcccgttcgtcggctaccgctactacgaaaccgccaacgtgcccgtccgcttcccgttcggctacggcctgagctacgcgaccttcacctacagcaacctgaccgccgacgaaaccggcgtccagttcaccgtgaccaacgattccgacgtgcccggcgccaccgtcgcccagctgtatgtgaccggcccgtccgacggtgtgctacgccctgcccgcgagctcaaaggctttgccaaggttcagctcgacgcacacgaatcaaaaaccgtgcgcatcgaattcgaccgctacaccttccgccatttcgacacggcagccaacgcatggcgtactgaatccggcgtgtggacgctggctgtcggcaccaatgccgaagacctgccgctgacctgcgaattcgcgatcgccggcgacgtggacgccatccccgccgaccctgcgctcggccactaccagaccggtgacgtcaagcac

SEQ ID NO: 3592 - DNA, 8810 bp, Unknown
  R85_18m  MAG No. k141_27736
agaagaccccgtatggcatgaagacccaggacgcctactcccgcctgttcgaggatcgcatcatcttcctcggcgtgcaggtggacgacgcctccgccgacgacgtgatggcccagctgctggtcctcgaatcccaggatccgaaccgtgacgtgatgatgtacatcaactcacccggcggttcgatgacggccatgaccgccatctacgacaccatgcagtacatcaagcccgacgtgcagaccgtgtgtctcggccaggccgcctccgccgccgccattctgctggcctccggcaccaagggcaagcgcctgatgctgccgaacgcccgtgtgctcatccaccagccggccatcgaccaaggcttcggcaaggccacggagatcgagattcaggccaaggaaatgctgcgtatgcgcgaatggctggaggagaccctcgccaagcacaccggccaggatgtcgagaagattcgccgcgacatcgaagtggacactttcctgaccgctcctgaagccaaggaatacggcatcgtggacgaggtgctggaacaccgccagtaaaacttccgaacattgcaataccctcggtcggcaacgaccgggggtattgtatttcaaggatgacaatgataatgcgcagcgtggcggttcgacggtgcggcgcggtcggcaaaggagaatcatgggacgtgtggtgagctacaacgaggacgtaccccgttgcacgttctgcggcaaaaccgaacgtcaggtcagaaaactggtggccggtcccaacgcctccatctgcgatgaatgcatcgccctgtgcgtggacatcatctccgaggagcgtgtcaaagatgccgaggtcaattcgctgagcctgcccaagcccgctcagatcttcgattatctcaaccgctacgtcatcggtcaggagaacgccaagcgcgcattgtccgtggccgtatacaatcattacaaacgcgtcaatatggagcttcaggagtccgctgagcagcttgacgggaataacgggcacggtggccagaccggcaaacaagccaagcaatccgctcccgcccagacgcgtgctacccgccgcaacagtgaccctttggctgacgttgaggtcgccaaatcaaacattctgttgctcggccccaccggtgtgggcaaaacctatcttgcacaggcgttggcccgcgtaatgaacgtgccattcgtcatcaccgacgccaccaccctgaccgaggccggctatgtaggcgacgatgtggaaaccgtgctccaacgtcttctccaagccgcggatggcgacgtaagccgagcccagcacggcatcatctacattgacgaaatcgataagatcgcgcgcaaatcaggtgagaacacctccatcacccgtgacgtgtccggtgagggcgttcagcaggcgttgctgaagattttggaaggcaccatcgcctccgtgccgttggagggcacgcgcaagcataaggagcaggacactgcgcagatggacacacgcggcatcctattcatctgcggcggtgcgttcgtgggactgacggatattgttcgcaagcgattgggccgtcgagagaccggcttcggcgcgaattggcacgacgccgacatgaaagacgaggaattgctcgaacaggtcaatgccgatgatctggccgagttcgggctgttgcctgagttcatcggacgtttgccggtcaccagtgtgctgaaggaacttaccgtagacgatctgacggcgattctcacccagccagccaacgcgctgatcaagcagtaccgtaagctgttcgccgtcgacggcgtcgacctgcagttcaccgaacaggccattcgggcgattgctgatatcgccatcaagcaggggaccggcgcacgcgggttgcgttcgattatcgaacgtacgttgcaggacacgatgttccagttgccgagtttggatgatgtgaagcaggtgattgtggacaaggcgtccgtagagggttccagtacgcccaaactcttgcgcgaagccgtggatgtgccgcagggacgcctcaaagttgcgtagtcggttttgcttgaccgagtccgtacacatgcggcgtgaggccagtaaatacgccgttgcggtggcgattaggatggtgcgactcgccgcaacacgccgagttgcattcatctgaacggcgtgtattatatatcgagttgtctgaaaagacaacatgcgccagtagcccagcggattagagcagctgactacggatcagcaggtcgcaggttcgaatcctgtctggcgcactcccgaaccacggggacaacagtggtatgcgccagtagcccagcggattagagcagctgactacggatcagcaggtcgcaggttcgaatcctgtctggcgcacagtaagcctcgaaagcgaaatgcttccgaggcttttccaattgtattggcccgtttgagtcggccacacaggggtggggtaaggttgcccttcgcgactcagcccggagcggaacgtcctgagatattccgtactattacatacggttcatccaagagagtacagcaaggagacgcgatggccacgaccgccggcgcgaagaagggactttggtccaccatcaggcgaatcgccgcctcagaccgtatttccggactcatcatgctcggcttcgcgctcaccggcctggtgctcgcgaacctgcccgccaccgcgcatgcgttcgagaccgtagcggaaacgcatctgttcatcccctacaccaatctcgacctgccgattggccattgggcccaggatggtctgcttaccatcttcttcctgaccgtgggcctcgaactgaagcaggaactcaccaccggctcgctcgccaatccgaaagcggccgccgtgccgatgctgtgcgcggtgggcggcatgatcgccccgcccatcctgttcctggccgtcacggcattgttctctcagatcgggcctggtgaacccggcacgctgattctgaccaccaccggcagcagcattccgttctcggagatgtcgcacggctgggcagtgcccaccgccacggatatcgcgttctcactggccgtgctcgccctgtttgccaaggccctgcccggttcgatccgcgcgttcctgatgacgcttgccaccgtcgatgacctgctggccattattctgatcgccgtattcttctcctcgatcaacgcctggtattggttcatcggcatcgtcgtgtgcgccgtcatctgggcatacctcgtacgactgaaaaaagtgccgtggattgcggtcggcatcgtcggcgtcctcgcttggatcatgatgttcgaggcaggcgtgcatcccacactggccggcgtgctggttggcctgctgactccctcccgtgaaatgcacggcgaactttcaccgcgtgccgaacgctatgccaacaagcttcagccattctccgcactgctggccctgcccatcttcgccctgttcgccaccggcgtgcacttcgagtcggtgagcccgctgttgctggcttcgccgttggttatcgcactgattgtggctttggtggtcggcaaacctttgggcatcatcaccaccgcatggctggccacgcatgtgggcgggctcaagatggccaaggggctgcgcgtgcgcgacatgattcccgctgccgtcgcctgcggcattggcttcaccgtgtccttcctcatcgcctcgctggcgtacaagaatgcggaactttccgctgaggcgcgcttcggcgtgctggtggcctccctgatcgccgccgcgatttccggtgtgctgctgagccgtcagtccaagagattcgagaaggccgcagccgcagcagcggccgatgcggaggatgacgaatcgattgatggcgatggcgctggtcagaccggtcgcaccacaaagtccaccacgcccacggaacaccccggcaccctcgccgacggcaccgccagtgtggagattgacttccgccactgatggcttagacgatccctactccattgttggccttgtttcgtgaaaaccgtacgctgaggcgcgctcaccgtacgttcttcacgagatgaggccttatttcgtgaaaaccgtacgctgagtgtcactcaccgtacgttcttcacgaagtcaaggatgatttcgcggaaaacgtatgcagagcttcaggcgctagaatgcgaagagtcgatagcaccgtacaggaggatattggatggcaaagaagcagaagaaatccaagaagaacgacggcaaaaaggccgctgaagcaaagaatccagccgaggccgcatccaagtccacagtcgtggacgatatggaaccattggaagccacagccgcgaatgatgcggcaacgttggaggccgagacggcaaccgaggctgccgcaacgccggtgaacccggtcgacttggaggacgtctcgccgctgggcgacacctatcatcgcggcccggtgattctacgcggccagatgattccctcggacaataccaccgccaatctgctgaaacccgaccaggacaccgactggctgcacatggacccatggcgtgtgctgcgcatccaatcggaattcgtggacggtttcggggcgctcgccgagctcggacctgcggtctctattttcggctccgcacgcacccagcgcaccgaatcgatctacaaggcggcccggcgcatgggtagccagatagccaagcgcaacatcgccgtcatcaccggcggtggtcccggcatcatggaagccgcgaataggggagcggcactggctggcggcaaatccgtgggactcggcatcgaattgccgcacgagcaggggttgaaccagtgggtgaacctcggcatgagcttccggtacttctttgtgcggaaaaccatgttcgtcaagtattcctccggcgtgatcgtgtgcccgggcggcttcggcacactggatgagatgttcgagctgctgaccttggtccagacccacaaggtggcgaatattccggtggtgctctacggcaaggaatactggcaggggctctttgactggctcaacggtccggtggccgagcacggcatgatttcggcaatcgacccgaaactggtcaccgtgaccgatgacgccgacgaagccgtggaggtggccgtcagtgcaattgtgaggtaagcgagatagagtggctcccctctccgaggggagccaagggcagagttactttttgtaggcgatgagcaggcctgtgccgtcaggggtaagcgtggactcgaaaccttcgtcatcttcgacggtggtgagcagctcacgcatggcgatggccttgtcgctgcggtcggccggattaatcatgccgccctgaccgtcctccaacgccagcacatcggtgaacacgatcacgccgtgcgcgcgcagcagacgggaggcctgggcgaacgtggcggcatagttctcggcgtcgcccgccaccacgatcagatcgtaatcattggcgttgaggcgcggcagaaacacgctggccggggcgttcaccgcacgcaacgtggtgtcggtctcatcctgcagttcggcgaacgccttgcgaatcagcgcgatgccctgagcggtggaatcgaccgcagtcagcaggcccttgttatccagcgcatgggcgagctgcaaggtctccaccagcgagccggtgcctacggcgatgaccgaagcggcgccggtgatgcgcaccagcatgcccagcagacgggcctgcgcggccgaaccctgcaactggccggacttgtcggcggccgtacgggcgtcggtcaacgcattggattcacgttcgcgcgcgtgttcctcggtgaattcccatgccttggcgaggttggtgtactgcgttctgtccataattcgttcctttatgtcttctctcgtgcgggcacccggtggatgtatcgactacgtgttgcagcgattgccgtagctggtcgtggcgcggcttagcgctcgcggaccttggccacgatctgccacatctcctcgcccacatcgatgccgcgcgggcagtggcgggagcaggcgcgcacggactggcaggcggccacgccgtcggcggtgtcgatggcgtccatacgctccatggccttggtgtcgcgcgaatcgttgacgaaacgggaggcccaaatcagcgaggccgggccgatgaaagcgtcgccgccggcgtacaccgggcaggcaccttcgcacacgccgcaggcgatgcagttgctcagcagctcgtatttggcgagttgttcggggttctgcaggtattcgaacacgtccaccttgccttcggcggtggtggcgagcacgccgtccgcctgaagatatggggtgagcttccttatttggttgagcatcgggtcgatgtcggcgatgaggtcgcgctgcggcgggaagccgggcagggatgccagttcgatgactcccagcgagccgtttgcggccgagtcctggtcggctgccgcgtttgcgtcgttttccgcggaatcgtcggattcttcggactcggtgccggtgtgccggaacccttcgtcatcgacttcggggatggcgccgggctgcttggcccaatcgcggatggtggccgtgcacagcagggtgggggtgccgttgatggccacggcgtctgaaccgcacatgccgtgaccgcacgaatagcggaaggccagcgtcgggtcgacggtgcgtttgatggtcagcaggcagtcgagcacggtgtccgaggggcgcgcgggaatcgtgtattcctgcacccactgcttgccgcgcggacgacggcgtgccgccgaatccgagccgccgccgaatggggagcttttcttggcgaacgggctgccgccgcgtgcacgttcggcgcgctcgggtcgcggcatgaaacgatgcacttgcagggtaaccgtcgtgttgctcgcctcagccatgttctgcctccatgaaacagtgggatgtcaagtccaatatcagccaacctattgtgccacaagccctaggcggcttggtattaccaccagcggatcagtactcgcgcttcttgggtggatagtcggtgatgtgcactggcttgaaacttgccggaccatcatcggcgaccatcgagtgagcaaggaaatgctcatcgtcgcgttcggggaaatcaagtcgttgcatggatccgcgggattcctgacgggattcggaagcgtgcagcatggcctcggccagttcgattagatgacggacttcccagatggcggtgacctcctgattgaaagcggcggtcttgtcatgggcccgcaaggtatcggcaaccggtgtgatgtcgttgttgatctgagtcaacgccgtatcgatggtctgagcggtgcaacgtacggccagagcctgctccatcactgatccgagttgggccatgagctgataaggattggcggtgggcccgccatcgtctgaatcgtccatcggtccggcgagcagttcgtcaagctctgccttgcgggaatcggcagcctgatcggcggcatcggtcagcatgtcatcggtcgaatcatcggccatggaggagtcaaccgggttctcgacgatgcgtgcggccatcgtctgaccagcacgtgtaccgaacaggcaggcgtcgagcagagaattgccgcccagacgattcgcaccatgtacggagacacaagagcattcgccagcggagaacagtccatcgactacctgcacggcaccgtcggcccaacggtacacctcgccattggtggtgatggggatgccgcccatcgtgtaatgcgcagtgggcttgatgggcaccaggtccttggccggatcgaggttcgcgtactgctcgatggtttcgaccacctgcggtagcacttccttcatacgttcggggtcgatgccggtcatgtccagccagacgcagtccttcggaccatccgggtccttcgggtcggcgacgccgcggccggcgtcgatctccgccatgatggagcgggagaccacgtctcgcgcggccagatccctatgctccggggcgtagcgttccataaacggctcaccgtcggcgttcctcaggatgccgccctcggcgcgggccgcctcggacagcaggatgccggtgtgcgcgagcccggtggggtggaactgcacaaattcgatgtcctccagctgcaggccggcggccaaggccaatgccatgccgtcgccggtcaggtcccaggaattcgatgtggtatggaacagtcggcccgcgccaccggtggcaagaagcacgttgcgcgcgtggatggcctgaatcttgcccgaatgcgtgtcaaatgccacgatgccggccgcctgcttgccgtcgtcggcgagcaccaggtcggtcacataccattcctcggcgaactcgacgccggcggccacgcactgctgccacaaggtgtgcagaatctggtggccgatgcggtcggccgcataggcggcgcgcttgaccggggcaccgccgaactcgcgcgtgtggccgccgaaccggcgctgggcgatatgcccgtcatcggtacgggagaaggccacgccctgacgctccaggttgatcacggtctgcggcgcgtattcggcgagcagtttggccgcgtcctggtcgacgagccagtcgccgcccttgatggtgtcgtagtaatgccagtgccagtcatcggactccacattgcccaggctcgcggcgataccgccctcggccgaaccggtgtgcgaacgcagcggctgcagtttggagaccacgaggatcttcgggtccacgccttgttccttgagctcggtgattttgggggagcg

SEQ ID NO: 3593 - DNA, 4205 bp, Unknown
  R85_18m  MAG No. k141_27740
aggtcatcgccgacggcggcatgggcgactccggcagcttcgtcaaggccctggccctcggcgccgacgcggtcatgctcggcgcgccgctggcccgcgccaccgaggcccccggcaagggcacccactggggttccgaagcccgccaccagacgctgccgcgcggctaccgcaccacggtcggcacggtcggcccgctcgaacaggtgctgttcggaccgagccaccaggcggacggcaagaccaacttcatcggcgccctcaagcgcgctatggcctccaccggctacgtcgacgtgaagaacttccagcgttgcggcatggtggtcaacccgtattccgcacgataatcccgattacccccctgaaaatgggggtttgccctccatgcaggaggcttagcttgccctaaggcgcgctcaagtcgtttgacttggcgcgcctttcgtgatgttgtagtacaaacgctcgccgatgatggtgagttgcaagggggcttgaaggggtcatcatggagtattcgggatttttccacggcacatatcagtacgggccgttgccgagttatgacggattcatcgttgtggagctgtcggatcgcccggtgcggtatcatatccaacccacattcataggcgggctgaatgcgaaggaatgtcattccatggccatggctgcatgccgcatcgcctgcacatcggcggacgcgatacgtggcagactcagcgtcgcacatctcaacagagccatgacaaaaccatgcctggaacggctgcaaaccatgcaatacctgctcggcacccacatggtcactcatccggagctcaaagcgaaattctgctatctgcccactgtccccacattgatcgacggcatgatcaccggcaaggacacgctggaaatggcggtattcatgaccatcggccaggaaaatctgcgagtcaacctcaaactgaagttcatcggttctcgatggatgtgcatctatgccgatctgggctgaccagacggccccgcccgcacaccgattcctacgctggcagcggaagacggttctgccgtgtcataggctggttcgcctatagtagtgaccatgcgtgaacatgtagaagaacccagatatgtcaccaccgatgacgacaccgtctactcgctgctggccaaacgagcagctcgcacgccggatgacatcatcgcggaatggcaggatgacaacacccaccaatggcgcggcgccacagctactgaaatgctgtcccgcgtacgcgaggtggccaagggcctgttgggacttggcgtcaaagccggcaccatggtgctgatttactcgcctacctgctatgagtggggtgtggctgatttcgcttgcgcggcaatcggcgctgtggttgtgcccgtctatgagaccgattccgcccgtcagaccgcgggcatcgtcgaggaagtcgatcccgccatcgcctttgccggcgacttccagcgcgcacagacgcttgagcagatccgtgtcaatcatccgggcatgaaatacgtgttcaatttcaaggccgatggccttgacgctgtcgctgacttcgggcatggcgtatccgatgagacgttggatgcggctatcgctcgtatcaaagccgatgatctgcttaccgtggtctacacctccggttccaccggcaagcccaagggcgcgatgctctccaaccgcaattacacgcacatcgtgcttaacggctacgagattctgcgtggcatgctgtacgacgacaaccgtctgctgctgttcctgccactggcgcactgcttcgcccgctacatccagtacgtgtgcatcggtggctgcggcgtggtcggatacattcccgacgccaagcgactgctcgccgatatccgcagcttcaagcccacctacctgctgggcgtgccacgtgtgttcgagaaggtgtataacgcggcctcgcagaaggctggtgccggcatccaggggcatatcttcgcccagtcggtcaagcacttcgtcaagtggagcaaggatgagcaggccggccgcggccattcgttcatcgagcgcatgcgccattcgttctacatggccacggtgggcaaatccattcgttccgctctcggaccgaacctcaaatggctggcctgcggtggtgcgccgctcaacgtggatttggcccacttcttcaacggcatggatgacatcaccttcatccagggttatggcatgaccgaaaccgccgctccgatgctcgtcaattgggaggacgacaacgaggtcggttcggtcggcaagcctgggcctggcatgggcgtgcgtcttggcgaagacgatgaaattgagctgaccggcccgaacgtgttccttggctactacaagcagcccgaactcaccgcacagacgatgactgccgacggctggatcaaaaccggcgatctgggtcgtatcgacgaccgcggcttcaccttcattaccggacgcaagaaggacatcatcatcaccgccggcggcaagaacatcagccccgccccgatggaggatgtcatcgacacctgcccgatcgtggctcatgcagtagtagtcggcgacggcaagccgttcgtgtccgcacttatcgagctcgaccctgaaatgctgcattcctggctggaaggtcagggcctcaatgccgacatgacactcgccgaggccagcgacaacgacgcggtgcgtgcctttatccagcagtacatcgaccaggccaacgccaatgtctcccgcgctgagtccgtgcgcaaattcgcggtgctggatgaggaattcagtcaggagcacggcacgctcaccccgagcatgaaagtggtgcgtcccaaggtattgcagcgctacgccaccgtcatcgaagaggatctgtatgcgcccaagccatccaacaaaccgctgcctgccacagccaagatcatcgacagcacgctggagaccgtcaagaaatcctccgaatcggtcaagcaggcgtccgaacaggtcaaacaggcctcggaacagatgaaaaccagcgtgtctgattcgattgctagcgtgtcggagaagatcaagaagtcgaaggccgaacccgaagagggcgagaccggcgattccgccgacaatgccgacaatgccgctgacaccggcagcaagccggaccggccggctgacgagaagaacgaggagtaacgagaagtggccatccgtgagatcagggtcgtgcccgacccagtcctgcgcaccccctgcgatgagatcaaggaaatcaccccggccgtgcgccgcctggttgacgacctgctggaaaccgtggacgatccgggccgagcgggcctgtccgccaaccagatcggcgtgagcctgagggccttctcctacaacatcgacggcaaggtcggctacgttctgaaccccgtactcgaggagaagtccggcgagcagtatggcgatgaaggttgtctgtccgtgcccggcttgtggtacaagacccgtcgtgccgactacgcgcgcgtgcgtggcatcgacctggacggcaacgaggtcgtgctcgagggctccgggctgatgggccgtatgcttcagcacgaatgcgaccatctcgacggccacgtgtatttggatcgcctggaaaaggaagaacgccgcgaagccctgcgctacatgcgcaatcgtcaggcgaagtagtccatacccggctcccgctggcgggagccgccgaacgtagtgagactgagggtggttctgccggtaccgcccgtaactcccctcagtcgcctatggcgacaggttcccctcaaggaggggaacctgtcttcttagtactggctccgtgctattctcgaaacttgtgtgccacccggcaacggacgcagtcgctggcgtccggaaccacccaatattgtcaaccggcacacaacaaattcgcgtcatgctcgcgacggcctgtgtcggtcggctgcacaactcgtgaaaccgggggagcagctgcacgcaggtgcgcatggccaggcaagaaccgacaatgaaaggtagtaataccatggctcagatcactatgagcgatatgctgaaggctggcctgcacttcggccaccagacccgtcgttggaacccgaagatgaagcagttcatcctcacccagcgcaacggcatccacatcatcaacctgttcaagtcgctcgacatgatcgacaaggcgtacgac

SEQ ID NO: 3594 - DNA, 7397 bp, Unknown
  R85_18m  MAG No. k141_27912
aaagctcggcgacgtgctgctcacccccaccaagatctacgtcaaggctctctccccgctgttcaaggcaggcgtggtcaagggcgtggcccacatcaccggcggcggcttcatcgagaacatcccgcgtatgattccggacggcctggccgctgagatcgagctcggcacctggcctgtgctcccgattttcgatgtgctggagaaggccggcaacatcgatcacaaggagatgtacaacatcttcaacatgggcatcggcatggtgctcgccattgaccccgcccgcaaggacgaggcgctgaagctgctcgccgacaacaacgaacccgcctacgtgctcggccagatcaccaccgacaccaccgacacgcaaatcgtactgaagtagctccagataccggctcccctcaaagaggggagccaaagactttaggaaggaaaaacatgggtcagaaagtattggtcatcggctccggtgcgcgtgagcataccattgcctacacgctgctcaaggcaccgagcattgacgaagtcaccgtggctcccggcaacccgggcatgctcaaggacggcatccacaccacgcagctgagccagtcgaaccacgccgcacttatcgaattcgtgaagaacaatggctatgactgggtgttcgtgggcccggaagtcccgctgatcgaaggcatcgtggacgatttcgccgccgccggcatcaaggcgttcggcccgtccaaggccgccgcccagatcgagggttccaaggatttcgccaagcagctcatggaccgtcacaacattccgaccgccaaatataagacgttcggagacttggacatggctcaggcttacgtacacgagcatggcgcgccgatcgtcatcaaggccgatggtctggccgccggcaagggcgtgaccgtggccatggacgagcacaccgcccagcgtgcgcttgaagacatcttcatcgatcatcgcttcggctccgccggtgccaaggtcgttatcgaggacttccttgacggccaggaattctccctgatgagcttcgtcaacggcactgatttctggccgatgccgatctcccaggatcacaagcgcgcccacgatggcgacgaaggcccgaacaccggtggcatgggtgcctacagcccggtgccgcagattccgcagtccgtggtcgacgaggccatcgagaaaatcgtgcgccccaccgtcgaaggcatggccgaggaaggcacgccgttcaccggcatcctgtacgccggcctgatcgccaccgccgacggaccgaaggtcatcgaattcaacgctcgtttcggcgacccggaaaccgaagtcgtgctcccgaagctcacctccgacctcggtgccggcatctccgccattctcgacggcgaaacccccgaattcatctgggatgagtccaacgccaccctcggcgtggtcatcgcctccaacggctacccggagaacgtcatcaagggtgcccgtgtgcccgagatcgaggtcgacgaggattcgcatgtctactatgccggcgtcgcctccgacgacaagggtggtctgattgccaactccggccgtgtcctgctcgtcgaaacctccgccccggacatcaagtccgctcaggacaaggtctacgcgatcatcgacaagctcgagctgcgcggactgttctaccgccacgacatcggcttcaaagccctgaagtaacagaagcggcgcatctgccgcatatttttggcccggtggccatgtcaatcgattgacgtggctaccgggccagatttttctgtcccggtagctgatttcggctctttttcgcaaaccaggacagttgaacacctcgaatataggaatatttggaattcccttccatgcaaaaccgcactattccgccattttcgtaatacgcggacgatactttcggcgtcagttttgtcccggtaagcagaaaatgactcgaaatcaaataccaggacagaaaaatctggcccggtacacgaatcaatcgattgacgtggctgccgggacagcgaacgtcactatgacaacgccatcacccaatatcagcgagcgatatcacgctagctgaatttggcgatgatgttgaacagtttggccttggcttcattgaagggcgggtacacgaggcgcagagtgtcggggaactgcggcttggtaaccacggttttgacgtggctgaaggtgaggaagcctgctttaccgtggtaggcgtcgatgccggacgcgcccacgccaccgaacggcagtcggctggacagcaggtgacccaacggcaacgaatatcccaaagctccggagctggtctgacgttcgaaagtcagccgaacctcgtgatcgcgcgagaacacatatgcagccaacggccgggaccgcttgttgatgaatcggattgcggactcggcatcctcaaccaccaggatcggcagaatcgggccgaagatctcctccttcattaccggcgcatccggtgacgtgccgtatagcacggtaggcgcgatatatcgggcggcgcgatcgaccttgcctccgcaaacgattcgcccggccggatcgaatacgccgggcaccttgtgaatctcgctcggctcaacagcggccgaggcagtcgcatcactatcagcggctgccgtattcgaaccggccgccggcttcgccgcattgttcgcgctaccggtgccaccaccggctgtctcccccgcgcttccgcgtccggcagccacgacattgaagcgccgcccgaccatatccatggccgcgcctaccgccgatgccacctgtaccagcggcgagctcggctcctcagacggcacggtgccgaccggcaatagcttgcacagtcgttcaaaatgacgatcgttgataatacgaccaaaatcaggcgaggccttcggatcttcgccatagaattcggtgatggctacggcgatgcgctcggccagagcctcggccacatccggcgtggcgagcacatagtcgggtgccacgcaggtctgtccggcattggtgaacttgccccatgcgatacgtcgtgcggccacattgatatccaccgtacggtccacgaagcacggtgatttgccgccgagttccaacgtgaccggtgtcaggtgctcggccgccgcacgcatgacgattttgccgacgtgcccgccgccggtgtagaagatatggttgaacggacatttcagcagttcgccggtttccttgggcccgcctccgaccacgcacacggactcggggtcaagatattgcggcacgagttcggcgatgaggcgcgaggtgttgggcgaaagctcggagggcttcaggcagatggcgttgcctgcggcgagcgcgtcggccattggctccagagccaacagcaccgggtaattccatggcgagatgatgagtaccacgcccttgggctcggcgatcgtccagccggcggcgggttgcagcatccaatgcatcgccttgggatggcgcgcggcccacagtccgagccggttgcggacgaactgcgcctcgccggccaccagattcagctccatcagtatggtttccgccgcgggtttgcccaaatcggccatggccgcagccacgaaagcatcacgattgtccgctaccagacggcatagcgcatccaattgcgcccgtcgccaagccaatggccgcgtacacccggattcgtaggcgtgacgcaactgagcgaaatccgcattgaccatggcacatccttcccgcaggatgcccgggtcggttttccgggcatcgactgtacctatcgtaccgtcatgacgatggcatgagggcgtttgtgctgcaggcaataccagacgtttcggctggtattcgccaaatagcttgggctcggccgaagtaggtggtgcaggtattgtcggcgagttcatcgacggtgatgggattggcgctggccacgccgagcagttcggcattggcaggcaggtcgtgttgtgcggccacagagtccacttgtacctccacatccacagcttcggcagaaggtccgacggcgatatgcccgcctgcatcaaccacaatgcggcggtcatcggtgacatgcacgatggcgtcgcggccctcatagcccgcccatgaccagctggccacgccgtcatgtcctcgttcgatgaatcgcgaggtgcggcccgcgagggtcgcgcgactcgtgaatcatcgcatcgtgcgggagcgtgactggctgccgcgctgccgtatcgcggtccttgccaattgaacggaaccgccagccatgattcacatcgatgcgcttcatggctttattgtaaggcgggagtgattggtctgtgggatctctccctcagtctcacttcgttcgacagctccctcatcagagggagctcacagcactatggcaacggtacagcaattttggacgggcttcgcccgcgttttgctggctcgcctgtcggctcgcacgttgcctacagaccgaaaatcctccggattttccgtcgcggcacagccgctcccctcacctacggatagcccactgagctatccgctttacggttcggccgggctgtctgctttacggcaacgtcataaaatctgtgtctttgaggtagtttttgccggcggtgatgtcgtattggatgagcttgtagtcggcaagcaactgcttggtttccttgtcgaagtcatcggtggacatcgggttgccgttttggtcgagatagatgttctggccttcgggaatacgatcccagccttggaccttgttgaccacaggcggttccatagcggcaatcttggaatgcatttcggtcaggaacgccagatacgggctgaccttggcgttcatgtgatcggcggcctgtgccacgaagaagttcggcgaagagtaggctgcatcgcttgccttattgccttgggagctggaagccttattcgaccagatgaagtaatcggtcaggtgcagggccaaggagttgttgccatcctcgctggcggacgagtagatgcccggcaagtgatcgccgtagaacactacggtgacgggcttatccagcgcatccagttcgttcaggaactcctgagtggcctgatcggtaatctccacacccttttgataggtctcaatcgactgctgttcatcatcacccagcggcgtacccgtggtggattcagcggtgtagtcgttgttctcataccactcgtggtagggcatgtggttctgcatggtgatgatctgaatgaacttgttcgtcttgccggacctgatgccttccagcgcagaatcataggaagacttatcagagacgtacggcgactcgtcaatcttgtcctgatacttgatcacgtccggaccggtcagcgtgtagaagtgcgagaacccgaacttcttgtagttcgtagcgcgcgagtacatgctggactcgtacggatggtagccgagcgagttggcgggcgcaccccacatctggttgatggtgggggtccaatgctggctcgggaccagctgctggtacgggctggacagggaggaatcgaaattggccatgctcagaccggaaagtcccatgtattcgaggttggccgtaccgccgccgtagccggaggagagcatcaggccggaggtggtgcccgccttgatcttgcggatgttgggcatcgaatccttattggtcttcagtcccggcacgcggctcgggtcggagaaggattcggacagcacgtacaccactgtcgaatcagtgaggttgttggtgcgggaggcgttgattgtctccgcttccttctggtagcgagcggcgaccttcttcatggtctcctcggagtagttgctcggcttgtccatgatcttcgggttgagctgacgggtaaaggccacgagcggaccgttgcgctgcgcgtcatacacggaatcccacatggatggcgtgtcccccaaggcgcgggagaacttgttggccagcgaatcggtggtgctcacatgaatgcagtacaacgcgaacaccagaatcggcagcagcagcagaatcagacgggaggtgaggttcaggctcaggttgtccgtacggatcatgcgacctttgcgcccgtcgaagtggcgcagcaccagaatcagggcgagcagcgcggcgaacgcgccaagtgccacgaggatggtcacgtgcgcgccggccggaatgaaggtgagcatattgccggtgttcgagccaaggaagccgaggtcggcgggcagaatggcctcgtaacggatctcgaccttgaaatgttcgatggcggccacgatgattccgaccgcaagaatcacgatgcttgccgtccagaatctgttgaacagcatcagcaacatgaggtacagcaacgcgacaagtatcacgttgagtacgaatacgaaattgccgtcggtccacatcttgctcacgaagccgaatccgacggtcggactggacagttgcacacgggtggagctggacgaaacgcccacttcgagcgccgtcacaacaataatgtcgaagataacgaagagcacgccgtacgcccagccggggaagggcttgtgggggtgctggggcgtgacttcattggcttcggcctttttgacccaaagcttgaaatggggtttcactgtggtgatactactagtgttctcgctcattcgcctgtttccgtatgggacttttcaagggcatattgttgccgctgaaccttggaaaatccatagttccactatttttcttaccgtttcctaactattcaccctaacgcaaagggtgcctcgggacatccccgaagcaccctgatatataaggagccttccctgatagcgaagcgttctgttctcccctaggcaacgcctcgctatctgacttgattattccccttattgctgttgcggattgccggctaccgccgcattacttcacggcggcggcgaactggtcgaccagtgcgctcatccagtcgagcaggttggtgtactgcttcggcatctgctcggtgagctccacgatcggcacgttgacgtccttggcggcaccggtgatctggtcggtggtggagttggcttcctggctgttgaagacgagcatcttgatggagccgcccttcagggtgtcctggaagtccttgatgtcggccggggtcggctcgctctcgttggcggaagcctgggcgtagcccttcggggtggcgtcggtcatcttgaggtcgtcggccaagtgccaggccacggattcggtggcggcgtacggcaggttctcggtcttggcggaagtctccttgatcttggactcaagctggtcttccttggcgtgccattctttgttgagcttggcgtagtcgtccttgtgactcgggtcggccttctggtaggcggcggtgatggcgtcggc

SEQ ID NO: 3595 - DNA, 10112 bp, Unknown
  R85_18m  MAG No. k141_27987
accatacttgaaaatatgacgcgtgggccctgacgacctctcaaagaacggcatgacaccaccatacgaccagcatcgccgcgtacacaatacacatcacacgcggccggcaagaaaaccgcacaactcctgcgccaccggtagcatctgcgactccaaaccggggttcatgaaacggtcgtagatattccacctatcgcacagggacacccacagatacgcccgccccgaagcaacaatcacattggggcgcaacggatgagcggacaatacctgcaacacattctgcggcggccccaccaactgtggccgaaccgcatgccccaacaaatcgcttaccgagcaccacgcataccccctgcgaacgagccggcacaggcaacaccaccacctgcatataccgcatggcgtaattactcaaaaagccattattgtcatacacattcagcgtgaacgtcagccacggtcccttgctgtagaacctgttcacccgcatattacgcacggcttcgccacgaagcaccaccgtgcttccagcatcgacggtccgtttggcctgccaatcacgcgcatggaccgaatacgtgaccgaagaaactccgggagccggctcataacggatctcaaccagcacaggaaccccgaaaccacggaaaaagcccaacacatcatcgcaatgcaaacgcacgccaccatgaacgacgcgatgacgccgttgcgataccaataccgccacgtcggccacatgcgctgcctgacacggaccatacgccagccgagcaacgaaccagccaccacgaacacgcaccagacaacaatgccgtaccggaaaaccctacccacccagaaaggaaaaccagatttatcagcattcagcagctacagcacgccgacgaacaccacggcctccagcatgtaccacggccaatccaactgccgacgaacaaccgcaccggcaacagcatccacacgatcccacatcatcaaccttctctcatcaaaaaccgcttcgtaaggcaaccatacagtcagcagtacggacaacaagccggctatcacacgtaccagcacagctcctgtgccacacaagcagcatctgcgactccagcgccaggggccatgtaccgcgaatcattgtcgcacacattgatcggcgtccacaggcaagccaggccattcgtcaccttcatgctgtcatgatttccgtggaaggccggggtgagcgctgcagaagcgcaaacgatagccagtggggtctgttcgtccgtccgccatggacagtggccggccgaatacagcctcatgcctgtgggacggcacgcggatttggccggtttccgcgcggcgtcccgcaggaacgtgggatggtagagaaatcaatcgtttgacgttcgtggcgttccacactatcaaccgccagaaccgcgcaatcacgccaatccccgttacggaccataatcatcccccgggctctctgcgggacggcagacgaaaaaccgcgaaatccgcgcgtcgtcccgcacttcgcccggtccacgaacaggacaagcatcaccgatagaccgaacacacatctacagccgcgacaagaaccccaacagctagccgcccgccccggatatcgccgtccaatagtaaatcgagcccaaaacgcaaacccaaagcactgactcagataataaaactcggattttccaccacagacagcgagaaactctcccctataccaagtagcgtacgtgccaccttgctcgatagacgaacaatgagaagtatcggttaacgggcatgccgggcaggtcgatgggctctggcgcgggaacgaagacggcgtaccagcacgaatgggccggcaaacgtgatcgtatacaacacgacggcgaggaacacgctgagccatgcggtgaacatgcccaacggcatctcctctaccggagtggtctcggctatgcatgcaacgatctatcactccgatgttgtggtcagtatgcgcggcagttgttcgtcacggttgaggaaagaacgcgtttggcaacgaagtagcgtacgccggccttcctcagtgcgggtgtataccatggtgcaatgcgtcaggcagcggtccaactgccggcgcagtatttcggcgtcctgctggcggcgggcaaatatggacgggcatgggaagcttacaccgtacgtgcgcacgccccattccttgccgatgatgacatatcgcggattgttgatgggcgcgagtagctccttcataacgccggcgaacagcacctgctcgcgccgcgaaccaccaatcagcatggcacgcaacgccgtgaatctgcgacgtgtctggcggatcgaggaagtcactcacctctttgcctaccgcgttggtttctaggcgctcaggttccgcagtcgccaaatgccagacattggccaccttatcggggtctgcggccacgctgcggttggcggccatgctgtatgcttcactgcatcagtgtaaggcacgaatcaataggttttgagccccagatcgatggtgagaatgatgccggcgattacggcggcggcgcgcatgatgtttgcgggaatcttgcgggtgatgggcggggcgatgtacccgccgatgaagcagccgatgcacagcatgatggcggccggccaatcgaccgcgccttggatgatgaataccactgaggcgctgatgttcgcgcctgtgccgatcagggttttcaatgcattgatcttgtggaatgggccgattttggcggcatcaagcatggcgagagccagggtgccggcgcccgcgccgaagtagccggagtagatggcgactgccaccacgcccagccatacccaccaggaatcctggctcatgggctgcacgagttgttccggcgggcggtgaggtgcggtaggggtggttgcgcgcttggcggcatcagtggcatcggtggcttcagtggcttcgatgtgcttgagttgcgcggtggcatccgcggcggcctgcttggcctgcatgcggccgcgcggattgatggcgatgatcagcgagctcagcaaaatcagcactggtgcggcgaattcaaagacactcgggtcgagtttgagcaacagaaacgcaccggccaccccgccgaacgcgccaatgaccacatacgtaatggagcgtaccgcttggcctttgagttctttgcgcgcgcccatcacgccaccgatgcccgtgccgaccacgccaacggtgttagaagcgtttgccaatacaggcggaatgccgaacgcgagcaaggccgggtatgagaccagtgacgatgcgcctaccgcatagcccacgaatcctgcgccgattccggccaacagaatcagtagtaatgaagttatggaaaagcccgcaatcattccccgtatccttgtcgctcatcgaccggcacattgccggccttgagcgagaatacgctgttgaggattggttgcgggttttatgttggaatgtggacgtagctcctcgcggaagcgattccctcagtcgcctgaggcgacaactcccctcgcacccgaggggagccagaaggaaatcagagcgcttcgttgtattcgcgaaccttgagggtgcggtgggaggatgccacgttttcgacgatcagacgcttcagggcgttgtcggcggcaatgtgctcgtccagccaggcgtcaccgagcttgaccagcgtggcgggatcggcgtaacccgggtacaggccgttgagcagggcctcggccatgtggtaggtcttgttcgcccagatccagtcgacggcctcgaaataccgggcggcgaacggctcggccaggtcgtggcgcggggtggcggagaagccacgggccacggcttcgagctgggagttggtcagctcgtcgttgtggagtgcctgatcccaagcccattccttggcttgcgtcgtggccatggaggcgcgggcgccgtaggcgaactcgcggttttccgtggtctccttcttggcgagctgcgcgtccacgtcgtcgttggtcatctcgttgacggaggtgagcgcttggacgatggtccacgtgaagttgttgtcgatttcgaggccttcaagacgcacggtgccgtccagcagaccgtgtgcgttggcggcgaatgcggcatcgccctcctcgccatagcccaggtaggcggtggcgagctggaactgggtgtccgagccggcttcggcggcgttggccagggtccacagctcggcggccacgtggcgcagcacatcgtcgcggcgggctggcgccacgtagtggtgggcggtggtgctcatgcaggccagcgcgtaacggaaggtggtggattcggtttccgtggccagaagacgcagggtcatgtccacgaagcgttcggccgggaattcgccgtcacgggtcatatcccagaaggcgagccaggtcacggcgcgggccagggcatcgtcgaaacgatgcaggttggcttcggcgaatgcctgggattcggcgtcgaaacgaatcttggtgtaggtcaggtcatcgtcgttgaccagcacgaatgccgggcgcggcttgcctgccgcggcctcgacgatggtggtttcgccatccacgtcgagttcgaactgctcggtgcgcacgatcttgccggtttcggcgtcttcgttgtagaagccgacggccaggcgatgcggacgcagcaccgggtgttcggccggcgcgctctgggtgagcttcaattcggcgatggtgccgtccgcgtttacggtcaggccggtggcgatcgtgttgatgccggattcctccagccacttggcgctccaggccttgagatcgcggccggaggtcttctccagttcgctcagtaggtcggccagggtggcgttggagtaggcgtggcggttcaggtagttgtggataccttcgaagaactgcgtgcggcccacgtagaatgccagctgcttcagcacggaggcgcccttggcgtaggtgatgccgtcgaagttgacgtaggtgtcgttgaggtcgttgatcggggcgacgatcgggtgcgtggtgggcagctgatcctggcgcaacgcccagctcttctcaccggagcagaaggtggcccaggcgtcatgccattcggtggcttcggcagtggccagcgtggaggtgaattcggcgaaggactcgttgagccacaggtcgttccaccacctcatggtcacatagtcgccgaaccacatgtgggccagctcgtgcagcacggtcaccacgcggcgctcggccagcgcgtcggtcaccttggactcgaacacgtaggagtcacggatggtgaccatgccgatgttctccatagcgcccgcgttgtattcgggaacgtagatctggtcgaacttggcgtacgggtagggcacgccccaggtcttggcgtagaacgcgaagcccttcttggtgatgtcgaacaggtagtcgacgtccttcgcgaaggccttggccaacgactgtcggcagtactgggccatcggcacggtgcgaccgtcttcgttcaggtattcggtgtgccattcggcgtacgggccggcgcagatggcggtcaggtaggagctcatcaccggggtcggctcgaagtcccacagacgggtgctttcgttcggcttgtcgccgagggtgccgtcgagggtttcgcgcggatcgtcctcgatggtggcaaccggcatgttggaggtgacgatccagctggcgggagcgagcaccttgaaatcgaaggtggccttcaggtcaggctggtcgaacacggcgtagacgcggcgcgcgtccggcacctcgaactgggagtacaggtagatgttgccatcggacgggtcgaccgagcggtgcaggccctcgccggtgttggagtaacggcacttggcttcgacggtgacctcgttcttctccttgaggtcggtcagttcgatgcggttgtcctggaaggccacggctgggtccagggacttgccgttgaggtcgatggatgtcacttcgtcggcaatcaggtcgaggaaggtcgacgaaccaggcttcgcgttgaagcagatgagcgacttggaaccgaagttcttcgcgccgaccgtcaggtcaaggtcgacgtgatagtgaatcggcgcttcgataacggccttacgttcttcggcttcaatacgagtgagattagaaccgggcatgacttcaattactccttacggtcgtccctggataatccggactacttggtttctacggtttcgacgtcctgggcgatgtcggccacgacgggcacgatcatcggcttgcggtgcagctggcgcgcaacccagctgccgagcgtgcggcgcatggtctgctgcagcttgtaggtgtcacgcgcgccctgcatcatctggtcgttgagctgttcgacgatctggtgacgcaccttgtcgaactcgctttcgtcctcggccacggcgttcaggtagatcttcgggccggtgacgacctcgtggttgtcggtgtcgaccaccacgaacgcggatacgaagccctcggtgccgagaatgcggcgcttttccagctcgtcatcggtcagctcgccgacggaatcgccatcgacgtacacgtaaccgcacggcacggagccgacgaccgcggccttgccgtgatacaggtcgaccacgtcgccgtcttcggccaagaccacgttctgcgggtccacgccggtcttgacggcgatcaggccgttggccaccaggtgacggttctcgccgtggatcggcatggcgcacttgggcttgacgatgttgtacatgtacagcagctcgccctcgttgcagtggccggacacatgcacggcggcgttgtcgcggttgacgaccttggcgccgagctgcacgagcttgttgatcaccttgtagacgccgtgctcattgcctggaatcagggagctggcaagaatcacggtgtcgaactcgttgatgtggatgtcgcggtggttgccgtcggcgatgcggccgagtgcggccatcggttcgccctgggaaccggtgcacatgaagacgagcttgtcgtcctgaatgtcgttggcctgcttcaggtccacgacggtgccttcggggatgtgcaggtagccgaggtcggcggcgatggacatgttgcgcaccatcgaacggccgacgaacacgaccttgcggccgtacttgtgggcggcgtccaccacctgctgcacacggtgcacgtgggaggagaagctggcgacgatgatcttgcgggtggcctgggcgaacgcttggtcaagggccgggccgatggaggtctcaggcttgacgaagccgggcacctcggcgttggtggagtccatcatcagcaggtccacgcccttttcgccgatcttgccgaattcgacgaggtcggtgatgcggtggtcgagcggcagctggtcgagcttgatatcgcccgtgtcgatcagggagccggccggggtcttgacgtagacggccaaggcgtccgggatggagtgggtgacgttgacgaattcgaggtcgaaggggcccaccttgagcttctcacggccggcaacctcaaccttggtggggttctggtggtgttccttgcacttggcgtccacgaaggcgagggtcagcttggagccgatcagcgggatgtccggacgcagcttgagcaggtagggcacgccgccgatgtggtcctcgtggccgtgggtgagcaccagggcgtcgaccttgtcgagacggttcttgatgtagctgaaatcgggcaggatgagatccacgcccggctgctcctcctcggggaagagcacgccgcagtcgatgagcagcaggtgaccgttgtattcgatcacgttcatgttgcggccgatttcgcccaagccgccgagcggcgtgatgcgcatggagcccttgcggtacttcggcggggcgatcagcacggcatcctgctggggtgcggtggcctgccgggtggcgttgatcttacgggacggcgtacggctgttggatccgttggcgttgcggccgcgcgcggaaccgcgacggcgagaattcgtgttcttgcttgttttcttttgttcttgtgccataacctttttgggatttctgttgtggtgcctctgctctgtcatgcaggggcggcgggctggcaacccgtatgcagcgtttcgggcttacagcagtccggcagcgcgcatgccctcttcagccttgtcaagctgagtggcgtcgggaccgatgttcggcagacgcatggtggtggaggggataacgcccttgaccttgagcgcagccttggccatgacggcctgatagccgtcgccattcaacgcgtggacaaggggggcgagctggttggcgaggcgacgggcggtggtgatatcgccgcgatcgaatgcctggacaagctgctgcatggggttggaggcgacgtgggcaatcaccgaaatgatgccgacggcgccgatggagaggaacggcaggaacaggccgtcatcgccggaataccaggcgaggccggtgcgctgctgcttctccactgcggctgcaagatcgccggtggcgtccttgacagccttgacgtgttcaagttcggccagtaggtcgtaggtttcgaccttgaccttcaagccggtacggccgggaacatcgtagacgatgatcggcttttcggcggattcgtcgacggccttgtagtggccgacgataccgtcctgcgaggggcgggaatagtaaggcatgacgacgagcaccgcgtcggcgcccgcttcctgagtctgttcgaccatacgcacggtgtgtgcggtgtcgttggagccggcgccggaaatcaccggaacgtcgacgacctccttgacggccctgaccagctcgaccttctcatccatatgggtgacgggcgattcaccggtggtgccattgaccaccagaccatccgcgccatcggcgacgaggtatttggcgagcttctgcgcggcggcgaaatcgacgctgccgtcggatttcatcggggtgaccatagccggcagaatgcggccgaaaggtgctggctcaagaaggtgcatgtcatgctcgctcatagtgttcaccgtacttcccattgtggactcttatactacgtaccttgattgttgctgaatgcgtggcattatggccggagccggtggcaatgccgtgatgcgcgtcccggcgcgcttccctgcctgaaatgcgggggcgactactggtcgactgcgggtcgattacaggtcgaggaagtggtcgaggccgatggtcaggccggccggagcgtcgccggcgagcttgcgcacggcaagcaggacgccgggcatgaagctggtgcggtcgaagctgtcggcccgaatggtcagctgctcgccggcgttgccgaagagcacttcctcgtgggcgttgaggccgcgcagacgcacggcgtgcacgtggatgccgtcgaccacctggccgcgtgagccgccatcggtttcggtggcgtccggcacgggggcgagtcctgcggccttgcgcgcttcggcgatgccgtgggcggtgtgaatggcggtgccggagggggcgtccaccttggtggggtggtgcagttcgatgacttcggcggattcgaagtatttcgcggccttggttgcaaagtagtcggccagtacggcggagatcgcgaaattaggtgcgatgaagaccttctgggtttcgggcttcgggccgttggcgatggcggatttgacctgggcgagtttctcgtcggtccaaccggtggtgccgaccaccacgtccacgccttggccgatcagggtcagcacgttgttcaggctgacggacggcacggtgaattcgacgaccacatcggtgttgtcggtggtgacctgggtcaggtcgtcgccggcatccaatgcgagcgccagctgcgtatcctcggcgttgttcaccgcttcgaccacgtgcgagcccatgcggccctttgctccgaccaccgaaaccttgatcatgtcttcttccctgtctacccgtacctgcccggcaatgtacccggaacgttttccaatcggcaatcagcctatcaccgccaagccctcacgccaatatcccgtccacagaatcgagctccctctgacaagccgaaccgtgaag

SEQ ID NO: 3596 - DNA, 31647 bp, Unknown
  R85_18m  MAG No. k141_28293
catcgcggtcgcggtgcggacggaagccgtcgccatcgcggcgcggaccgttgccgcgatagccgcccttgccaccgaaaccagagcgtccgcccttgtggaagtcgccacccttgccgtacgacttgcggtagccgccgtggccctcgccatcaccatcacggcgcggcgcgtagccttcgccatcctcacgacggcgcggcttgaaaccttcaccgtcatgacgcggcttgaaaccgcccttgccgcgcggcttgaaacccttgccaccgcggttgcccggtcggcgatcgccataccccttatggccgccgccgtaggacttgccggaacgctcgttaccttctgccattacttgttttccttaattcgttgttgattaacggttttccacggcgccgagcgccttcttgccacgacggatgagcgcgaagcggcctgccaggaagtcggcttcggccagcacctgctcctcatcctcgatacggttgttgttgagatacacgccaccggacttgatggcgcggcgtgcctcggaagcggacttgaacagtccggcagcctgggcggcgtcgattacgcgatcgcccggcttggagacggggaagacgtgctcgccgttctcgtcaaccaccttgaagccgtcgagcacggattccagcgtttcctcgtcgatgtcttcgaggttgccaccgcgtccgaacagcgcaccggaagcgtcaatggcggcctgggtagcggcctcgccatgcacgaagctggtgacctcccaggcgagggtcttctgggcctcgcgcttgccggggttggtcttggattcctcgaccagtcgttcgatttcggccttgggcaggaaggtgaacgccttcagcaggctttccatctccacgtccgggcggttgatccagaactggtagaacttgtacgggctgagcatcgtggcgtcgagccagacggcgttgccctcggacttgccgaacttcttgccggaagcatcagtgatgatcgggctggtgaacacgttgacgtccacaccgcgcaccttgtggatcaggtccaggccggaggtgaggttgccccactggtcggagccgccgagttccaacgtgcagtggtattcgtcaaacaggtggaggaagtcgttgccctgcagcacctggtagctgaactcggtgaaggagatgccttcctcagagttcaggcggcgggcgaccgtgtccttggcgagcatggtgcccagacggaagttcttgccgacgtcacgcaggaagtcgatgacggtcatcgaggcggtccaatcgtaattggatacgaaacgcacggcgttcgcgccttcggtgtccagaatgccgccgatctggttcttcagacgatcggcccagccggccaccacgtccttcgggttgagcgtgcgttcgccggactggcgcgggtcgccgatgagtccggtggcgccgccgaccagggcgattggatgatggcccgcaagctgcaggtgacgcatgttgatgagctgcacgaggttgccgatatgcaacgatgcagcagtggggtcgaagccgcaataataggtgatgggctcgccgttcagtgcttctgcgagtcgatcccggtccgtggactgggaaatcaacccgcgccattccagttcctcaagcagggtgttgaaacccgcttccttgaagtcggtgacgtgagccatagcttgtcgcttctccctatcgaattgtgaatgagactgcccaattgggcacagtcaagtttcgcagaacatggcgacagtgccgaacaccagccgagccgcgcgattcagtaaaacaccttattctagcggcgcgggcccataagttcgcgcaaagagtcgatgatgtcctgacgatccggcacctggaacttcgggaaggacttgagcatacgcttctgctgtgcgttgatgacgccattgacggcccagcgcagacgctcaaccgtatcctgcgaaaactcacgcatcctgtcggataccgcactggagccccgctgccacgtgccaccggcgcgtgccgccacatcctgcaccacctgagcgacggaatcgagcacctgctcgaatccgagcatgcccgtaaccgtgaccgccaagtcgatgatggtgatcagagccagtaccgtgaccagcgtatgcagcatcggcagcggaatcatatccgtgacccgctcgacatatggctgcgaaccaagtaccacgcccacgccgccgagaccgaaaatcaacgcgcccagcaggcagacgcggccttggaggttgaagcggaaattcgagtaatcccaccagcgggcgtggaacagctgctccatgacccacgaggttgtgtattcgagtatcgtggcgcccaccatcgaaatcaggaagatgatgatcgggttatgtacgttgccgagaatggcgacgccgagtatcgcgccggtgccgtagatcgggcacagcgggccgttgaggaaccctcggttgaccaagcggtgctgttggcaggagacgagaatggactcgtacgtccagccgacgaaactgtagaacagaaaccagaggaaataatgttcgagtgtggtgatcatcgacgggcttcgatctcggcgtagggcttcgcggcgggcaacgcgcgcttgttgaaccggtcgaacgagaaggtctcggcggtggcggagcatttgtccgccaaggtgaccagatagccttcgatatagcgcggcggcaccagggtcatcgggaacatgtggttctcgatgctgttgcgttcgatatcgttgagcttgaagtccttcagggcattgaccagggcggcgtggccatgggtgaagccatgccactggtgttcgccgttatcccagtcgtgccagtcgtacaggaagtaatcgtgcaggagggccgcgcgaatcagggatttgaggtcgacgcggtaccacaggtgcgcgcggtcggccatccacacagccaggcaggcgacacgcacggaatgttcgaacgtggtgacgttgccgtgctggtagtagcagcgttcgatctgcatgtggcgatgctcgatgacctcacggccgtgcttggcgaccaggcgttgaatctgcgttcgggtgagcagatgtcccacggtttcgaccctccgttcgggttggttcagtgcaatcccttgttgtgaattacgattacccgacgatattcaagaatccatcgagtaataccgtgaccgattgtagggcacacgtatgtccgtgcacactcatccaaaagaacgacaacgggaaccgttaatcgtggtgggtttcaagatagtcgagataaccctgaaaaccgccatcgaggcttgctacatcgtaaccgcgatcggcaaggatttcagctacttcctcgctccaccatccttgagcacaatagactacgacagttcgatctgtgggcacggttttgagcacatgggccagagggtcgagtggtgcattgatggcaccttcgaccgggtgggcggcgaagtcggctggttccctcaagtcgagcagcgtgaccgtattcgggtcgagcttggcaaattccgccggcgtgatgcggcggtacgatgcttcactgctctcatcgtcatcgaccgcattacgcaaagcaataggcatgttcttcccctctcgttccgatcttggctcccctcaaggaggggtgccacatagctctaaatcgcgcaggccggctgaatatagttggccggatcaatagcagtaatggtcggctgctcaccgcacaccgggcagtcgggcacatggttcggcaacggcacacggcggatgttcatggtcagggcatccacagtgagcatacgagccacgagcggctcccccacgccggcaatcagcttgacggcctcagtcgcctccagactgccgatcacaccgaccaccgcgcccagcacgccggcctccttgcaggtcggaatttcacctgcggcgggcatatcgcggaagatgcagcggtagcaggggccttcgcctgggatgacggtcatcacctggccggagaacccgaccacgcccgcatggatatacggcttgccggccagtacacatgcgtcattgatgaggaattttgcggcgaagttgtcggtggcatcgatcaccagatcgtacggttcgatgaggccggcgatgttgctggcatcgacgagctcgtagtaggtgtcgaccgtcacatctgggttgagcgcgcggatggccgtggccgcggattccactttgggcgctccgacacgtgcagtggtatggatgatctgacgttgcagattgctcatatccaccacatcgccgtccaccagtccgatatggccgacgccggccgccgccagatacagggcggccggagagccaagcccgcccgctccaatgatgagcacgctggaggccaacaaccgcttctgccctttgacgcccagccccttcaaaatcagatggcgcgcgtaccgctccacctgttcatcagtcaatgccatgttttctccatgtttccagctcccctcagtccgctacgcggccagctcccctcagagaggggagctaataaaagtgtcagtgcaaatatcccgtagtcggactggacggcacggcctgtccctcggtcaccttgcccagaccggacagatacgccgcacgaccagcatcgatggcgtgcttgaacgcctcagccatcagcgggatattgccagcagaggcaacggccgtgtacgccatcaccgcatccgcacccatctccatggcgtcgcatgcctgactcgggcgtccgatgccggcatcgatgatgaccggcacatgcgcattggcgatgatgatctcgatgaagtcacgcatgcgcaggcccatgttggagccgatcagcgaaccgagcggcataacggcggcggcaccggcctcctccagctggcgtgcggcaatcgggtccgggaacatgtagggcatgaccacgaagccttccttggccagcatttcggtggctcggatggtttcggcgttgtccggcaggaggtacttggtctcgtgttcgatttcgaccttgacgaagtcggtgtggcacacttcgcgtgccagtcgggcgatacgcacggcttcctcggcgttgcgcgcaccggaggtgttgggcagcaacgtgatgccttcgggaatgtagtcgagcacgctgttctcggtggtctgcgcgcggcgcagtgccatggtgacgatttgcgtgcctgcatgttcgaccgtggccttgatgaggttcaggtcgtagcggccggagcccagaatgaatcgcgactggaactcgtgaccgcccagggtcagcggcttgtcttccactggcagaatcggcgcggcggtgccgaccggattggtgacggcgggctgcggcggcagcggagtcgcctcaacagatgcttcagtaaccggattaatattgctcatagcttttcctttcatccaccctgtacaaactgcacaatttccatgacgcactggtcgtcgagcatggcgtcggcacgcttatcgcgcgggataatctcaccattgagttcgatggccacacgctcggcgcggaatccgtgcgcttcgagataatcggcgacgctgaccggcgtctcgagcgtgacctgctctccgttgacctgcataatatcctttcagatagtaaaaaagggtgcacgaaacgaaccgtaccttaagtggtgcgcccattcatgaacccaatcatgcgaccgttcgaccgctgtgatgtattggctccatcacgaccgtctcacggctgaattatgcaaacggaatgaaagctgtatcggagaacccggcaaatctgcaacaacgattccttacggcggcatgacccgcgtcaagttccccggtcgaagtctggcgacttcctctcagcctcacggctcccgttcgttacgatttctcagtgtatgccgttgcagtgacaacagcaaaatagagctccctctgacgagggagctctattgggactagaacgtgccgggggctttgtaggcggagccatccgacgtggatgcggggaagagcttgagttcttcgacctcggccttggcgtcggcgatctgctcgcgcacgcgaccgtaagcggtgccgcccttgccgttgcgggagtcgaccgaaccgtggctggagagcacttcgcgtactcccggagccttgtcggccggcaggaacgcggcgaaggtctcgatgaagtcattgtcggtcagatcccacagttcctggccgcggccttcggcgagcttgacgcaggcaccagagagctcgtgcgcatggcggaacggcacaccgttcttgacaagccattcggcgatgtcggtggccagcgcgaagccggtcggggcttcctcttcaagccgctcgctgtcgaagtgcatggtcttgaccatgccggtgaaggcgggcagcagcacttcgagcgtatcgacctggtcgaacacgacctccttgtcctcctgcaggtcgcgagcgtaggcggtgggcaggcccttcagggtggccagcagaccggtcagatcgccgatgagtcggccggacttgccgcgggcgagctcggcgatatccgggttcttcttctgcggcatgatggaggagccggtggaatagccgtcgtcgagcttgacgaaggcgaactcctgggtgttccagatgatgatctcctcggacaggcgggagatgtccacgccggtcatggcggccacgaacgcgaattcggccacgagatcacgtgcggcggtgccgtcgatggagttgtcggtcacgcgggagaagccgagctcacgcgccacggcctccgggtcgaggccgagcgtgttgccggccagtgcgccggagccgtacggagaggcgttgatgcgcttgtcccagtcgatcagtcgctgcacgtcgcgaatcagcggccaagcgtgggccatgagctggtgcgcgagcagcacgggctgggcgtgctgcatgtgggtgcggcccggcatcacggtgcggccggccttttcgctctgctcgatcagggcgttgacgaggtcaagcaggagtccggcaatcgcacgggagtggcggcgcagccacatacgaatcaggcaggcgatctggtcgttgcgggagcgtccggcacgcagtttgccgccgagttcgtcgccggcaatgtcaatcagtccgcgttcgagggcggtggcctcgtcctcatcgtcttcgatgggggcgaaggagccgtcatccacatgacgctggagcgtgtcgagcgcatcctccatgcgctgcagctcgtcggcggtcaaaagtcccgcacggccgagagcacgggcgtgggcgcgggaaccggcgatatcgtcgtcggccaagcgccagtcgaactgcgtggacttggacagtcgggccagttccggcgacggaccggacgtaaagcgaccaccccacagggccagatgttcgttgttctcagtcatgaaggctccttgaaaagtgaaaatagctgtgtttaagcgtagcaatgtgttcaaacatacagttgcccccgctggcgagggctgtcacatggagtgtgactgaggacagtcctttcaaagaccactcccagtcagctatgccgacagcctcgcagcgggggcgactgagtaagaattactcgacggtgttcttcgggacctcgatgccgttgccgaacttgacgtcgcgggctgcggccacgcgggacggcaggccatagatgtcgatgaagccgttggaggacctctggtcgaaggtatcgccggaatcgtaggtggcgagcttgtagtcgtacagcgaggagtcggaacgacggccggtcaccacggcgcggccaccgtgcaggaccatgcgaatctcaccggacacgtacttctgggtgtcttcgatgaaggcgttgagcgactgggttgccggggagaaccactgcgcatcgtaaaccagctcgccccagcgcttgtcgatgtcgcgcttgatgcggtgctgttcgcgttcgaggcagcagttttcgagttcctggtgagcggtgatcagagccacggcacccggagcctcgtacagctcgcgggacttgatgccgaccaggcggtcctcgatgaggtcgatgcggccgatgccctgggctccggcgcggcggttcatctcttcgatggcctgcagcggggtgacgtcacgtccgtcgatcttgaccggcacaccttccttgaactcgatgacgacttcatcttcgaccggcgggaaggccgggtcgtcggtgtaggagtagcagtccttggtcgggccgttccacggatcctcgaggaagccggtctcaatggcgcggccccatacgttctggtcgatggagtacggggacttctcggtctgggtgatcggcagcttgtgctccttggcgaacgcgatctcgacatcgcgggtcagggacaggtcacgaatcgggctgatggccttcagcgtcgggtcgatggaggcgatggagacctcgaaacgaacctggtcgttgcccttgccggtgcaaccgtgggagatggtgtcggcgccgaactggtgggcggcgcgcacgaggtgcttggagatcagcggacgggagatggcggagaccagcgggtagacgccttcgtacatggcgttggccttgagggccttcatgcaatattcgttggcgaactcgtcacgggcgtcgaccacgtaggattcgacggctccgcaggcaagggcgcgctgcttgatggtctcgaggctttcgccgccctggccgacgtcgagggacacggccacgacgtccttgccggtgcgctccttcaggtacgagatggcgacggaggtgtcaagaccgccggagtaggccagaacaatgcgcttgttatctgccattggttccctttcattcaaggtctgaaaaacaaactgatgcaagtatatacagaggactgtatatttatgcacggcgtgttggttatttggaggcgaggcttagtagccagtcggagcgggagacggcggtgtcgtcattggtgcaaatcaccatgacggtgtcgtctccggcgatggtgcccagcacgccttcgatcggctgcctgtcaatcaccgaggccacgtattgtgcggcaccggaaggcgtgtgcaccacaaccagatttccggcggcggccaccgaggtgaccagtccgttcagcacgcgggacatctgtgcctcaccgcgctcccctacatcctcaccttctgaagcaacgacgctgcgacccaccgtgtaggccaccgtgccgtccttcagccgggtcttcaccgcatgcatctcgtcaagatcgcggctcagggtcgcctgagtcaccgcaatgccctcgtcgataaggattttggacagctgtgattgcgaggtgatgatatgcgtggcgagcgcctgttctatggcactcagccgcgccgccctggtggcagggcgctgcagggacggaccggtttcactcatgcgagcaggctttcgtctccacgggccttgccggtcaaccaagtcagcaacgctttctgtgcgtgcagacggttctcggcctcgtcccacaccacggactgcgggccatcgatcacttcagcggtgacttccttgccgcggtaggcgggcaggcagtgctggaagagcgcatccggcttggccaatgccataagttcggtgttgacctggtaatcccagaacggcttggaacggatggcgtattcggcctcctcgcccatggagacccaggtgtcggtgaacacgcagtcggcgtccttcactgcttccttggcatcggtggtgaccaggatggagccgccggtctcggccgcgacgcgcttggcgtcggccacgatgtccgggcggggcaggtagccgtgggggccggccacgcgcacgtccatgccggccacggcaccgccgagcaggtaggagttagccatgttgttggccgcgtcaccgaggtaggcgatggtctggttcttcaggttgtcgacgccgcctcggtgctcggcgatggtctggaagtcggcaagaatctggcagggatggaagtcatcggtcagggcgttgaccaccggatgggtggagtacttggccatttcttcgacgcggtcctggccgaaggtgcgccacaccacgccgtaagccatgcggtcgagcacacgagcggtatcggccacgggctcgccacggcccagctgggagccggacttgtcgatgaccagcgggtagccgccaagctcggcaacgccgatggagaagctggaacgggtgcgggtggatggcttgtcgaacagtacggcgacggcctgcggaccggcgaacggctgcttgtagaagcggtcatggtggaacttgatggcaagttcgagcacctgcttctgctcctcatggttgaggtcgtcgtcacgcagcatgtggcgaagttctggggtcatgatgatctccttggatcggtgggtcggcagtgacggcgagaaatcagtcgtcgggcaggtccgtaggcacatccttgaggatggcaagtgcctgatccacgtcttgagcggttacaatcagcggcggtgcgaaacgcagcgcattgggagccaccgcgttgacgatgagcccgtgttcgaggcagtagttcatcaccgcgtgggagcagggatgcttgagctcgacggcgtccagcaaaccacgaccgcgtacggaaacaaacagcggattaccggtggccataatgccatcgcgcagctgttcgccgcgagcttcggcgttggccaccagattctcgtcttcaatcacgccaagagtggcgagtcccgcagccgcacccagcggattgccggcaaaggtggagccgtgggaaccaggagtgaacagagccgcaagtttctcgccgaaagcgatcatgccgcccatcgggaatccgcctgccacgcccttggcgaaagtcaccatatccggcgtcacgccgccggacagatcgtcacgctggaatgcgaaccacttgccggtacgtccgataccggtctgtacttcatcgatgatgagcagcgcgtggttgatatcgcacagttcgcgcacgaacttgacgtaatcggcgcccaacggctgcacgccggcttcgccctggataagttccagaatcacagcagccaccggacccttgccatagcggccgagaccggtctgtgcaaaagcgtcgtgcagggcgaccttgtcgccggcgcgcacgaattcaatgttcggcaccagcggatcatacggcttgcggataccgggtttccatgtggcggacagcgcacccatcgtacggccatggaagccgtgagtcattgcgagaatgcgtgcgggcttgccgccgatggaaggcagggcaccaggcaaggtgcggccatacagcttggcaagcttgagggcagcttcattgccttcagcaccggagttgccgaagtagactttggagccttcaggtgcaccagccagcttgaccagtttggatgccagctcaatttgcggctcggacgcgaaatagttgctgatatgagccaccttggcagcctgatcggcaaccgctttgacccacttggggtgggcgtatccgagggaattgacggcgatgcctgccaggaaatcgaggtattcgttaccgtcaacatcccagatgtgggcaccttggccgtgatccatgacgcgcaacggcgtaccgaacacattcatgtggacctgagagtactctcccagccacttgctgtcttccgtacctagtttttcctcatgctcagtagccataagagctcctcatttccagtccttcatcgggcataaccatggtaccgatgcctgcggaggtgaatatctcattcaaaatcgaatgcggcttgcgcccgtcgatgatatgggcttggggcacgccaccgtcgatggccctgacacaggcctccatcttgggtcgcataccggattccaggtccggcagcatatcgcgcaggttttccacaccgatccggccaatcagagaattcttgtccggccaatcggcgtacagaccatccacatcggtcaagataacaagcttgcgtgcgcccacagcggcagccaaagaggcggcggcggaatcggcgttcacgttgagcacttcagtggcatcttcttcgttcggagccacggaagagacgaccgggatacgaccggcggccaccagatcctcgactgccgaggcatcgacggaaaccacatcgccgaccaagccgatatcggtgggcttgccattgatgatgggcctgcgctgcatggccgagaacaggccgccgtcttcaccggacaggcctacggccagcgggccgtgcgcgttgatcaggccgaccagttcgcgtgacaccttgccggtcaggaccatgcgcaccacgtccatggcctcgggggtggtgaccctcaggccgcctttgaattcggatttgatgccgagggccttgagcatgtgggagatctgcgggccgccgccgtgcacgacgatcggatgcaggcccacctgacgcaggaagaccatgtcttcggcgaagcactgcttcagatggtcatcgaccatggcgttgccgccgtatttgacgacgatacgctggccggcgaactcctccagccaaggcagcgcttcaataagcacttctgccttctgatcggcgcgcaaatcggtgtgcacgtcgaaatggaacccaggtcccttcaattctgtagccaatttttctcttttctgcgacgccggcgacgctatcgctgccggctgccacaaacagcccactgggctgtttgtcagctttcgtagtcggcgttgatgtggacgtattcgtgggtgaggtcgtcggtccagacgggggcctcggcgtccgagccggtgttcaggtcgatgtcgatgtggacttcgcgcggggtcatgtcgacctcgctgcggtcgcggccggcgccgccgttctcgcagatgcgcacaccgttgacgtccacggtcaccttgttcgaatcgtaaggcgcgacttcaggcggcacagtgcccaaggagctgacgatgcggccccagttcggatcgttgccggagatggcgcacttgagcaggttcgaggcggcgacggcacgaccacaggcaagtgccgcgtcttcgctggtggcaccggtgacggtgatacggatgtcgtgggaggcaccttcgccgtcgccgatgatctggcgggacagggatgcgcaggcctcacgcaccagcttgttgaattcgtccttgtccggttcgacgccggaggcaccagaggcgagcagcaggaccgtgtcgttggtggacatgcagccgtccacgtcgatgcggttgaacgaatgttcggcggccacggcgagtgcggcctgcatctggccggcggagacgaccgcatcggtggtgatgacgcacagcatggtggccagctgcggggcaatcatgcccgagcccttgaccatgccgccgatcttccagccgttggagccggtcagttcgaccgttttcggcttggtgtcggtggtcatgatggcgtgggaggcggcggcgccggcttcggcggtggcggcaagagcctcatgggcactcttggcaccagccaacacgttgtccaacggcagcagttcaccgatgagaccggtggagcagacagccacatcattcggttcggcgccgatgagaccggcgaccgtttccgcggtggtgacggactgggcgtaaccggcctcgccggtgcaggcgttggcaccgccggagttcagaatcacggccttgacgtgaccgtcggcgacgaccttacggctccactgcaccggggcggcacagaaacggttcgaggtgaacacgcctgcagccgcgtcgagcgggccgttgttgaccacgagggccaagtccttcttgccttcgacggatgaaataccagccgccacgccggcggcggagaaaccttgtgcaaatgtaacgctcacggtgctactccgatcttggtcaggcccgcgtcttccggcaggccgagtgcgatgttcagtgattggaccgcttgtccggcggtgccacggttgaggttgtctatggcggcaaaagcgtagatgcggccggccttgcggtcggcgacgacctgcaggtgggctgcgttggatccgatgatgttgccggtggcgggcagtgtgccctcgggcagcagcaccatgaagtcctgaccttcataggccttggaccatacggcgcgaatctcctcatcgctcagtgccttggccttgtccgtcatgcgggcggacacggtggcgaggatgcctcgggacatgggggcgagaatcggcgtgaagccgagcgtgaattcgctggcttcggccgcgctcttgccggccgcgtgggcgaagttctgcaggatctcgggaatgtggcggtgcttgccgcccaccgaatacggcagggcggattgcagggcctcggcggcaagcaggttggtgcgcttgagattcttgccggcacccgagtatccgacgaccagatcggccacgatatcctgcgattcaaccagtccttcggcgatgccgggctggagggccagcgtggtggcggtgacgttgcagccagggcctgcgatgcgcttggtgccaggaagcgccgcgcgctggcgggtgtatgagccgtccgcggctttgccggtgatgagctcgggcatgccgtaggtccaatgctcatagaaatcgccgccgtagaactcatcccaagcggcctgttcttcgagacgatggtcggcgcccaaatccacaaccacggcattcggatcgagctgcgaggcgagcttgcccgaagcaccgtgcggcagtgcgaggatgataacgtcatgcccgttcagcacttcgggcgtggtatcttcgacgaccagattggccagttggggaatatgcggcatgtgcttggccatcgactcccccactgaggaatggcctgccacgcaggtgatgtcgaagtcggggtgcgcggccagaatgcgcagcgcttcaccgccggcatagcccgtggcaccggccacggccactgtatatttcgccatactcatctcttttcactgatgtgtcttgggatgagtatacgcgattatgcagactattgcatatttatgcagtgggtgtgttggtatgtgaacgccacttatgcggagatggagtcggaggaggagccggtgccgccggtgagttgctggagggcttcctggtagaggctcatggcgtcatagccattgaaggccatccagatgacggcgatggtgtacagcacgttgatcaccacggcggccacagccaaaccgaagcctttcatatggaaggtgcgcgtgcgccacattgccaccgcgcccatcagtgccgagagcactggcaccgggaagaacagggcgaggataaaggagatgatcgcatacgaatcccagtgcccgtagagcgggttctggtttggatcgttcaggtcgatgccgtggtaataatgcggctggtgaggctgaccgttcggctgttgaccatacgactgcccctgcatgcccgggtacccgcccggatatgcgcccggaccggactgttggccgccttgagcatacggccagccgcccgcctgctgattgccgggccacgccggctgctgaccgtacggctggccggcctgctgggattgcgccgcgccaccgttgatgccagcggctgcggcggaatccttcttggtatccggctcgggagcgccataaatatacgggttgtaattcggcccgtattggccagacatagcaccatattcaggctgctggtactgcccgtatttcggcttgtcctgctccggttggctcatgacgctcctcgattcggatgatcggttgggtcaggcgcgcagctgggcgccgatttcggcggcctcagccacgatggccttgcggatggcgtcgctgtcttcggcggacagcgtcttgctcggtgaacggaacaccaccgcataggccagggacttcttgccctcgcccacctgttcgccggtgaacacgtcgaacagttcgatggattcgaggttcgcgccggcggccttgcgaatcacgttctcaagctggcctgcggtcacggtctcgtccacggtgaaggccaaatcctgcttgaccggcgggaacgtggagatcggcttggcctggacgggcttgccggtcagcgtggcgaacagcgcggtgaggttcagctcgaaggccgcggaatgggccgggaagccgagcgcctcgttgacgcgcgggtgcagttcaccaacccagccggtgaagacgtcgcccaccatgacgcgggcgacgcggccggggtgccattggacgggcacatcgtcggcggcgggctggtcgagttcgattgcggcaccgatacggccggcgatgcggcgcacggcctcgacggcgtcggaccagtcgaccgggcgcttgccgcccatccagccatcgtcctcggccagaccggtcaggatgccggccacatggtcgggctgttcgggcagaccggcgtcaagcgcggcgagctgttcgtcggtggggcgcacgccgccgggcagtgccgggatggcgggcgcgttcggatcccacaggtagacgtggccgagctcatacagggacacgttttcgatgccgcggcggatgttgcgctgcacggtggtggccagggtcggcagaatctcgcgacgcaggtacggacggtcgccgtagagcgggttggcgatctcgacgctgaccttcttggtggcttccgggtcgaagccgaaggccttgtaatcgtcgtcgcccacgaacgggtagctcagcgattcgaccatgccgaactcggcgagctcgtccgccacgcgacggcgacgctgctggtccggggtcaggcccaccagaccctcgaccggtgccggcggcacggtgatcggaatctggtcgtagccgaccagtcgggcgatttcctcgaccaggtcgcacggctcgttcaagtccggacgccagctcggcgcggttacggcgaactcgccgttgccgccgccggccaccgtgcagccaatgtcggtcaggatgtcggagatgcggttgatgtccacgtcgaggccggccacgcgggccacttcggaggccttgaagtggatgaccttggcgcgcggcgtgttgttcacgtcgttcgggtgttcgctgggctcgccgttgccgtacttggccatgagctcggcggccatctgggtggcggcgggctgcagcgcggtgtcgacgccacgttcgaagcggcgggaggcctcggatggaatcttgtggcgacgggccgaacgggcgatggtcacctgatcgaagtgcgctgcctccagaagaatgttcttggtgtcagcggtcacttcgccatacaggccgcccatcacaccggcaaggccgaggatgcgcgagccgcgttcgccgttcggcgaatcggtgataagcagatcttcgacgctcaggtcatgttccttgccgtccagggtggtgagtttctcaccctcgttggcgcggcgcacgacaatcgggccttcgagcttgtcgaggtcgtaggcgtgcatcggctggccgaggtcaagcatcacgtagttggtcacgtccacggccaaggagatggagcgcatgccggcgcgaatcaggcggcggcgcatccagttgggcgtgtgggcgttgggattgaagtccttgacgatacgcgcgtagtagcggtcgcaaccgggcacgccgtgaatcggattgttatcgtcgatttcaacatcgatgtccaccggggtgccgggctggtagtcagcaggttccggggccttctcgttcagtgccacggccggatcggtgtaggcggcaccggtggagtggtggtattcgcgggccacgccacggtaggacagcgtgtagccacggtccggggtgatgttgatctcaagcagaggctggtcgaggtgcagcaggtgcatggcgtcctgaccaggcttcagagcctcatattcagcctcggagaagccgtactgacgcagcagaatgatgccattgtggttgtcgcccagacccagctcacgttcggaggcacacatgccgttggagatgtggccgtaggtcttgcgcggctcgatcttgaagtcgccgggcagcacggcaccgggcagggtgacgacgaccttttcgccggccttcatgttgggtgcgccgcagatgatgccgcgcggcaccttgttgccgtcttcgtcggtctcgttccattcgtcgccgcagtccacgtggcaccagttgatggtcttgccgttcttctgcggttcgggggtggcgtcgaccacgtagccgaccacaatcgggccggtcacctgggaggagtggatctcctcttcctcaagacccaccttgacaaggtccttggcgagctgttcgtaggtcaggccttcgggaacctcgacatggtccttgagccaatcgatatcgatcataggcatggctgaatcactcccccatcacaaactgttcggcgaaacgcacgtcaccttcgaccaggtcgtgcatgtcgttgatgtcgctgcgcagcaggagcgtgcgctccatgccgacgccgaaggcgaaaccggtgtagacgtccgggtcgatgccggcggacttcagcacgttcgggttcaccatgccgcagccgccccactcgagccagccggggccgcccttcttgtcggggaaccacaggtcgagctcggcgctcggctcggtgaacgggaagtagctcgggcgcaggcgcgtcttggcttcagggccgaacatggcgacggcgagcttgtccagcacgcccttcaggtcggccatggtcaggtgcttgtcgacggcgagggcttcgcactggtggaacaccggagtatgggtggcgtccagctcatcggtgcggaacacacggccgggggacgcgatgtacagcggcacgccacgggtcaggagggcacggacctgatcggaggaggtctgcgtacgcaccaccatgttggagccgacgaaaccggcggcgtccttggcttgattgcccttgacgtagaaggtgtcctgcatctggcgggccggatggtccgggccgaagttcagggagtcgaagttgtaccattcggcttcgatttccggaccggaggagatctgccagccgatggagatgaagaagtcctcgacgtcttccatcagcttgggcagcgggtgacgggcgcccagaggcttgcggttcaccggcagcgtcatgtccacggtttcagcggcgagtgcggccttctcggcggcttccttgagctcgacctccttggggccataggcacggccgaagtcggcgcacagcttgcccatgagcttgccggcttccttcttctggtcgacgggcagggagccaatggccttgctggccttggtcatcgccgaatcggcacctgcgtacgttgtcttgatggccttgagctcctccaggttggaggcgttctggattttctcgatgcccttggcaacctcagcggtcacctggtcggcgtcgaacaccatttgttctgccacgagaaccctttcgtctgatgttttctcagcgtttcacagcgtttttaccggtttcacattctttcaacatgacccgacatagacagcgacatcaacatcaccgcggccgaggtgccgaggttcagcgattcggccttgccgtacaacgggatggagacgatgcggccgcagcgtgtgaggatgtccggttccaagccacgcgcctcattgccgaacagcacggctttcggagcctcgaccgccgccttgtccgccagtactgcgggcaggctttccggcttgcattcttcggtgccgtatacgtcggcggcccagacgcccatattatggtcgtcgcctgtccaggtgaagaattcgtcggtgctcatggcgagtaccggcagatggaacagggagcctgcggtggagcggatgaccttggggttcagcacgtccacgcagtcgtccacgaagattacggcgtcgcagccggccgcatcggccgcacggatcacggtgccggcgttgcccgggtcgcgcacctgccagaaggcggcgatctgcgggccccgcccgttcttgccaagttcgacgtcatcggcaccggcgtgcatggactcggcattgccgacggccacgatgccctgggcgtccggactgatgcggtgcatcacgtcgccggtgcagtagtgcacataaatcgtggcatcctgcgaggtttcgacgatcttctccaacgtggaggagatgatacgcggatgttccaacgcctgcgaaacctccacatagaggtcctgcaccacgtccggccgccaagtgacggcctcgcgcacggattgcgggccttcgataagaaaacggcccgaacgttcgcggcctttggcgcgggtcagatcggcgatgcggcgaacgcggtcggatttcggattatcaagaatctgggcgttgatgggcatagccactaccctactgccgggtcattacgtcagtcgtggctcgctcccgctggcggaggcatcgtaagcctttcagacaccttgaaaggcactgtgccagtctgtcgcctttcagacaccttgaaaggcgaagtgccaattcccggtgccgatggctacgcctatggaggccagcgggacagccagacagatgacgtagaagatccagtcgataggcttcagacgcgagatacgggcttgggagcgtggggcgctggagccgaagccgcgcgcttccatggcggtggcaagtttggtggcgcgccggatggagagcaccagcagtccgaacgcttgggagagggcacgggcgatggcgttaccgtcgccaaggccgcgcgaacgctgggacaagccaagtgcgcgccaatcttcctgcagcagcgtaaacatgcgcaatccagccaacccgccgtatacgaatcgcggtgagaagtgcagaatctcaaccaaaccgtccgccaaatcagtgggatcgaggcccagggccaggatcacgccgggtacggcaatggccgccaccctgatagccgtggcgatggccagattaatggatccctcgctgatcacaatccagccaccctgccacaggatctcgcccgaggtacggccgtagagaaacacggagataaaactgccggcggcggcgatccataccggccaggtcttacggcatacggtccacggagccacgccaccaatccacagcagcacgaattcgatgccgagcgccgtggatgcggataccacatccagactgatgaacatcggaacgcacagcaacagcgcaccgatgatgcgactgaccgcgttgatgcgcgctatgaaccatgagggcgatgaggctttgaccggctccacgcgcgtttcctgcgggctgacggttaccacgtcactcatgcctcgcctcctcgaacatcacgcgtcgtgcgcccagcgcatccaccagcgcctcatcgtgcgtcaccatgaccacgcacgagccttggtcgcggatggcggcgatcagcttgaccatttcattccacgtactgaaatcctgtccgaatgtcggttcgtccatcaccaacactttgggtgcggcggccagcatggaggccacggacagtcgccgcttctccccgccagacaaggtatacgggttggctttggcgaagcgcgtgagattcatctgctcaagcatgcggtcggcggtccgataagcctcgtcttggctctgccccatcgacttggggccgatggcgacttcgtcacgcacgaaattggcagcgaactggtgttcgggctcctggaacaccatgccgatacggcccagcagttccttgcttttccagtcaatcggctcacgcccggcatgcgcgggcttgaggttgtcggcgatgagcaccttgccggcgataggctcgagcagcccggccaaggtcagggccaaggtcgatttgcccgcgccgttcggacccatcagagccgttacttcgccgggatagaaatccagattgatgccaacgccaagagcggttccacggccaaagcttaagttctcggtgctgagcaccggcgcatcgtgcgcaggctcccgcttcggcgagtaatcgggaatcgcacggcccggcacccacgcgccaccggcggccaatacgtcgcccatctcggcgaacacctcgtccggcttgccgtcggcaatgaccgcgcccgtgggcgaacttgcatcgggtcggccgagcacgatcacgcgatcgaccagatcgagccatacatcgatatgatgttcgaccacaaccatggtctgcccggtggcctcgatgacctttttgaccgcgtcatgcacttcgaccacgccttcggggtcgaggttggcggtcggttcgtccaacaacagcagaccgggcttcatagccagcacgccggccaacgcgagacgttggcgctgaccgccggacagatggcgggtggaccgatccagttcgagtccgccgagtcccaccatatccaatgattcgcgcactcgctgccgaatctcctcgcgcggcacgttgaggttctcgcagccgaaggccgcgtcatcgcccagtcgttcaagaatgatctgcgagtccgggtcctgaagcaccagtcccacgcggcctcgcgcctcgcgcgcatcgacgccatcgatggtgagcgagccctcctgctcgccttcctcatcgccgccaagtacgcctgcgagaccggccatcatcgtgcttttgcccgcccccgaagcaccgagcagcaacacacgttcacctggccggatggtgaaatcgacggcacgcaacgcgaagtccttacgcgtggcgtgccgccatccccagccgctggcctctaccgcagccggattaacctgcatcagacgcgcgccttgctgcggccggattcaaagcgttccagagcgccggtggcggcgagcgcacgagacaagtaccagaccaccacgccggcgatcacgacgccggagatgatggagccaaccagataccaagtgacgcgcaggccgttccagcccgggttggtggcccagtagtaggcccagcagcccacgccggcgagcgcaccggacaggatggtggtgccgatgttccacttcttccaggcgaagacggcgaaggcgatttcggcacccagaccctggaggatgccgacgatcagcgagccgccgacgccccactggttgcccagcgtaagctcgaggaaggcggcgagggtttcggcaaacagtgcggcaccgggcttgcgcacgatgattgcggcgagcgggccggcgaacagccagaatccgttgagcagaccctcgaaaccgggggtcacgccctcgaacagggccagcggggcggagcagacaatgtcccagccccagaaaatgacgccggatgcgacggcgatgattgcggcgacgacgatatcgacgacgcgccacttgtaattggctttggccacagcttcagtcatgaatgtgcctttcttctgctcgtacgcaggccgaacatacatggatatatgtacgcacatgatgcacatgttcgtggccacgcgcgggttggttcaggcacgggtgggtaagagcgacatttccgtgcgccggcattatccggtcacgttccatcggtcgagactatgaatctcctctcagccgcctaacggcagctcccgtgtcaactccccgactataaagcaagccgccgtcaaaggcaatagccacatccgtgacctacctgacggcagctcgccaccattaccgatgcggttcggttacttgccgagcttgtccagcagcaaagcctcggtgatcacgttgttcttgaggccgggcagggagatggactcattggggctgtgggcgttggccttcgggtcttcggggccggtgaccagcacctgagcgttggggaaaatgcgctgcagttcggggatgaacggaatggagccgccctcgcccttgttgatgggctcaacgccgaaggcctcggtcatggcttccagcgcgtctttggtggccacggcggtcgggtccatggcccagcccatgccgttttcgccgcgttcgacagtgaccttggcaccgaacggcgcgtgggattcgaggaatgcagccagtgcttcctgcgcttcttcagggcgctgggtgggcgcggtgcgcagcgacagacggaagcgggtctccggggcgatcacgttgaaggatccctcgaccgggtgggcgtcgaagccgatcacggtcacggacggcttggtccacaggcgtgaggccagcgaaccggtgccggcgaactcgtaaccggccaccacgccggaatcctcgcgcacggtggtttcgtcaaggtcgcgttgcaaaccgccgattggctcttccgcggccacgccgggcacggccagatcgccgttctcgtcgtacatggaagcgatgagcatggcggccaacgtgttggagtcaagaatcgggccgccgtactgaccggagtgcaccgggtgctcaaggccctgcacggtcacgtccacgcaggtgttgccgcgcagcgaggtggtcaaagaaggaatgtccgccgaccagttgccggaatcggccacgataatcacgtcggcggcgaattcgtcgcggtgagcctcgatgaagggaatgaagcttggcgagcccatctcctcttcgccttcgatgaacactttgatattgacgttgaggtcgtcgcccaaagccttcagcgcaccggagtggatggcgatgccgccgccgtcatcggcggagccacggccgtaaaggcggccgtcgatttcggtggccacgaacgggtcggtgttccactcggccgggtccggaacaggctgcacgtcgtgatgggcgtagagcagcacggtgggggcgtccggagaaacgatatgcgagccgatgacctcccatgcgcccggagtgccgtcggcattggaagcctggaccaccttggcatccacacccacgaggcgcagttcgtctgccacgaattcagcggagcgcttcatatgttcggcggtgatgcccttggcggaaatcgactgcagcgcaaccttttcggccagcaccttgacgatgcggttccaatcggtttcgacgcgcgaacgaatctcgtcagcggtgagcgttgccatgatggtcctcctttatatgtgtgtgagcggcgtcattgcaatggctgcgccagtatataagtgtctgaacgtcaccgtaacctcaaagcatgacatggaatccgtttaggaaaaaagaagaggcccaagttcccgttgagcaggccccgaagaagaccgccgatccttctgagaaaaaaggccgtcctaccccgaagatgaagcaggctcaggccgccggtatccgtccgctggttccggtggaccgcaaggccagcgccaaggccgccaaagcccgtctgcgtgagaaggagaacgccgagtacgaggcgatgcagaagggcgatatcaaccacatgcccaaggcggaacgcctgccttggcgtatctacatccgtgattatgtggatgcccgtttcaaccttggcgaatggttcatcccggtggccttcgcgattctgatcgtctccatgttcgtcacttctttgatgcagaaccagtgggcttccatcatcatgatggcgcttatgtacggttacctgattgccgtgatcatcgacgtatggctgatgtggcgcaagctcaaggccaagctcatcgccaagtacggcgaacagtccgtgtccaagggctcccgctccttctcctacgcttggagccgttcgattcagatgcgtcgttggaggcttcccaagccgcgttacccgaagcgcggtcactggccggcagactgatgtccatatatactctggctcccctcgttgaggggctgagccgtaaagaaaacagtccagtggactgtttttaggcgaagtggcggcgatagccgcatatggctccctagcatgggagccatacttatatgcaccaaggaggcaatcatgagcgaacagtttgatctggtcatcatcggggccggccccggcggctattccacagccctgcgcgccgccgaactcggcatgaaagtggcactcgtcgagcgtgacgccaccgtgggcggcacctgtctcaaccgtggctgcatcccctccaaggcgctcatcaccgccacccacaccatcgacaccgtgcaccgtgcggccgaactcggcgtcaacgcctcggtgaatggcatcgacttcggcacgctgcgcgactatcgcctgcgcgtggtcaagacgatggtgggaggactggccggactgctggcccatcgcggcatcaccgtgttccgagccaatgccgcgttccatgcggatgagatcgctccagcaacttccaaccacatcgtccacctcgttccctcccccgaccaaagcgacatcctcacctatcacaaggccgatgtccccgaacccagcggccccacgatggacctcacggccacgaacatcgtcatcgccaccggtgccaagccacacccattgcccggtaacccgttcgccggcgccctcatcgactccacacaggcgctggaagtcaacgaatttccctcttcggcggtgattatcggcgccggggccatcgcccttgaattcgcctcgatgtggaacgccgccggttcgaaggtgaccctgctgattcgcaaggaccgcgtgctctcagcctgggaccggagagccggcaccacgctgacccgtgagctcaaacgtcatggcgtgaacatcatcacccgcgccagcgtcacccatgtggacaccggcgcgaaccttggtgccaccgtgcactacacgcgcgaaggccaggacggcgaacagagcgtttggggcgaaatcgcccttgtcgccatcgggcgtgacccgatcaccgacccagcatggggcgtgacgattgatgaccacggacatgtcgccacggatgcgtacggtcgcaccgacaaaccgggcgtatgggcggtgggcgacgtgacggccggtcacgcactggcgcatcgtgcttttgagcaaggcatcgtcatcgcggagaccatcgccggactcaatcccaagccggtggacgaagccgctgtgccgcagatcgtgttctccttccccgaagcggcgtcggtcgggctcaccgtcgaacaggcgcaggcgagagaggacctcgtcgaaatcaaggagaccaactatccgatgctggcgaacgcgcgcatgctgatgagcggcacggccggctcattgaccatcgtctccggctgcgacgcggccaacccggacaccccgcgcgtgctcggcgtgcacatggtctccccgatggcctccgacatcatcgccgaagccgaacagctggtcggcaaccatgtgccgctcgccgacgcagcccgcctcgttcacccgcatcccacattcagtgaaacgctcggcgaggcgctgctcaaggccgacggacgaccgttgcacacacgctgagaccaaccagcacaagcaagttcggaccagcgcacctgataagatattgcccagtgtgtttcatcccaacaaaggaagaagtgatggcggaaaaggacgcgaagccgaagaagcagagcacaatcaagcagatcatccagatctacaagtacacggctaaggaagacaaggccctgccgtggcttgaggccggtgctttcctgctgcctgtagtcgtgatgatcatcatcggtctgattgtcaagtggacctggctgacctggatcttcaccatgattaccgccatcatgctcggcattctgctggccaccatgatgctcacccgccgcgcggatgcagtcggctacaagcagattgatggcaagcctggtgccgccatcggcgtgctgagcaacatgcagaaagccggctttgacttcccgcaggaaccggtgtggatcgacccgaagaccaaggatgccatctggcgcggcacttcgatgaacggcatctacctgatcggcgaaggcgaatacggtcgcgtcatgaaggcgatggatcgtcaggaacgcgatatcaagggcgtcaccgccggctcctccattccgatataccgcatcgccgtgggccacggccccaagcaggtgccgctgaccaagctgcgtagcacggtgatcaagtccaagagctacgagcccacggaccacaagaacgcactgatcgccaagattcatccgcgccgtcgcttcctgctgaccaaggccgagatggaaacgctgaacgatcgtcttcgcacgctgcaggccaagaagggctatgccatccccaagggcatggatccgaaccgcccgcagaagatctcccgccgcgcgatgcgcggtcgctgatcggcagcacacaaccaaatcgcacagaagccccggaatccgttcaatcggttccggggcttcgtcatatgtctcataatcgcgtccacttacatccacctacgtcacctgtcaatacccactgtccacgttgcggacatctctacctactcccccgatagtctccgtttccattctgtaatgatgtttcgttgaaataacgcgcctgcgcgattgtcggccacagtcacgaaacattctcgtaacccaagtttcgagccggcgaaacgcgctattttacgatatataccgttatatctcatacgaaaggagcggtcccgtgaccgaactcaagtccaaggaagacgtcgaggcccttatcaacaaggaaggcatcgagtatgtctccgtccgtttcaccgatcttatcggcgttcagcagcacttcaccgtgccggctagcgaattcctgaaggacgctttcaccgacggcatgccgttcgatggttcctccgttcagggcttccaggccatcaacgagtccgacatgaagctggtcccggacgttgagacctctttcgttgacccgttccgcaagcacaagacccttgacgtggccttctccatcgtcgacccgctgaccgacgagccgtactcccgcgacccgcgtcaggtcgccggcaaggccgaggcctacctgaagtccaccggcatcgccgacaccgcatccttcgctcctgaggccgagttcttcatcttcgacaaggtgcgtttcgagaactccatgcagcgctccttctacgaggtcgactccatcgaagctccgtggaactccggcgttgactccgaagaggacggcactccgaacatcggtttcaagaatcgcgtcaagaagggctacttcccggttccgccgattgaccacacccaggatctgcgcgacgatatggtcgccaacctgcagaaggtcggtctgatcctcgagcgttcccaccacgaggtcgccggcgctggccagcaggagatcaactaccgcttcaacaccctgcagcacgcaggcgatgacctgatgaagtacaagtacgtcgtccacgagaccgccgctctggccggcaaggctgcgaccttcatgccgaagccgatcgccgacgacaacggcactggtatgcactgccaccagtccctgtggaaggacggcaagccgctgttctacgacgagaagggctacgctggtctgtccgatctggctcgctggtacatcggcggtctgatcaagcactcctcctccgtgctggccttcaccaacccgtccctgaactcctaccaccgtctggtcccgggcttcgaggctccggtcaacctggtgtactccgctcgtaaccgttctgccgccatccgtattccgctggccggcacctccccggctgccaagcgcatcgagttccgcgctccggatccgtcctgcaacccgttcctggccttctccgcccagctgatggctggcctggacggcatcctgaaccacatcgagcctccggagccggtcgacaaggacctctacgaactgccgccggaagagcacgctggcatcaagcaggtgccaagctccctggccgaggctatggacgccctggaagaggaccacgacttcctcaccgccggcgacgtgttcaccgacgacctgcttgagacctggattggtctcaagcgcgacgagatcgaccaggctcgcctggccccgaccccgctcgagtacgagctctacttccacatctgagtttgagagcttagcaacgttgggatttcgccattgctcttctcttgtgggagtctaatgggagtcattcagcgtaactagaaagaacctcgtgaaattcgtttcacgaggttcttttttgtatgttgcgttgtatgttatgcgatgtgtgttgctcctggaatattccaggggcgggccgctacttagtctcccaacgctccttgagtacataggcggcggctttgggctgacggtcgcgagtgaagacgcccttcttgttgccgtcgacgcgcatgataccttcaccggtttggaagtcgcagaggttccatacctgctcgcccaccactgcctcgaacatgtcgaacacttcgtgctgcatggtgaggtactcacactggtattcctcactccactgcacgcttggcagcttgtgcgcaccggcatcggtgtccgcaccgtattcggtgaacaggaatggcttgttgggttcggtgttcatccattggttcatctcgttgatgaaggccttcttggctccgatgagctgatacccatcttgcacatatcagccgtaataccggttcaggcagatgacatccgcgaactgatggcacttgtctttgcctccggcggccatcagcagattggtgtaggtcagcgggcgatgctgcggatcgagcgtgcgcgcgtaatcgaatatctccttgaaatacggcacggccgcctcggatgccgagtcgttggcggcgtcgatgagattccaagcgccggaggcccccggcattcttttcgtcgaaggggacaattcagaacacaactgccgacacaatcgtcagggaggccagcgagaacagcgtgcttacgagcacgaagccgaccgcatactcgggcatgttgttcttgcgaccattgaacatggcaatggtggtcatggtcggcagtccggcgatgaccgtaatcatcagcaccatgtcatgggtgatcggcagttgcggcaatgcgccggtcagcgcggtcagtagcgcgtagaaggcgagcgggaatgcgatcatcttggcgactaggccagcatagagttcgtagcgtttgaggacgccccaccacttggtcagcgcgaacaggccgcccaagtagattagcgacatcggcgtggccatattgccgatggtgtgcagcggcttcaggatgatgtccggcaccttgacgccgagcagaatcagaatcagggcgagcatcacgccgacgaaggcgggattgacgaatcgtttaagcaggccgaggacgcgggtgcctggcgaggggcggacgacggccggagaaccaccgtttgcggcattgctcgccgaaccagcattgcccaccgaaccggcgccgttcaccgaaccgttcacgaccgcacctcgcgcgccaatcgcgttgccgccagtcgtttcgtcgaccggctcgcacagccatacgccgtacgtccagagcagcgtctggtcgatgatcgacatcagcgccac

SEQ ID NO: 3597 - DNA, 7446 bp, Unknown
  R85_18m  MAG No. k141_28643
cattgctattagggcccgttgcaggggttgcgagatgtcgcccgcggcgcagagttgccgagggccggcaaatcactcccgcgtcgggtccttctgcaggagcaggaagatgagcgccacaacgagcaggacggcgatggacagcacgccgaacgaggcgttgccggtcagggacgtggtggtggccaccaggaaggtgccgatgattgaggcggtcttgccgaagatatcgtagaagccgtagtactcgttggcgtggtccttggggatgatcttgccgtagtacgagcgggaaagcgcctggataccgccttggaacatgccgaccagaatcgccagaatccagaactccacggccgatttcatgaagaacgcggcgaagaacacgatgcacatgtacgccacgaccgccgcagtgatcatcactttgcagccgagccggccggccagacgaccgtagagaatcgcgcaggggaaggccacgaactgcgtgacgagcagtgccaccaccagctgggtggagtcgatgccaagctcggcaccgtaggaggtactcatcgaaatcaccgtgttcacggcgtcgatgtagaagaagaacgcgatcatgaacatccacaacggcttgttcttcacgattttgccggccgtgcccgccagttcgctgaacgtgccgcgcacggccgagcccagctggtcgcgggtggcacggtagtgcacctggcggtagctggtaagcagcgggatggtgaacgccacccaccagatggcggtgatgatgaacgaggcgcgcgtgcaagccaccgtggaccagtcgaagagcgacgggccgccgaagatcagcgcgatgcagaagatgaacggcacggtggagccgatgtagccccagccgtagccgtgcgaggagaccttgtccatgcgctcgttcgaggtggtgtcgatgagcatcgaatcgtagaacgtcagcgagccgttgaggccgatggtcgccagaatgtagacgaccaggaacggcagccaggtcaggggcagggccattgcgcagcaggtgaccacgccggtgccgaagaagccaaggaagaacttgattttcatgccttgcacgtcggcgatggagccgagcaacggcatgagcagcgctatgaccaaggaggcaatggtttgcgcgtagccccaggcggacacgatgttgccatccgccggcatcagcgatttggcgtaaatggggatgacggcggtggacagcagcacgaatgccgagttgccgacgtcgtagatgatccacttcttctcgcgggcggtcagtttggcgctttgcggcaccggttcgtggacatttgcgggatcagtcatatgcactcctcgacagtattcaactcaatctatcgtagaagcgcggactagggtagaaaaccgccaaagttgaacggcgggtgaataatgccgggcccctttctaaggggagccagagcaaaaaaatagctcccctcgctgaggggagctggccgcgaagcggactgaagggagccgatcgtggattcccccagatgaggaaatccactcaatcgtccggaaactattcgccgatcagcgcgatggcctcgtcgtaatcggggcattgcggcacgccgttgaggctgcgctggatggcgatggatgccgccgcgttggcgatctttaccgattcggccagactatggccctttgccagcatcgcgcacatcacgccggtgtggcaaccgcccgccgaacgggtgtgtacggccttggtcgggtatccctcgatatgaatcgtctcgccacctggctcacgaatccaagcgccgcgggcgccgacacgcaccaccagcggcgcgcgcagtgtagtgcccaagccgtcacacaactggtgcatgaagtcgtcgagtccaccgccgatggtgaccttgctgtcgtcgatcggcgcgcccaggcgctcggccagcgtcatggcctcctgacggttgcaggaccagaccgggcgcgcaagcaccagatcctcgagcatgtggtcattgaccagacgcaacgtattggtgggattgatcaccagcgtgtagtcgcgtgcagccgggtcggtaccggccttgagtaggaatccgtccacgccggtggccgtatggtccatcagtgtgttgccgctgatgtgcaccacgtctttgggctgcggctccagcgtgttgaacgtgtccgcgtcgccatgagcctcggcgccataggaagcgatgaacgtcttcttcggcgcgccggagctcagcaccacgcggaaaccggaatcctcatcaagacgatcctggccgatatgcgtaatgccgttgtcctggaatgactggcggatgaaatgcgcccacaggccgttgcccagaatgccggcgtgctcggtcggcacgcccatgcggctggccgcctgcagcacgcgatagctgccgccaatggagggcttcggatgatcggccacggcgaatccgccctgtgccggcacctcgtccacattgagcatgatgtccacccagacttgacccagtgaaatcacgctgggctcgtgagtgccgatacctcgcctgagattcaacatgacagcctccttcgtcgtaagttgcacgaggaccccttcgtcccttgccgtctcttataccgagattatatgagagtttgttggatgcggaataggcagtccggcgtgttttatcgggtaaacgctacgatttgcagcgtaattcgccgctggcgaactgctggcgaactacttgcggaccgctggcgaaccaatgccgaaccgctcgcgaaccgctgatggcccactcgcaagttacgctcgaaccgctcgcgaaccgccgaagttcgcccatgatacacgcaagagttgcggttgtcggtattgggctatatatttgtgaagttgtgtgttcggcatgtcgggtgaaaccggcggtcgaatgcgtgaaagacttgacacatcaaggttaagggagtccatcatggcagctcgttgcgcagtgtgcggcaagggaccgcagaccggtttcaccgtttcccattcgcaccgtcgtaccaagcgtagcttccgcccgaacctgcagtctgtacgcaccacgattgatggcgagaacactcgtctgcgcgtgtgcgtcaagtgcctcaaggccggcaaggttcagcgcgtggccgcgtgaatcgcgtactaacgtggagcaaaacccgtttgagcttcggctcagcgggttttgttgtttctgcggcctaaagaggccgtgcgaatagaataggccaatatgagcatcactatggacaccactctcgcttcgctggtcaccaacaagcgtcgcgtgtccgcgctcaaatcgctgggaatcgtcactgtcggcgacgccctgacctactatcccttccgcgtcaccgaaccggtgccgcttcgcgccatccgcgaggccgcacccggccagcagatggcatttgccgccgtgatacgagacatgcgcgtggtgccgatgaacgctcgccgcggctaccgactcgaggcgacggtcgatgacgccgacttcgcccggtctcgtcgcgtacccggcagcacggcccggctcacgttcttttcgtatcgtaaatcgtatgtggattgggtcagcatgcggctgcgcgccggcacgtctgtggtggtctccggtatgcccagcgaatacatggggcagctgcaattcacgcaccccgaaatcctcactgtcgcgcccgggtcggccggagcaggagcggggcttgagggttacgctcggggtgcggcatccggcaatggtgcgtttgcgggaagtaccgatccgtatgccagtgtgcagtccgcgtatccgccggccgcggctgcctcttccggggccgcgctgaaatacgacgccgataccgtgcaagaggcgcttacccgcgtctgccggccccgcccggtatatcacgccagttcgcgtatctcgtccgaacatattcatgagacgattctgggattgctgtggatgatgggggcccgcacgtcatccacgcctgacgggcaactcgctggcgctgggtcagccggcattgtggctcccacgaccgacaccatcgccgtccaaaacggggaagagaattccggcacgaccgccgaatccggtgctgaggcgctctcccaatccatcccagatgtgctgcccgaatcggtgcgcaaggccaagaacctcatgcatcgggctgaggcgttcctggccattcatgatccggcctccacgacccggttcaaggaggccatcggaaccctgcgctatgaggaggctttcgtttcgcagacctcgctgcttaaagccaggtcgcacgcccataaatccgcggctcactcttgcccgttggtaaccgacagtctgcgcgatcagttcatcgcatccctgccgttctccctcactgcagggcagcagcaggttattcatgatattgccgccgatttggctcatgactggccaatgcagcgtctgctgcaaggcgaggtgggctccggcaaaaccgtagtggcgctcgctgccatgctccaagccgtagacgccggctatcaggccgtgcttgttgccccgactcaggtgctggccgagcagcatgccgaaaccattggccggatggtggagcaactcaagccagcgattccagtcacgttgttgacgggcggcatgaagcttgctgcgcgacgtaaagcacttgctgcggcgtccagtggcgagccgggcattatcgtggccacgcacgcggcgttttccaagaccttccaagccccgcacttggccttggtggtaatcgacgagcagcaccggttcggtgtggaacagcgcgaaagtctcaacgccaaaaccgacgacggcaccacgccgcatctattggtgatgaccgccacgcccatcccgcgcaccgccgccatgacttggtttggcgatctcgatatttcctggctcaccgaattgcctggcggccgcaaaccgattcgcaccgtggtggtcaatgaggccgacgccgccaccatgggccgtatgttcgcgcacattcgcgcgcgagtcgacgcgggggagcgggcctatatcgtgtgcccgcgcattgatgcggatgatgaggggaacgaaggcggttccggcgtttcggcagcagccggttctgcccgcggacgcgccgcagcatctggttccagtgcccgcacagctgcgggcggccgtgcaacgcgcgcggcggccgacgccatcggcatcgacgacccctacgaaaccttcgacgaaaacggcgaaaccgtggctcgcccgccattgcatgcggtggccgaaatcgccgaccggttgcagaaactcccgcaattccaaggcattcggtttgcgactctgaccggccgcgacaaggatgacgtcaaaacccaggtcatggccgattttgccggcggcgagactccgattctggtgtccaccacggtgatcgaagtcggtgtggatgtgaaacaggccagctgcatcgtgatctttgatgccgaccgatacggcctctctcagttgcatcagctgcgcggccgcgtggggcgtggcggcaccaactcgtgggcgttccttgtttcccgtgcggaacccggctccccggccgagcaacggctcgaagtgattcaccactcgctcgacggtgccgaaatcgcccaagccgacttggaattccgcggtgccggcgatgtgctcggcgacgcccaatccggcggcaagtccagcctgaagctcctgcgcgtggtcaaggacgccgacatgatcgccgacgcccgcacccgtgccgagcagcttctggctgccgaccccgaactggcagacgaggtccaactcgccggttccgtcctcgacttcacccgaggcaacgaaaccttcctgacctccagctgaggctagggctgcgccccccgtaatcgcacgatattgtattttcatctggtaaacagaagtaaatgcttgtgccagagacggattgcatatgcatgggtgcttcgtggaagctgattctgtgttccgttgctgagttacggacgtgctggcgatacgcagctttcgcgttcgacaagctgcgtgggaaaaatgaagtaattctgttccacctttccttcccgcgcttcgagaatcaggttgatgcattgtctggcgatgaggtcgaatggctgcctgatggtcgtcagggatggacacatgcttgccgcaggatagacatcgtcgaaaccgatgatcgataattgttcgggcagactgatgccgtgctgtcgggcggcgcgatagacgttgatcgcgccgagatcgttgaacgcgaagatggcggtcggtcggtcctgctccctcatttccaggagatcgcatgccgccttgtatgccttgtcagacacgtagtcgccaaccttgatgagatgcggatccgcgctgatgccgtttttctgcagcgccgccatgtatccgctcagtcgcgcctgcgaggactgtgaattagtagggccagtgatgacggcgattcgtcgatgccccaatgatatgaaatattgcgtggcgagcattcccccggtccagttatcaatgcccactcccaatgcgtcagcggagacctgaccgaccggatcgacaatcacatatgggatgttcctcgtctgcagcagcgattcctcggccgatgagatattcgataagagaagtatgacgcctagtgggttgcgttcgatggcgttacggaggcagctgctggcctcgtttcttgttgcgtattctccggaatccggtccggcgcagcttacggtgatgccgaggccaaaatctctggcgtatgaagctgtctccttgaccatttccacggtgccgttgttggtcatttcgctgacgaccagttcgattgaccgtatggtttttgttgtgggaagttttttgcggaatccggcttcttcgaggagcagttccaccctatcgcgggtctcgtcggagactccatcacggccgttgatgaccttggacacggtagcgggggatactcccgccgcttgggcgatgtcggagaccttcggtctgtttgttgttttgattgtggccatgactcttctcttttcgtatgcgacgctgcaaaaaaagcgttatatatagagtagcgaaattttcgctactctaaaacagcttttttatcggcgtattgctgtctatatagcggaaatgggtgttgtagacatggattggctgctgtttcttcgatgagtacgatttgtgcatatcgttgcaataaagcccttttaaggcgaaaaaacaagataaagaaaatttcgccacgcgcaacgaagttttatttgctcttttttgtaaaaccttgtatattgaacgtaccgatgaatgaaacggcaatggcaacgatgttgttggcaggctcattcagacgggttaagaagaa

SEQ ID NO: 3598 - DNA, 3389 bp, Unknown
  R85_18m  MAG No. k141_28930
attggcaagcaccagcacccacaccagcagatagccgtaccgcgcgccggacgtgatgtttgccgccacattgcccggatccacataagccacggccgccacgaatgcggggccgagaatgctggccagtgcgtggtcatgcggctttttcttgccgcttgcgcccgttcccgcgaactggcgctccttctcgatttccgatgtttcctgttcgatgtctgccgcaatggcatctgctgcggtgtgtgttgtcgccatatcgtctgttcctattcccttcataccgggctcagttatagcgcgagtatgtttcccgcgtcaacagacggacaatctgcggacaattgtcgggtgattggcggaccggcggcggatgttctcggatgttctcggccctctcacggctccgccttccctatttactcgtctgagggcacggcttggccggggcaggtgtgaaggacggcgagcatggcgtccttttcctgggaggtgacggtgagctgatacttgtctttgacgccgatctggcgggccacgtagtcgcaacggtaggcgctgttggagggcagccaataggcggcggaggcggagcctttctcctgattggcggggccgtccacagcgagcagattgtaggggtcgttgccgaattcatggcgctgcatggtggaccagtcgcgcgcgccggactgccaagcgttttcgagcgccaccacgtggtcgatctgcactttggagctcgtggtgcgaccgcgcacgaagtggatggtctgggcagtgtacggatcggccagtgtgccggactcgaccacacaggaaccggcgtatttgtaggtgatgtccgtgagatcgcgggcgagcacgtcgtcgcgtacgtcgcagccattgccgtcgacgtcggtggtgcggaaaccgaaggaatcgcggtcgtagccggaggagctttggttgtcgtctacggcgagcgcgttcaaagtgtcggcggctgaaccggtggcagtgtagccaccggtgattttggccacgtcggagctgacctgcggcagtaacaggccgatggtcacgccgattgctacggcgagaacgatgagaatcagcacgcgctccagcggcccagaggcgttgaaacgacggcggaagtgggcgttacgacgtgccatcaatcacgcataggtgaaggtgagggggtcgtggccggcgcgggtggggccgtcgagggcgtcgatggcagcgtgttcatcggcggtcagggcgaagctgaacaggtcgagattctccctctgacggtcggcatgcgcggacttggggatgatgatcgtgccgttttcgatgtgccagcgcagaatcacctgggccgggctgacctcatgggcggcggcgatcttctcgatggtgccgtcgccggcgttgaggtcggcgccacgcgccatcggcgagtaggcctccacggcgatgccgtgcttcttgcagaacgccaccacttcgcgctgctgccacgtggggtgcagctcaatctgattgacggccggccatgcgccggtctccccgtgcagacgcttcagatcggcgggcatgaagttgcatacgccgagcgtgcgtgccatgccttcgtcgcgcagcttgacgaacgccttccaggtgtcggtgctgcgccagtcgaacggcgtgggccaatggatcatgtacatgtccacgtaatcgagctggaggagtttcagggagttgtcgaatgccttgagcgcggagtcgtagccctgctcggagtcgcgcagcttggtggtgacccacagggtctcgcgcttggcgccggtgttgtatccggaagcggcgagcgcacgacccacgccggcctcgttgttgtatccggcggcgccatcgatgtggcggtatccggcttccagcgcagattcgacgacaggggccacgccctcgtcatcgatacgtagcatgccaaggccgacctgcggaatggaatggccgtctttcaaggcgatgtccggcacgttggcgggattgatgtgtccgttggtcatggcttgtgatgctccttcatgtactgcaactacacgccactgtacacggttatgcaggcgatgtgcgggtgctgcaaccaaacggcatgattgcgcccggccttccgtgtgggagagccgggcgcaatcatgacaacatcacgctctactcctgcgaccggccctcgccctattgttcccgggcgcgaatttgccccggtacaggcgtcaatcgattgacgtttgcaccggggcagaaatcgttgtcccggtacgcaatttcgggccattttcgagaaccaggacaagacaatccccaaagtccacataccccgacaaacagaatcggcggaatacagccaatcccgaaatcaacatactgtcccggttctcacgtagaacgattgacgtgcaaaccggggcaacgggaattgtcccggtacgcgaaaaacacccgttttcgcaaaccaggacagtgatttctgtcctggtacccacatcaaacgattgatgcacgaaccgggacagaatcgcatcgctgcgccgagacagacgcatctgacagccgacaaccgataaacgacagccgacagatggcatctggcagccggttgccggctgccggcaaccgcatcataatgccgcatcagtctctatcaggagcgcttacgacgcaaagcaagcgagaccccgccggccacgccgagaacgacaaccgcaagacccacggcagtcaccgcgctaccggtattgctcagcacaccagtgatcttgtcgccattcgcaccgttggtcttatcgccctcgcccgtatcgggattgatagtagccccgccattacccgcaccgtccgagccgttgccggaaccaccttcggcccgagcggtaaccgcaaccgtataggtttcggtgacattcggattcgacttgagcgttacggtaaccttcgccgcatcagcgggagcggagaaatcgtaatcgagcgtgaactggtcggcggaaagcgtcacgttgcccatgcctgcggaatagttgcccacgaccttgagatcatggtcggcatcgatggcatcgcccacctgataggtggttttgcttggcgtgacggtcaggctggagacctccttttgggcgaggccggcaatggcatcggcaacaagcttgatcacatcgttcacgtcctgctcggtgtaggtgctgccggcaagcagcacgtcagcggcggcaagcgcctgatcgagtttggcgagcgactcgttggtgtactcatcgcgattgattttcccggcttcggccacggccttgtccaggttctccgtggatggcttcaccggagtttcggtctttttgacgagtgagaccttgtccacattg

SEQ ID NO: 3599 - DNA, 2515 bp, Unknown
  R85_18m  MAG No. k141_28977
ccacgccgcttatgttcgctgacctgacccatacccctgaagctgtggcttctggagcaagtcccaaggaactgcatcgcccggccttccgcgagaacgcgggggaggtgtacccggaccgcgaactcaacccgtacgagatcaaccacatcatctccacgcacttcaatgacgtacgcctgaagaacttcatcgaactgcgtcactgggattcactgccgattgagcgtgccgagcgtctgacggagattgtgtcctctctgttctacgtgcctgagcaccgtgaacgtctggaaagctacttcgagggcatcagcgaggaagaggtgttcgaggccaaggccaacattcaggcccacggtcgcgaggcttcgccatacggccagccgctcgatttctggaaggaattcttgggattggagggcctcttgtccgacattcccggcgatctgaagcaccccgacgtgttccaggagtaagcgaagaagcatatacagaaaaatctattgcgcgatatcggtgtcgaaggcatgacagaatgttttgttttggcaccgttttgcatatccggccaaggatattggatgtggttgcgcatgggagtggggagaatgcggatagactggcggatatgacatctgggaattcattgcagcataagcgtgttcgcaagtcgccgggggaacgccggcaggaaattctcgatgccgccgtgcgactgatttccgagcgtggctacaacggtacttctgtgcaggatgtggccgatgcggtcggtgttaccaagcagggagttttgcgatattttcctagcaaagataacctgcttgccgcgatgtatcacgagaattacaacacgtttggcagtgtggaagacttcatggcctccggcctgcctggttcagtgcccgatgatttcagattacccgcgtatctgaggttcttggtacattgcaattccacgcgccccatgcttgttcagctgttctcgatattgcaggtcgaatcgttcaatcctgcgcatccgttacatgacgagtttgccaatcgtcgggattcaatatggcgatactattcgacatacaactggaacctgccttccgaattcacctcgtttgaggaggtccggcccacgttgcgccatgctctggagatcatggatggtgtgcaactgaggtggttacgggggccggccattgacttatgcgatgaatgggccgatctggagccggcgatatttccttcgccgatatgggacgggtatcgctgattcgctgtgtgccttgaactgaggcttgtgcttgatggcggcagtaagtatgcgggcgaacgaaggggtcgcatacatacggtcgttttggtgtatgtgatgcgcgcggcataagcgtgttgtatgctgtcaatagataaactaccaattggtaattaaaaagctgttcgatttcactgaggaaagcgacttcgtatgaccgacaacaccacgcctgccgcaactgctgaaaccttaccgtacaagaatcctgatttgcctgctggtgagcgaatcgccgacttgctctcccgtatgacacttgaggagaaggtcggccagatgatgcagcttgacgcccgcggcggcgatcttgaggatctcatcgtgaataagcatgtcggatccattctgcataccagccccgaggatttatctcgtgccgccaagaccgtcaatgagaagacgcgtctgggcatcccgttgattatcggagatgactgcatccatggatactccttctggcccggcgccacgatcttcccctcccagctcggcatggccgtcagctgggacgccgccaaagtcgaagccgctggccgcgccaccgccgaagaggtctcctgcaccggcgtgcactggacgttctccccggtgctgtgcatcgcccgcgacacccgttggggccgcgtggacgagacctttggcgaggacccgatgctgatcggcgaactcgcctccgccatggtcaagggctaccagggcggcgccaaggccggcgaggccctgccgaagaacgcgatcctggcctgcgccaagcatttcgccggttactccgagacccagggcggccgtgacgcctccgaagcggacctctcccaccgcaagctcgaatcctggttcctgccgccgttcgagcgcgtggccaaagaaggttgcggcacgttcatgctcggctacgagtccatcgaaggcgtgccggtcacgttcaacaaatggctgctgaccgacaagctgcgcggcgcatggcaatacaacggcacgctgatcaccgattgggacaacgtcggccgctcggtatgggagcagcatgtcaagcccgattacgtgcacgccgcagccgacgcggtcaaggccggcaacgacctggtcatgaccaccccacagttctatgagggagccatcgaagccgtaaaaaccggtctgctcgacgaatccctgattgacgatgcggtagcccgcatcctggccctgaaattccgcctc

SEQ ID NO: 3600 - DNA, 7912 bp, Unknown
  R85_18m  MAG No. k141_29094
ccgcgccaaggatgaggacgccgtcaaggcgttccatgaggccggtctcgcctctggcggtaccgacaacggcgctccgggcccgcgcccgaactatggccccacgtattacgccgcgttcatccacgacccggacggcaacaatattgaggccatgctgagctgatcaggccgtggactactccacggtaatcgtcaacgcatcggccacacggccggccttggcacgggcgtcggcttcggactcgccgacggccagtgccacggccatgcggcggtggccatgcacttcgggcttggcaaaaatgcgcaggtccgtgccgggttcggccagagcagcggccacatcggtgaactcggcctcaccgtcgccggccaccacaatcgcatggcttgccgccaccgagccggccggaatcgtgagcgccacatgctcgggggtgatcggcaggccgagaatcgcgcgggcgtgcagcgcgaactcgctcagacgctgggaggtcatcgtcaccataccggtatcgtgcggacggggggagacctcgttgaacagaatcgagccgtcggtgagcacgaacagctccacgccgaatacgccccaaccggtttcgccggtcgcctgagccttggccaccaagccttcaacggcggtacgtgcgatgtcgcgcgcccgctcggcctcaccatcgggctcggtagccggctgccaggactcgcggtaatcgccggactcctgacgttggccgatcggcgcgcacgtcacaatgccggcggacgaagaaacggtcagtaccgtcagctcacgctccagcggggcaagcgcttcaacgatcacgcgcgacacatcgccctcatcggcggcgcggcggccctcctgcgcttcggtccaagcggcatcgatggcgtcggcggaacgcaccaccgactggccgtgaccagacgagctcatcaccggcttgaccacgcacggatagccgacttccgaagctccggcgcgcagctcttccagcgagccggcaaaacgatacggtgtagtcggcaagcccaattcttcgtgggccagtacgcgcaggcgctcgcggtccatgcaaatcgcggcgatttcggcgctcggcaccacctgggcgcccgcggccgcagcaccggccagcacatcggtggcgatggcctctacctcgggcacgatgatgtccggcttgatttcatcgaacaatgcctgcaattcggcggcattcgccatatccaacgcgcggtattcatgcgccacctgctgggccggagcgccggcataggagtcagcagcacacacccatgcgcccagtcgcatgagttcaagtgtgacctccttgcccagctcgccagcgcccaaaaacagcacacgggtggggtgcttgcccagcggtgtgcccagcgggtggttggctgcgcgagttgcgggggggacggcggaagtctcggcgggaattgcgggagaggaggcggaagtcacggcagtattcacggcgttctcagtcatacccacattctgccatgacgcgatgatttcggtatgtcgcgtgagcggagtgcctcgcgtggccaaaattacgggcggaatatccggcttcatggggcggtaaattccccatggggcggtaatgagtccatggggcggtttgttggttttgtgaaaccgcggaattaagccgttttgccttaccgccccatgggaatttcaccgccccatggggtaaataccgccccatgggcaggttaccgccccatgaagattcagatgcccgtaacccgccataaatactgcgtatagacacgccattgcgtgtgtaacagagccgtcgtaccttagcaattaccggccgatgaagtatggggcggtcgggccaacattttgggatgcgacatatagcgaatagcggcgtgccggttccggcgtttcaggctacaagccggcacgctggcaatagtcgaagtacttaacgattccgcctatgcggggctcgaattcggcgacgtacgctcgctgagcctgctggagactccgggcgcgctggacgtggcgctggaacttggctcgctgtccaaaatgtatatggtggccggctggcgcggtggcatggcgattccgccgcattcgtggattggctgctcaacacggccggcgtggcgctgatgccgggggtctgcttcggtcaggtgggcgaaggctgggtgcgcatcagtctgctcaagcacaccgccgagttgttccaggccgtggcccgcgccgatcgtgcgctgcgaagcgcgtgattcaatattgggcaaaatgcggcagcccataccatttcacacgcgttcaggcagcgcggccgacgctattgccgcgcggtggtttaggatgaggcaatgcgcgaaaacgggattgaagagagcattgatcgtccgctgactatcgctcttgtggtcgatacggtgggcaatcagggcaacggcacctccaattcggccttgcaatgggctgcggaattggagcggcaaggccatcatgtgaggcttgtcggtataggggcgcccgaatatccggcgcgcgtgaataaggtgccgctcgtctcgtgggtggccgccaagcagctcatgcaattcgccgaacccagcgacacgttgttccgcaccgccttccaaggcgtggatgtggtgcatatctatatgccgttcaaattcggccgtcgtgccgctaaagtcgcccaccaaatgggcattcccgtgactgccggattccacctgcagccggagaacgtgctgtattcggccggcccgctacgtcgcattcccggtatttccagcttcctgtactggctgttcaagcactggctgtacaagcacattgaccacatccatgtgcccaccgaaatgaccgcgagcctgttgcgcgcgcacgggtataaagccaagttgcacgtgatttccaatggttattcaccggtgtattctccgaagaagccggccgatccggatgcctcggctcccgtgccgttccgtgtcgtcgcttccggccgactggccagcgagaaagatcagattacgctgatcaaggcggtgtcgatgtcccggcacgccggcgatattcagctggtgatcgccggtactgggccgctcaagcagtatctcaagttccgcgccgggcgtttgctggcgcgcaaggccgatatcggattccacaagcacgccgatatgcccgatttgttgcgttcgggcgatttgttcgtgcattgttcgattgccgacatcgaatcggtgagcgtgatcgaggcgatggcgtgcggattggtgccggtgatcgccgcgtccgaattgtcggcggccggccagttcgcgctgatcgacgagtcgttgttccccgtgcgggacgcggccctgctggcccgacgcatcgattggtggatcgcacatcaggccgagcgcgccgaatggggcgagaaatacgccgaatacaccaaggcgcattattccgtggaagcctcggtccacaagttcgtggatatggaacgcaaggcgataggggagtaggagccttctcgtttgcggagaggttttccctcagtccgcctgcggcggccagctccctcatcggcgggagccacgaaaaaacctccctctggtgagggaggtggcatcgcgaagcgatgacggagagagagattagcgaagggttttacaacacctcaataagctgatcgacctcttcatgcgtggtggcccagctggtgcagatgcgcatcacggtatgcgtgtcgtcggccttctcggtgaagccgagcttgacctcgcgctccagacggtcgatggtcggctgatccatcgtcacgaaaatctggttggtgggcgcttcgaaagtgagcatgtagcccttggcgcgcagggcctcgcgaatacgatcggccgcctcattggcgttgcgggcaatcttgaaatacaggttgtcggtgaataaggcgtcaaactgcgcgcccagcacgaagcccttggccagcaaggcgccgtgctgcttgatgcgggtcaggaagtgcttcggcgtgttgtgcttggtaaacaccacggcctcgccgaacagcgcacccaccttggtaccgccgatgtagaacacgtcggcgatggtcgccagatccgtgagcgtcatgtcggaaccggtggcggtcagcgcgtagccgagtcgcgcgccatccacgaacagcggcatatcgtacttatgcgccacatcggcgatggcctgcagttcggctttggagtagatggtgccatattcggtgctttgcgagacgtacacggatccagggaacaccatgtgctcgtagttgccgtccgcatagaaggtcttgcagaactcgtccagttcggttggatccattttgccgttgtgttggggaatcgtaagcaccttgtggccggagaactcgatggcgccggcctcgtgcacgttcggatggccggaggcgaccgcgaccacgcctgcatacgccggggtgatggtgtcgatgacgacctggttggtctgcgtgccgccgacgaggaaccacacatccgcgtccggctggccgcaggcctcgcggatcttggccttggcctgatcgctcagttcgtcggacccgtagcccgaatacagatggttgttggcttcagccacggcttcaagcactgcgggatgggcggcgcgggagtaatcgttctcaaaagacagcatgacggaccttttgtccttgtgttagatgaattggatatgcccgagtgtacaacgtggcggttcccggcaggagcggggaattcatggagaaaaacaaaacccttccgcgaacggaagggttttactggggtggccaacgcggctcgaacgcgcgaccttctgaaccacaatcagatgctctaccaactgagctatggccaccatagtgtcgtattcagcaagctgaattcgcacaacaggtgaatactatacacaactttgcggatgtgtgctcatcggtgtgtcgcgatggaatcaagcggttggtttcattcttggggctaggctgtgggctgtctcaaatggtgggatgtggacgagtgggtcttgtgtggcgattgatgaaaagtcagggcacacaacggcgtgatggtgcggctggggattgcagagatgattacgtgagcgttcacaatgtgagcattatgtttcatatcaaccgcgacccgcctagtttcatgcgatgttacctacaccgaacaagggaagagaaacaccatggaaaaggttaaagcctttgcagattggctgaccaagtggtttacggtcatcgtcatcgtctgggccgtcttcaactacttcgtgccggccgccagcctgtggggcaaggcgtacaccggctacatgctgggcatcgtgctgttcggcatggggctgaccctgacgctggacgatttcaagcgcatcctcacccagccgatgatggtcatcgtcggcacggtggcccacttcgtcatcatgccgctcgtcgccgtggccctgtgcgcgatcttccacctgtccggcccgctggccgtgggcgtgattctcgtcggctgctgcccgtccggcacctcctccaacgtgatgagctacctgtcccgtggtgacgtggccctcgatgtctccatcggcatcctctccaccctgtgcgccccgttcatgattccgctgctgatgcagctgctggcctcccagtatgtgagcgtgccggtcgaatccctgttccttaacgccgtcaaggtggtgctcttcccgattgccctcggtgtgatctgccacatgatcttcggcaagaagatcgagaaggtcacggtggccctgccgatcgtctcccaggtggccatcctgctgatcatcggcgtggtcgtcgccgccaatggcccgaagctgttcgtggccagctctctgatggccatcccggtggtcatcctgcataatctgtgcggctactcgctgggcttcggcttctcgaagctgatgtacaggatctacccgaagggcttccgctacgcgcagcagaaggccatcacgttcgaggtcggcatgcaggactccgccctgggcgccacgctggccctgacctccttcgcgtccaacccgctcgccgccgtgccgtccacgttcttctccgtgtggcacaacatctccggctccatcctgtccagctggtggcgcaaccatgacgaccggcacgagattcattgggattctgacaacggcgagaagggctccgccaagagcaccgtttccgtggcccacccgttcgacgccgacaaggccgccaaggtcgctgcctgaaatcctgagatggtgagaaaggtcgggtaaggtacgactccagtcagtcggtcactcacctttcctacctcgcataacatagccgctcccgcttactcccgattaatgtatcgggcgtttcgcgagggcggttttgctataattagtaatgcagaaagcggcaaggtaatacggcaaagaggccgggtcgctagaggttcccatcggatatggaagagcacgagggtgtgctggaaacagataacacagaagcggcatgtggtgaaaagaaacataatgtaacctccttggcggtgcccccgtgtgacatagtctccgcgggggcacctgctgtgtggcgttcgcttttttgcgacgcattcccgggaatattgcgttgggagggcgtgtgtgcgtgtgttgtgcgacgcattcccgggattgttgcgccagaaggagaggaaaagtacagggcgcggattgtcccaagctagtgagtcgaggcccggcgcgtcgttgtccggcggaatcgtagtatagatattcgtgtgtgccagcagcgcgccttatgtaacaggcgagcatgctgggatatccttcaaaccgctgatcgcacgtagtaatgcgccgacgggaggggcgaaggccatcgggccggtggactgggctatcttttccgattcgtcgggtgtcgccaacaggcagatgccaagcgagtgtgctgaaaagtgtgggcgcagtgcggcggtcacacaaaagcaagagaaaccactgaatcggagaattcaagttgcctactattgaacagctcgtccgtaagggacgtcaggcaaagccgaagaagtccaagactttggccctgaagggcagcccgctgcgtcgcggcgtgtgcacccgtgtctacaccaccaccccgaagaagccgaactcggctctgcgtaaggtcgctcgtgtgcgcctgtcctcgggcatcgaagtcaccgcctacattccgggcgagggccacaacctgcaggagcactccatcgtgctcgtgcgcggcggccgtgtgaaggatctcccgggtgtgcgttaccacatcgtgcgcggcgcgctcgatacccagggtgtcaaggaccgtaagcagggtcgttccctgtatggagcaaagaaggcgaagtaagagatatgtcacgtaagggaccttccaagaagcacgtcgtgctgcccgatccgatctacggttccaccgtggtggcgcagctcatcaacaagattctgcttgacggcaagaagtcgatcgccgaagacatcgtctactccgcgctcgatatggtcaaggagaagtccgaccaggaaccggtggctgtgctcaagcgcgccctggacaacatccgtccgtccctcgaggttcgctcccgccgtgtcggtggcgccacctaccaggtgccggtcgaggtcaagccgaaccgcgccaacaccctgtcgctgcgctggctgaccgacttctcccgcgcccgtcgtgagaagaccatggccgagcgtctcgccaacgagatcctggatgcctccaacggcctcggtgcttctgtcaagcgccgcgaggatactcataagatggcagaggctaacaaggcc

SEQ ID NO: 3601 - DNA, 5290 bp, Unknown
  R85_18m  MAG No. k141_29479
ccgcacgacgcaccgcaggattctcccaattcaaatccggctgcttcttcgagaactgatgcagatagtacttgccgcgttccgggcaatactcccacgccgaaccgccgaaataggaaccccaccggttcggctcggcccccggctcacccggggtggttcccgggcgggccggacgccaccagtaccaatccgcatgaggatcggacttgtctttggacgcctcgaaccacgcatgctcgtccgaagtatggttgaccaccagatccatcacgatcttgagcccccgcttgtgtgcctcggccagcagctcgtccatatcctcgagcgtgccgaacagggggtcaatgtcctgatagtcggaaatatcgtagccattgtcgtcctgcggcgacctgtacaccggcgacagccatagcacgtccacgccaagatcggccagataatccaaacgcgaggtgatacccttcagatcgccgataccgtccccgttcgaatcctggaacgaacgcggatagacctgatagaccacagcattcgaccaccacggattcggcgtggtgccattggttcgaacggaatcgggaagcacgacacgctgcgcagtagtcatgattgcaacctttctaacgaatgtgacgggaatcccggagggcggcaagaaccctccaggattccacagactgatgacgggatgagacggcttacttgttcgcgcctcgcatcacgccgctgatcacccacttctgggcgaagatgtagacgatgaggatcggggccatggccatcaggtagctggcaaacgccaccggatagttggcggtgaactgcgagctgaacacgaactgcgccagcgggatcgtctgatccgcggaattggacagcaggatcaacggcaggaggaagtcgttccacgcccacagcgcggtcaggatcgcgatggtggcgttgatcgggcccatcagcgggaagatgatggtccagaagatgcgccaggtggacgcgccgtcaatgcgggccgcctcttccagcgacaccggaatcgaacggatgaagccgatggcgatgaacaggttggtgcccaggccgaagatcatatacaggatgatcaggccgaacttgttgtcgaggttccacccgcccatctgcttggccagcggcagcatgatcacggagaacggcacgaacatggctgcgatgaagaagtagtacaggaagcggaagaaccgcttgtccatgttacgggccaccgcataggccacgaacgtgttggtcagcagggtgagcacgatggcgcccacagtgatgatcgccgagttcagggccgcgcgcggatagttcaccatgttcgaggcctcggcgaagttgccccactgccagctggtgggcagggcgaacgtgccggcttcggccggggttttcagtgcggtgacgatggtgaagtagagcggcaccagaatggtcaggctcagcaccgcgaccaccgcggtcagccaccagttgatcttatggtccttgcggaacttgtttttcttgggttgtgcagcaacagcgctggtcatgatcacaccttctccttgctaccgaagtacttgagctgactgaacgcgaggatcgcgaggacgatgaagaacatcaccgcattggcggtctggtaggcgtattcgccaccggtcaggccgccctggtagatgaggtaggtgaccgtttccgtagcggagttcggaccgccaccggtcagggcgaccacctggtcgaaggtgcctaaggcgcccttcatcgtcaggacgaggttgatggtgaagaacggtccgatcagcgggaaggtgatctgccagaacttctgccaggcgttgacgccgtcaagggcggcggcctcgtagatgtcggtgtcgatggtctgcaggccggcgaggtagatcagtgtggtgtaggccacgccctgccatacggagagcaccacgatcggcgcccatgccagcgattcggaggtgatcatcgattcggacagccaccctatgcccaacgccttgccgagttcggggatcggcatcatgaagatgtacttgaacacgtagccgaccacaagcacggccagggtgtaggggatgaagtagatggcgcggaacccgttgcggaacgcgatcttggagttgagcagcacggcgatgaacatggacagcaggttcaccagaatcgtcaccacgatggcgatgaagaacgtgaacaggtaggcgcgcccaatgcgctcatcctggaacatggccttgtagttggtcaggccgatccatttgtatttgccgtagcccttggaattggtgaaggagtacatcacgccgcgcaggaacggccagtacaggaacaccatgaacaggatcatggccggaacggtcatccagtagtatgcgggatcgaccttgcgatgggagaaagcggagacacgcttcttgcgtggtttttcggcaatggcggacatggtgaacctccttactgtacggtcctggcttggatctgatcccactgcgtctgcattgaattggtgaacgcctcaacgttgccggtggtcagcaggctttgcaggctgccggccatggtcatggacgaggggatgtagtggtcggcgaaatcagcgatgcgtccctccttgtagaagtggaggatgttctgcagagcctcgtcgccggcgtaggtgtccttgaacggggtgaagcagaactgcgattcggcgtattccttgagccggtcctcgtccatcaagaattccacgaacatgcgcgattccttgggatgcttggtggtggccgaaatggtgagcacggtgtcgtcgccggcggtgagcacctgctcgtccggatcgtcggtggcgggcagctgggcgaacttcacgttgatgtccgggttgaccatgcgcacctgcggcacgacgtaggtgcccaggggcaagatggccgccttgccgttggcgaagtcctgggtggcctgctggtaagtaacgcccggattgtcctgcgtgtactggtagaactcgacttccttttccgccacgggaccccacaggtcggcgaatgtggcggtgccgccgctgagcttcgagtattcgctgatcggcacaagtgtgccggccagggaggcgaacggcgcctgagtggtccacggttcggcgaggctgccttcgatcggcgtgatgccggcctgctggatctgcttcatcgcggcgatgaactcggaccaagtttcgggcaggttgtccgggtccagcccagcctgacgccacaggtccacgttgacgacgtagccgttggcgttgccggcgaacgggatgccgtacgcgcggtcggcgctggtgtcgtacagtttggccagatccttgagcagcttgaccatctgcgggttgatgttgtcgaggatctcgtcgtcggtgaagtcctggaagattcccgaggcggcgaattcgccgaagtaacggccgccgtccacggtgaggacatccggcaccttgttcttgacgaagcgcgtgcgcagatcggtggcggcatcggcggtgttgatgatgtcgatggtgatgttggggtgttccgcctcgaatcccttgaccagcttcttgaactggctgactgcctctaccttgtactggaagaattcgagagtgacgtttccggcggtggatgtgccacaaccggcgagtgcggccacgcatgcggcgccggcacagacggcggcgatggcgcgggatatgctgcgggtctttgccgccatacggttcgggcgtcgatcatgcccggaggacgaccagcgctcggtccaagacgatgcggacttcatctgctgcttctcctttcatttacacttcacgacttcgctactccgcgactgtcgtgatgtatacgttaacacccatatttattgatatcaaacggcataattacaggatttctgtaaacggttacattccgtcatggtatgattgtggccattatcgagcacccatgaggaaggttcgcgcgtgatacattccacgatctacgacgtagccgtcagggccggggtgtccgtggccacggtgtcacgaacattcgccaaaccggatatcgtcaccgaggccacgcgcaagaaagtgatcgaagcggccaacgaactcgacttcgccatctcccggtccgccaccgcgctgaaatcgaaacacacgttccgtatcgctatgctcaccggcgaggcgatcgccacctggttcgactccaatctgtacaaggggctgaccgaggtgctgcagacccatggctacgacgtgtccctctacggcattgcggacaccgaacagcgcatgtcgttcttcgacgagctgcccctgcgccgcaatgtcgacgcggtgatcgtggcctcgttcaacgtaaccatggaggagatctccaacctgcagggcatgggcgtgccgctgatcggcgtcaacgtgccgcacaacgaggggttcaacgccaccgtgtccatagacaacgccaagagcatgcgcatggccatcaatcacctgcatgccctggggcaccggcgtatcgcctacatctgcaccgacgtctcggaggcgccgatggaatacagtgcggactcgcgcctgcagagattcgaatcggcctgtgcggcgtatgaggatatcgaacagttgaccatagccctgccccgcaacgacttcaccgtggacgaggcgatcgcgcgcatcaccgtcatggaccagccgcccacggccctatgctgcctgagcgacgggacggcgctgcccctgctgtacaagctgcccaaagccgggatcggcgtgccgaacgacatgtccctgatcggattcgacgacagcgactatgcggccgagttcgggctgaccaccattcatcaggatccgcaggccctggggcgcaaggcagcggaaaaggcgctgtcgctgattgattccgcgacgttcggcattgacctgggcgagccgttcgagaccgcgcgcacgttcctggccatccgcaataccacggcggcgccccggcggtagtcggtgtcgtcaggcgcgggccgattgcagacgttcgcaggcggaacggatggcctcgtcggtggcggtggcggagaaacgcaggtaggcgggagcgccgtagaattcgccggggctggggatgatgccgatcttggcgagctcggccatatccgcccagcagtcgccggacgtggccttgacccacacgtacagcgcaccggccggcatgctggcctcatatccatacgattccagcgcccgcaccagcacggtcagacg

SEQ ID NO: 3602 - DNA, 2565 bp, Unknown
  R85_18m  MAG No. k141_29487
gatcgcacgctcctgcgccaccggttacggcgaaggcctcatcaccaccggcctgcacctggacgagggcgtggtggagaccatggcccactatcgtggtgctgaaatggtcagccccggcgtcaccgccgtcatcgacatcggcggccaggatatgaaatatctggccatcactgacggcgtcatcgactcgatcgccgtcaacgaagcctgctcgtccggctgcggctcgttcctgcagaccttcgccatgtccatgggcctgacgattcaggaattcacccaaaaggctctggcttccacccatccggtggacctcggttcgcgctgcaccgtgttcatgaactcctcggtcaagcaggcgcagaaggaaggcgcctccatcgaggacatcgctgccggcctatgctactccgtggtgcgcaacgccctgtacaaggtcatcaagttgcgtgattccggcgaactcggcgacactgtggtggtccagggcggtacgttcctcaacgacgccgtgctgcgcgccttcgagctgctcaccgaacgtcaggtcacccgcccgaacatcgccggcctcatgggcgcgtttggcgccgccctgaccgcccgcatgcactatcaggatgaggccgaccacttggacgtggtggttaaggccgatgggtccgaggaacagtccaaggccgagcccgcacccaagtccgagcccaaggccgcagccttcaagaagaccgagccggccaagcccgaagcccatgtcgttgtcgtggacggtgtgacccacaccgccagctccattctgaccggcgaagcgctcgacaacatgagcatgaccgccgagcgtgacgtgtgcaagctgtgccagaaccactgcaagctcaccatcaccacattctccgacggctcgcgcttcgtgaccggcaaccgctgcgaacgcggcggcgacgccaagaagaagcgttccgaccgtccgaacctgtacgactacaagtacaagcgttgcttcgcctaccgccgtttgaccgacaagaaggccactcgtggcgagatcggcattccgcgcgccctcaatatgtacgagaactacccgttctggttcacgctgctcaccacgctgggcttcaaggtgatgatctccggccgcagctcccacgagctgttcgagaccggcatcgaatccatcgcctccgaaaacatctgctatccggccaagctggtgcatggccatatcaagtggctgatcaacaagggcatcaagaccatcttctacccgtgcgtgagctacgaggagaacctcgtgcccaacacggacaatcattacaactgcccggttgtggccaactatccgctcgtcgtcggcgccaacgttcctgagctgcgtgaggacggcgtgcgctacatgcacccgtacttcaacctcgccaaccatgagctcatggttggccgcatcgtcgaagagtttgcgtgggccaacgtgacccgcgaagaggccgaaaccgcggtcaaggccgcctatgccgaagacaaggtcttcaagcatgacgtgcagcaggaaggtttgaccgcgctcgcctatatgaaagagcacaactgccgaggcatcgtgctcgccggccgtccctaccacatcgaccccgaaatcaaccacggcatccccgaaaccatctgctcgctcggcatggtggtgctctccgaggattccatctgcgaactgcagccgggggagaagctcaacctcaccgaattcctctcggaaggcgaagccgacccgcgctccaagaacgccgccggattccgccacgtgggagaccgcacagtcaccaagatgccgttgcgcgtcaccaaccagtgggcctaccactcccgtctgtacgcggccgcacacttcgtggcctcctacccgggcctcgaactcgtgcagctcaattccttcggctgtggccttgacgccatcaccaccgatcaggtggccgaaatcctggcagacaaggcggacgtgtacacgctgctgaagattgacgaggtctccaacctgggtgccgccaagattcgactgcgctcgctcaaggccgccgtcgaggaacgcgaagccaacaaggcccgcgaagccgccgcggccaaggccgtgcaaggccccaagtccaccggattccgcaagaccggctccaccgcgccaacccccggccgccagattctgcttgacagcaccatggccgccaacccgaagctcaccaaggccatgcgcgccgcctccaagcgtgccgccgaacgcgacctgcaggccgcagtcgccagcaagaacggcacttcggacggcaccaccggcgtggcgaacgccaagaacgccaagaagtccggccacaacaacgccaccatgtcccgatacgcgcatcgcgagaagttcgtcaaggacatgaagaagaactatacgattgttggccctcagatgagcccgatccacatgtccttggtcgaagcggtgattcgttccggtgggtacaagttcgacatcctgaagcacgcgagccgtggcgatgtggaaaccggcctcaaatacgtgaacaa

SEQ ID NO: 3603 - DNA, 13388 bp, Unknown
  R85_18m  MAG No. k141_29619
tcgcgagttggacaggatgtggcacagacgctgggcagcggaggtggagtcgcgcaggaagccgaggtagccggattcggtgccgaagttctcctccagcttgcgccagttgagcaggcccatgtccgggttctggccctcgcccaaccactgcaagacggcgggcaggatgatgcggttgattttggccgcgcgccccacgccggcggtgagcgcctgcacgtggcggatggcggcgtccgggtcgccgaagccgatggattcgaatcgttcctgtgcggcctcgacgctcagcacgatctggtcgttctccatctgggcgttgaccggcagcatcgggcgatagtagatgtcgaggtgcaagtggcgcacttcgcggcgggtgtcgtcatacttgtcgacgagttcttccgggtgcaggccgaatgcgcgggcgagtcggcgcagctcctgattctggttgagctcgtccacgtcgatgtcgcgcttcttttcgaggcctccgaccgaggcccgaccgagatccgggaacaggtgcgtgcgcttcagggaccaaatctgctggcgatgctccatcacgcgctcgaagcggtagtcctgggacatgcgcacggcctgtttgcgcgagacgtagccgccttcggacaggcgctgcagcgagtcgagcgtgttgctggtgcgcagcgattcatcggtacggccgtgcacaagctgaagcatctgcacggtgaattccacatcgcgcagaccaccgcggccgagcttgatttcgcgatccttcagaggtgcgggaatcagatcttccacgcgcttgcgcattttttggcagtcgtagacgaagttcttacgcttggacgcgctccacacgaacggccgagtcatatccatgtaggcccggccgaggtcagggtcgccagccaccgggcgggccttgagcaacgcctggaactcccagttctcggcccactgctcgtagtagttcttgtgcgaggagagcacgcgcaccagcgcgccgtccttgccttccgggcgcaggccgccgtcgatctgccacagcggctgctcggccacgcccatgatggcggactgacagacacgctgcagcatggtgcccatcttggtgcccacgcggatcagcgtctgatggtccacgtccttgtcggccggttcgaccacgtagatgaggtccacgtcggagacgtagttcagttcctgtgcgccgagtttgcccatgccgatgatggtgaagcgcacgtgctcgctgccctcggtttcgtggcgggcgatggccagcgcgccttcgagcgccgcgtccgcgaggtcggacagttcgcggctgatggtcggttggatggaggccgggtcgtccgccacggcatcctgggcgatgatggcggccagttggttccggtagctggaacgcaaggccgtggccgcttcggccagatccttggaggcgacgggcatggccggttcgtccgggtccgcgccgaccgccttgagcagacgtgcacggcgttgcgcgtgattgaacagatggctgttgcagttgtcgactgctgcggcctccacaagctgcggcttgaagcgcatgaacttgcccatcgcgtcggagacgccgagcaccgtgaccagacgcttcagggcgtcgttgtcggggatgacgtgtttcagatcgcgctggctggattgcatcgcgttgacgatatccacgaaattgctcaatgccatatcggggtcgcaggcgtgggccagcatgctcagcagttcggcgcatcgctcatcgggaatgtcgtccgtcttgagctggtcgaacaaggtgcgggccttgtcgaggtcttgcagacctgccctgatgagatccatggagctgggtttgaacatcgacgattccataagattccactatatacgctcatgccctccgaatggggcatgagccgggaaggagtcatcgggcgacgctgatgagctccgaggaatccatatcgtaatcggccatggcgtaggaacggatggcggggtcatcataggtgttcatgtaataggtgttggtcttggacgaatatccgctggtgaacagcgtgcgttcgaactggccgtcgcccatcttcgccatgccgtccaccatctgcacggagccgagggtgtggaacaggcgagacacattggcggcttcatcgttctgctgcgggtaatgcgcgttggtgtaggccacacgaacgaagcgcgacggggaactcacgtcgcccgggatgccatgcatgcccacacccgcaccccaggcggtcaaggaggccttgccccatgaagtcggttcggccatctcgttgctgacgcacatgtagttgcgcagattttccatatggaagtcgaacgtcggctgattggtcagcacatcaacgtcatcatgatgcacgtgcatgccatcggccatctgctcgacgacgatgctgcgcttgccgtcgccgatgaaccagtgcagcagagactcctgctgtcccggcacgatctgggagacgagcgtcacgttcctgagcgccttctcgacctcgtcgacggagtcgaaattacgcgccacccacagcggaaattcgaacgtggcgacgttttccgtgccttcgaccggttcgtggacgaacgaggcgtagccggggaaattcaagccggcgatggccagaccatgctcattggcgcagtcgaaatacatcggcctatcggccatgaccacgcccacgccgatcaccgcgttcggcttcgccttgccgcccgcaccgaacaccgtgtcatagtggtagccgcgcggagtgaccaggatggtctccccatatgagaaactccagtcgagattacggccgaaataggtgttgccctcatcatcggagaaacggacaccagtgcacataacggacttccttccatcgctttggttggcttgtacgttcatgatatccatcggccgctgggggaactctgggtttcgccagcagattaacgtgcggcgcgacgcatggagatgcgccgcgccgcgatatgcgtcaaccttgcgtaccgaggaacaacggttccgtattgcgccagatacggcgcgtggtggcggggtggttcatcgaatacaggtggacgccgtccacgccgtgggccacgaggtcggcgatctgctcggaagcgtagaggatgccggcggcacgcagggactggatgtcgtcctcccacttgttcagcagggtgttgagcttgtccgggatacgcgaggcgttgcgttcggccatgcgacgcacggacttggcaccacgcaccggcatgatgcccgcctcgatcggcacgatgatgccggcggcgcgcgccttgtcgaggaaacggtagaagtcctcgttgtcgtagaacagttgggagatcaggtgagtgacgccggcatcgaccttgatcttaaggttttcgatgtcctggtccagcgagtcagcctggtagtggccttccgggtagcaggcgccgaacactttgaggcccggcttcacggagcggatgtatgacacgaggtcgctggcgtggttgaactcgcctaccagctgctcgccgtcgatgtagtcgccgcgcaatgcgagtacggcgctcacgccggcctgctcgaacatgtcgagggcctcgtcgattttcgccttgtcggaatacaacgcggtcagatgcgcgactgcgggaatgccgtactccttgctgatcgtatgagcaatgcgcgcggtggcggtgcgatccgaatgggtgccgtggccgtaggtcacggaaatgaagtcggggttcagcccctccaggccgtcgagggtgtcatagatggtgtccacgggagcgttgcgcttcgggggaaagacctcaagggtgaacatcggggaatgcatgctgatttccttacataaacccgagctccctcatacagagggagttcggtgatttccgctacttgtcgagcttggcgcgcacggccttggcggcggcgaccaggttctccaggctcggccaggtctcggcgttaccacgggtcttcagaccgcagtcggggttgatccacaccttcttgacgtccatcttgtcaaggatctcgtagatacgatcctcgatctccttctcggaaggaatacgcggggagtggatgtcgtagacgcccgggccggcctcggtctcgaagtgcgcgtcatgaatggcgtcgagcaccaccagatcgccacgggaggcttcgaaggagatcacgtcagcatccatcgcgtcgatgtcgcggatgatgtcgttgaactcggagtagcacatgtgggtgtggatctgggtggtcggcttgacggcggagtgcaccagacggaaggccggaacggcccagtcgaggtacttgacgtgccagtcggacttgcgcagcggcagcttctcacgcagggcggcctcatcgatctggatgaccttgatgccgacggcctcgagatcgagcacttcgtcgcggatggcgagggcgagctgcttggtctgctcctcgtgggtgatgtcctcgcgcggccaggaccagttgaggatggtcaccgggccggtgagcatgcccttcatcacgtggtcggtcttggactgggcgtacgcggaccattccacggtgatcgggttggcgcgggacacgtcaccccagacgatcggaggcttgacgcaacgggtgccgtaggactgaacccaagcgttcttggtgaacaggaagccgttgaggttctggccgaagtattcgaccatgtcgttacgctcgaactcgccgtggaccagcacgtcgaggccgatctcctcctgcttcttgatgacggcgtcgatctgggccttgatgaactcgtcgtaggcttccttggtgacctcgcccttgcgcagcttggcgcgctcggcgcgaatctccttggtctgggggaaggagccgatggtggtggtcggcagcagcggcaggccgagggcctcgcgctgcagggcctgacgctcctcgcgggcaggctggcgcacgtagtcggcgtcggacagcttgccgatgcgctcggcgacggccgggtcggcggccacgcgggtgccgtcgaacagagcctggttggcggcgagggcggcggagactttcttctcgtcctcggtggcgtcggccagggcggcgacttccttgagctcgtcgagcttctggacggcgaacgcgaagtgcttgaggtcttcggccgggatgccggtctcgccttcggtgctgaacggcacgtgcagcagggaggatgcggtggagacggccacgttggcggtgacctgcttcagggcgtcgaccaggccgagggaggtggcgtagttgttgcgccagatgttgcggccgttgatcacgccggcgaagatggcggtgttggaggccacgccatacttggcgacggcttcgaggttctcttcacggccttcgttgaggtccagtccgatgccgtcgaagccgagcaggttgacggtctcgtacacgtcggcgatgtggccgaagtaggtgttgagcagcaccttgacgttgcccttggcggacaggatcttggtgtacagggtcttgaagagctccacatcgcccggctccttgtcgagcacgaggtacggctcatcaagctggacccatgcggcaccgagttcgttgaatttggcgagcacttcgacgtagacggcggccacggcgttgaccaggcccttgtcgagctcgagttcggtggcttccggggtgcgggcgagcttcaggaacgtgtacgggccgatgaacacgggcttggtgtcgatgcccagcgccttggcctcgttgaattcgtcgaacggcttggtggagttgagcttgatctccgcggccgactcgacttcgggcaccagatagtggtagttggtggtgaaccacttcttcatcggcagggcggtcacgtcgcccttgtcgccctggtagccgcgggccatggcgaagagcgtgtcctcctggttatcgaaggcgagacgctcgtaacgcttcggaatcacgttgaggaggatggcggtgtccagcatctgatcgtagtagctgaagtcgttgctggggatgaggccgatgccggcggcctgctgcagcttccagtgcttggcgcgcagttcggcggcggtggccttaacggcggcgaggtcgttggcacccttccagtagccttcgatgatcttcttcagttcgcggttctgcccgatgcgggggaagccggagacggaagtcagagtggacatgaatcctccaatgtatgcgttcgtaacccgacttagggtagcaaaacatccggattccaccccttataaatggccgcagagtgtcgttatagatggaatttatatccgctttagtcgaagtctttcacattgatgaccgcgagcagttcgccgctgtgcacctgccattcgtcgaacggtttgttcgatcccatgatcacgatggatgcgggcgaaagtcccaagttgagcaggtcgagtcgttcgccgtcggagtcggcggaggcgagccattgggcgctgatcgacacagtcggctcgtggcccactatcatgaacacgcggttcttggccttgacgtgggcgagctcgtcgaacaccgcctgcactcccccgtcatacaggctgatgcggtagtcgacgatcggcttgtcgccaaaggtcttgagcatgcggtccagtgtctggcgcgtgcgggtggcggacgagcaggagatctggtcgggcaccagtcccagcgactcgatgcccttgcccacggccttcgcctgtttcagacctttgtcggtgagctcgcgctccgagtcacccttgtcgccgaacggctcggccttggcatgcctcatgatgatgaggatatggtcgtattttttcgctgctttggcgactttgctcagcttgatgcccatccgtggctcccttcacgaaccgtctgcccggtgtggcggtgtggtgttgcttccagtatagaggtgtgtgagcgttcacaaactcatcgtcgggcggttattcatgcgtgttgccgagttctcccacctgacggtcgaggtcgcgcaacaccttacgtagtttgtggtcggagatgtcgcgcagttccagttcctcgatctgcgcctcacgctgttcgtcggtgagcgagtcgatgtcggtctgcgtgtccttggtcacgcgatcgcgctttctgagcgcctcgaatccggaggccatggcgcgcgagataacaaggaaaccggtatggccgatcatctggtggtcggggcgtacggcgaggccttgggccttccatgtgcgttcgaacgattcctggatctgcggctcggtccagcaaccggccgcgcgcagggcttcggccagtcgactcatctgcgtggtggtagttacgtaactgaccaacacgccgccgggggcaatcacgcggtatgcctgctcgagtctgttccacgggtcgagcatgtcgagcatgatacggtcgaaccagtgttcgggcagttcggcggccacggagtcgaagtcgccggttttgagatcccaccagctgggggcttcaccgtaatacagcgtggcgttggcctgagccactttggcgaattcggggcgcagctcgatcgtggtcagatggccgcgctcgcccacggcgtccagcagattcacgctcatcgcgcccgagccggcaccggactcaagcacgcgcatgccggagcggatgtcgccgagctgaatgacctgggcgatgtccttcggatacatgatctgcgcgccgcgcggcatcgaaagcacataatcggccagtcgcgggcgcatcaccgcatactcccagccgccgatggcgcgcgacgatttccacggcttgttcttgtctttctcggggtagacctgattgacctgtgcctcgcgcttggcatgcacggtgaggatcacggtgccttcggtcttgccgatcacatcgtcatgcagaatcaggccatgctcggtctgcgtggagccgccggccacaagctgatcggtgatcttcttgcccttgcggtcggtgaactgcaccttctcgcctgcggtgagaggcccgcgcctcggctccataacttgctccttgtgtgctcggtgggtcaatcgctacaagtctaatgcatgtaagctcgttggtgaggtgatgacgatgcgaatgcagatgacaagccagatcgatgccggcggcaatgaccccattttcctgatgttccacggttacggcaacgacgaaagcgagatggtgcggattctcgacgccgtatatgcgccgacgcgagccgatgcggccccgtccgcaattgccgccgtacccagctatatctcgttccgtgccacctacgcgaggccctatatgggcggcaattactggtatcccgacggctgcggcgtggacgagcgccaacgcgaatgcgcggcggtcggggatgcggtggcttcactgctggatgcctcggcattcgcccatcgcaggaagatattgatcggtttctcccaaggcggttatctgtcgtatcgtctggtcaaggtgcatccgacgttgttcgatgccgcgatcctgcttagcccttcgttcatgggcgaggaacaggcggcgcttgactcccctacccgattcttcctggcgtatggcgcgcaggaccgcacgattccgatgcccgaccagcaaacggcccatcaggtccttgaacgggccgggcatctgacctatcgcgagtattccggcatggcccatgccatctgtgatgaggaaatcgccgatatccgggatttcctacgtgccatatgatgccggaatagcttcaatatggaatatctccgttcaaagaggtaccggtccaagtagaagcggctcaacaatggcggaatggcgttggccacgcccattcatcgcgcgatggttctgcgatcagctcaattcccctgccggctgatgccgcccttatgaccggtggccttgaatggcgtggcgcgtgccgtcaccttcggccccggcagattcgtactggtattggatcgaccgcggagcccggcagccggctgggactcggagcgtcgaccagtacccgtgatgttggtatgccgtttgccgtcgtgtgcccgtttctcatcagcaccttcagcctcgtcaatatcaatgcctttggcgcgcaaagcacgcgcccaccgctcatccatcgaactcctcacacatcccattcgggtttccacgtgtactgcatgtcgtaggcgctgggcgaatggcggcaggtggttcagagtgatcgggccgaatgcgacggcgtcaaaagtcatcgttgctcccttcgatggtgttggccaacaggttccaagggtcaggcacagcgcctttctcaacccgttcgccgccacgatggccggcagcttgcgttcacgggttcccctgcaatgcgcctcattatggcaacacgaaccgacaggtgccggctgcgcctaggatgggaaatcattgctacacgccgaaaagggaaggcgactgtcatgaggcatttcacgaccgacacgcatttcgggcatccactggtcacggtgttgcgagggttcacgacgttcgatccgacgcactcgcgctatgaggaggtgcggcgcgcatgatcgcaagaccgccgaggattgggccaaggaggagacgttcggcgcgggtctgacgtttcgtcaggtcgccgatacggatgcgcatgacaaggcgattgtggatcatatcaacgctgtggtcggcccggatgacgagctgtggattctgggtgatatcggtttccgcacatcgctgacccatctgaagaactgcctgcgagcgctcaattgcaagcatctgcatggtgtgatcggcaaccatgatgactggtggcgggaagaccgccccgcactcaacctgttcgaaagtttggagccgcacgatacggttgagattgagggactcggtacggtcaatctttcgcattacccgtatcgggaggatctggcatacagttggcccgatgatgtggcgaagttcagcggcaaggcgttgccgtttgacggtcgcagactgctgtatggacatacacatcagctttcgccagatggtgcacgcccggaggcactgaatgttggcattgacacagcattgaccgccgttgagatgtatgcacgctgaacacgcgcctcaacggcattggtctcgtcatctctcgctcacaccaacggattgccggcaagacgggtcaattcggcgttcagctcggggaaatgctcgttgccgacgaacggaccgtattccgtgccggattggaatgggcaccatgcctgaatggtcatatgcttcagccgtgaataaggcaggatgccaccggtgcaatcggctgcgggatcgctcgccatattgaattggatttcagcgtcgagcatctgtgtatgcattccgccgtgtcgaaatagtcgatgccggaatcatgggccacggccacggtacgtgccgcatcggcggcatccaacgcgtccatgcgcatcacgcccagcgccactcgtgacgcaatcatgccggattgtccgatttcctgagtcttcatagtgtctcatttctgttatcgcgaatcggcgaacgggcactgtccgcctcgttgccgggcagcaatctccattgccgcggcttatgtcaccttatcgcttgaagtgcacttgaaggcaactcgcaggcaggcagcgcgcgctgccgggcgcgtcttcgcgccttcatgtcttcgctgtgaccgagacatcgttgtgccgtaatcatgcctatttcttgtatgatgacctctatagcaacagagctagggggattccatgaacactaccgattcagccaaagtcaccgatgccaatgccggcgcaaacaatgccatccatatcccgcacaatcccacgcttgccggattggccacgctgacccgcaacgtggcgtacaagaccggggccgataacctggtgatggatatcatctcaccacaatccaccggcgatgacgatgaccgccgctaccccaccgtgatattcgtgcaaggcagcgcctggaccacgccgcatcgcgactacgagatcccgcagctctcggctttggcccgcgaaggctttgtggtggccacggtgaatcatcgcgatgcctcgagcgatccccatgacatgttccccgcatatctcgaggacgtcaaagcagccatccgctatctcagggcaaacgcgcgccaatggcacgtggaccccgaccgtctcggtatctggggcacgtcgtccggcggcaacacgtcgctgctggtggggttgaccgccgacgatccgcggtatgaggacggcaccaatgccgatgagagcgatgcggtgaagtacgtggtcagctgcttcccgcccaccgacatgcttgaagcagtcgacgcattcgacgatgagaccaatccattccggctgtattatttcggcccgttcgcggccgtggtgggcgcgacccatgagaccggcatcaatgccgaggtccgtcagcgcgcggctgacatgagcccctacctgcaggtgcgggatgaccaacagtatccgccgatgctcctgttgcacggtaccgccgacaccgtggtcccctaccatcaatccgtcaagatgcgcgaccggctggtcgagcacggcgtggacgcgcagctggtgctagtcgacggcgccgaacatgagtacgatttctggagccagcaggtcttcgacgtgatcttcgatttcattcgtgagcggagctgaacggtaagggcacacgggcgcgtccttgttataggttgccgagttctcttttagccaattttgttggagcccctgtctgcgtgaacatgccatgacagttctagactgtgttctaggactgtcaatcggcaatgtgtatgaagcgtgatgtgatgggtcagacggcgattgatggagttgagggacttaatagggccggtgaaatcagcagattcagcggttcgcggtcggtggcgttgccgcctataccattctggccgtgcttacttcgcgactgttgcaacggccgactaccacggaactgttgctcatcgtcatgtggatcacgctggaactatgtgcgctgactatgttgcacagttccggagctctcggggcaaccgccgccatcgttttggccatcatcctgctgattttgcttatcgccgacatggcctgctacctcgcctactgccatctgccacccatgcccgccttcatcgacggcaccgcaccactgattgccgtaacggtgttttctgagattgtcgtggcgatgattgtgtaggtccggggattttgtttgctatttcgtgttattcaattgtgtcccgaatatatatgggcactgccaaatttatgattccaatcttttcctgcggatcggcttaagataattgactctgaaggatttccaatcaccaaaaaacttgttgtccgtttcagtttgttccccattccggaatttctcacaggtcaattcaagggtgcatagaaaatccgcaacttgttcaagccggtagtcgcgtggagaagcgtcacgatagacaatggcatctatggagagtgcatactcaatcccgcctcgcagggcatcagtaactatctgttggccaccgtcgtaatacaccttgacagtgccataagaatggaaatccgaaagatgcgccaaaagtagattaacaatatcgcgtttgagttgcgcttcaaaacgttggcggttatcgtcaaaatcacttttacgatgcacaaacgtccgatatgtaatcggcagccgccgagtcatgataacgaataaacccagaagcctcttacgctccgataggctcatcccttcgtaagcatcatgcccggtaagcagcggcccagcatggaaagggacatcaggaagtccatagtcagccaacgactggcggtaccgctctaaggcaagactaatatccttagactggtcatgaaaaacaagagtaattaaataatattctgatcgtttaccccactcaccgctctcatcagcgaagatgctcaatacagacggcatcgcccccccgtccccgttgacaaaaaatgccgggggagccccccggcgacttggagcctttctcgtttccgagtaaagcaatatatttatagcattttcagcccctagcccgcaagccacaaacggctattccgctgacagctgctcatattgtagccacgccatctactgcaacatcatgtcacggtgcttgtgccaacggaacagacgctcacgatggcggttcagcgtgaaacgatcccacatctggtcctcggcccactcaaccatgccatcatgttcttcatcttcgggattgcccaaggtatca

SEQ ID NO: 3604 - DNA, 3784 bp, Unknown
  R85_18m  MAG No. k141_29795
caaggacgagctcggcatcaagggcgcgttcacctccgccggcttcgactccagctccgactggcgcttcaagacccacctggccaacctgccgctctactacgagttcaaggaagacaacatcacgagcagccggccaccatcaagggcacctgcctggagaactacaagaacatcttcgacctgtacatcacggactccaccaccgagccgtctcagctgagctccaagaccggcgatgacgcgaactccgagttcgcactcggcgaggccgccttctaccagaatggcacctgggcatggaccaatctgcagaacgccggcatgaccgccgagcaggtgggcatgatgccgatctacatcggcgacccggacgagcaggacgaaggactcgccaccggctccgagaactactggtgcatcaactccaaggcctccgaggccgaccagaaggccaccgccgagttcctcaagtgggtcatcacttctgacaccggcaaggaggcgctgagcaccgagatgggcttcaccaccccgttcaagaccttcgatgacatcaagaccgacaatccgctggttgcggccgccgtcgccgatcagaagtccggcaagacgcaggtcagctggaacttcaccatgatgccgtccgagcagtggaagaatgatctcggcaacgcgctcctcgagtacgcacagggcacccagagctgggatgcggtcaagaccgcgttcgtggacggctgggccaaggagtactcggccgcgcacgcgtcctgagtccgactccggcgtgaaagcgttgccccagtcggctgttagcccatgatcacgcaacgtcagcgaacggggtttcgataccatatcggaaccccgtttttacggcgaggtctggtcagcggctgacgggattcgtcagcccctcagcccttcgcctcggtcgtgctggaccgcaccagcatctgcgcgggaaagacctcaaacggcttggccgtcttccctgtctcgatgagatcaagggctttaagcgccgcgcatgtcgccatcgcgatcggatcctgccgcacggtcgtcaatccgatctcattggcatagaagctgtcgtcgtatccgaccatagacacgtcgaacggtacgcgaaggccagtgcgcgccagctggaacatgagcggaatcgcgataccgtcttcttggcatgcgatggcggtcggcatgcgatccatcgaaagcagttcggtggtcgcccggctgatgcggtcatcgccgtccgcgatgacgatggcggtcaggtcgataccggattgttcgcagacctgtacgaacgattcgtatcgctgctgcacgctgaagtgcagcgtcacggcacgatcacggcgtcggcgttgcgccgtatcggcagcatgtcgaagaactcgcggcgctcctcaatgctgaagatctggaagatcgacaggtcatagccgttcgcgtggaacacctggttcagcccttcgatgatcgaagcgctgaaccatagacgaatgtgatcgctcatcagcaaagccacgcgcagcgcgcggccggacttgagcaccatggccgagcgggaggatcaagaagttcagctcctcggcgatggccagcaccttggcccgcgtcgctttcgacacgagctccggtcgggtgaacgcgcgggagaccgtggagacggagacaccggccttgttggccacatctttgatgttgattcccatgccggtctcctttgcagtgagatgcgtctatgacacaacaataaacgcggacggcgtcgaccatgtgttgagcagtcgataagacaacgttatcatatgtgttattctgcatcggaaatgccaaaaatcagtatttccagcattttgccctgtgcttaggcagcgaggaaggagtgatggacacgctttctgtgacaacgtttgaccatcggtcatacgcgtggtatggtaaccttaaaccggttcgatttggtgctattcagcactgaggagactgaacaatcccaaattcggaccactcgcacgcagtagtgcgggtgtgctcaaggaggagaaagtaggctggcatgatttctatgactggcaaagcgattcgcaggtggtgggcactgttcgccctgcctacgttcgcagcattcatgattggtttcgtggtgcccttcatcatgggcctgtacctgagcttctgcaagttcagcacggtgacggacgcccagttcatcggcattgacaactacgtcaatgccgtgcaggacaaggagttctggaacgcactggtgtacacggtgctgttcacgatcgtgacgaccatcgtgatcaacgtggccgcattcgcgatcgcatacatgctcaccaagcggttcgcaggcaccaatatcttccgttcggtgttcttcatgccgaacctgatcggcggcatcatcctgggctacatctggctgctgttgctcaacggcgtgctggcccactggggtcgttcaatcacctactcgggtgtgtacggcttctggggcatggtcatgctgtactgctggcagcagatcggctacatgatgatcatctacatcgccggcctgcaggcgcttccgggcgatgtgctcgaagccgccgcggttgatggcgcaaccaacacccagacgctgttccagatcacgatcccgttgatgatgccgtccatcaccgtgtgctcgttcctgaccgtcaccggtggcttcaagatgttcgatcagaacctcgcccttaccaacggcgccccgtccaacagctccgagctgctggctctgaacatctaccgcacgttctacggccgcgccggcttcgagggcgtcggccaggcgaaggccgtcgtgttcttcatcatcgtggcgctaatcgccatcatccagaaccgtctcaccactagcaaggaggtgtccgcatgagcgagaaagtcaagcatccagtactgtgggccacgctgttcaccatcatctcgctggcttgggtgtttccgatcgtcctcgtggtgatcaactcgttcaagcagaaggcatacatcagccgcaacgcgttctccatcccgaccggcaaggcgttcgtcggcctgcagaactacacacgcggcatcaagcgcaccaatctaatcgagtccttcggctggaccgttgtggtcacggtcggcgcagtgctgctcatcctgctgtgcacttccatgtgcgcatggtggatcgtgcgtgtgaacaaccgcacggcgaagtccctgtacctgctgttcctgttcaacatgatcgtgccgttccagatggtcatgttcaccctctccaagatcgccgatatgctcggcctgaacactccgtggggcctgtggatcgtgtatctgggcttcggcgccggtctggccgtgttcatattcacaggcgtgatcaagggcatcccgcaggaacttgaggaatctgcaatgatcgacggcgcctccgtgccgcgcattttcttccaaatcacgctgccgatcatgcgcccgtccgtgatctcggtcgccatcctgcaggccatgtggatctggaacgatttcctcctgccgtacctgacgttggacatgcgccggttcaagaccatgtcaatcgccatccagtacctcaagggtggttatggctcggtggatatgggtgccatgatgggctgcctcgtgctggccatcatcccgattatcatcttctacctcgtgtgccagaagtacatcatcaagggtgtgatggctggcgccgtcaagggctgacgattacaagccgaagggg

SEQ ID NO: 3605 - DNA, 9084 bp, Unknown
  R85_18m  MAG No. k141_30076
caggacgagccagcagatgacggtcttgtgccagacgccggattcgcccggacccgcgccggcaacgccatcaccactattgcccccggcaacatcagcaacgtcggcaacgtcggtgacacaaacaccgtgcgccagcccgtcggacgatgcgccatccgcaccgccacggcataccgtcctcccgcgcgtcatgcagaccatcgaggctccgaccagcatggccagcccgatcagcccgtattcggcgatgacgctggtatacgcgcacatcgtccacaccgtgtccgcgttcacgccggccgcgaatcccgtggccgcgccgccgttcataccaagaccgtccagcagccgtccggctttggccgcgccggcccacaccgcattgatgatgttgcccgcgccataaccggtgagcagcgtccacggatgggtgagcaatccgcatatcggatcgaggctttggtagatccgcgcgaagaacgagccgtctccctcggccccgttctccgcgatggcggagagtctggaatccgccagcacacccagcaggcccagtgcgcatgcgccgagaatctgcagcatgccccggacgcggcgtgcgccgtcatgccaatcggtgcgcgccacaagggcgatcagcaacgccacgacggaatcgatgacgattctggtgccggcttgcatgagcaccgcgccgacggcatacgtgacgatgaggtcacgcagccgtttggcgtagatgcggtcgcgcccgcgcatgagccacatgagcggaagcagtatgccgaacaggtgcatgccgatatagctgggctcggcgaacaggaactgcggacggccgccgccccacaccgagttgtcgctgatgtattgccggtacatgaggtgcgagaaatagtcggtcaacggtttggcgcgcagacggatggacagccattgcacgacgcccactccgaaggaaacccagtatgatgcgatgagaatccgcaatggcgtacgccacggaatgcgtttgatgtcgaacgcaagggcgatcgcacccaaagtggcgagcacgcccagcaatccggtgatgctcatgaacgcggcgttgaggtggatgccgaacttcagccatcccgggatggacaggattatacagaccaccggtaggaggaacattggcaggtaccggttggctgcgatgcgcagttgccgccaattgcataggcagtacacggcgaacagcgccggactgattggcgaccagaacggcgcgtacaggccaagcgtggtgccgtccaccggaagaaaagcgacggccagcaacagccaaatgacgttgcgttcctgcgatgtcagaaatcgcaggaacgaccggtattgcggtcggccatgatggttgcccgcgtcgatggtgtcgttgcgtacgcatgcctggttcatgtgattctccctccccgtcaaccttactcgttcatcacgatgcgcggacgggggcatgctttccccgctgaaagtgcaatggcccgaaccttgacaaggtcgcaccgagcccccatcattggcacattgtgcgatctcgtcgcgactggctgacgaaataatgctggccgaccggttacattggttcggtacagtgacggcattattggccactggatcaagcgatttgcggcagaacgacgaaagcgacacttgggcgaaaagaggcaggcatgaccacgaatcgaccgctcattgcggtgactccgctgatggattacgggcgcgatagtctgtggatgctgcccggatatatggaggcgataatgcgggccggcggtacgcccatcatgttgccgctgaccgatgacgccgacattcttgcgcaatgtgccgaacggtttgacgcgtttctgtttacgggcgggccggatgtgggaccgatggttggtgcagcggcctccgccaccggccgtagcgaggtgctctctcctgagcgcgaccgaatggaatcaattctgctgccagctgtaatggcttgggacaagccgattctgggcatctgccgtggcattcagttcatcaacgcggcactgggcggcacgttgtggcaggatttgccaagccagcatccgagcgatatcgaacaccatatgaatccgccgtacgatgcgttcggacataacgtttccttggtgcccggcactcccctggcttcattgttctcggggcagactgagattgcggtgaatagctatcaccatcaggcggttcgtgatgtggcacccggtctcgaagtcatggccgtcgcgcccgatggcatgatcgaggccctgtaccggccggcaagccacttcctgtgggccgtgcagtggcatcccgagtttctctacaaggtagatccatgctcgcaggcgatttttgatgcgtttgtggggagttgccgataacagcaaaaggggctgctccggttttccggaacagccctttttcagcggtagcagtcagcagactgatttagtcatcggtgctggcttgccagcgctgattggcgcgtgcggagaccgccgtccgaaggcgaggggcgtacgaaggtacgtcgaacctgaggaaaggcggtatacgctccgccaatcagtgctggttgttgagacggtggtacatctcggacagctccagttccttctcgaactggcgagcggtggtgttctcgtcgatgacggcgagctcaacaccggcgatgcgggcgaagtcttcccaagcctcacgaccgacggaggtggtcatgcaggtgtggtgagaaccaccggcggtgatccagcactcaacagcggtcttcaggctcggcttcggctcccagacggcgcgggcgcacggaagctccttgagggagccctgcggctcaacgacgtcgacgacgtccatgagcaggcggaagcgttcgcgaacgtcggacatggagaccacgacggcgtccttggtgggcttgccggagaagaccaggcggaccgggtcggccttgccgccgatgcccagcgggtggatctccagcttcggcttggcgatggtgccgatggacggggaaacctcgagcatgtgggagcccatgtcgagctcgtcgccctcggtgaagttgtaggagtagtcctccatgagggaggcgccaccctcaaggccgtagcccatgacggcgccgatgcgcacgaggacggcggtcttccagtcgccttcagcggaaaagccccagccgtactcggacgggaagcgctgtgggccaacgcccggcagctgtggcagagcgccgaggtcctcgaaattgtcgacgccggcggtgcagccgttggcgcgcatcatgttgaccatcgcggcctcttccttggcggcgatgaacagggagtcgtacttggcgtccagcagagccgggtcgacgtcgtacttggccttgtagtcctcgataatctccttgacctggtcgtccttgacggcgtcgtacgcagcgacgagctcgttgacggcccaagtgttgatggaggcgccgaacacgcgctcggcctcggtcttgtcgccctcggtgacggcgacgttacgcatgttgtcgccccagcgcatgaccttcatgttgttggaggcatcccagccggcgcaggcgcgggcccaggtgccgaccttctcgacgacctcaggatcggtgtagtggccgacgacaaccttgcgcttgatgccgaggcgggagacgatgtaaccgaactcacggtcgccgtgggcggcctggttcaggttcatgaagtccatgtcgatggtctcccacgggatttccttgtggtgctgggtggccagctgcagcagcggcttggtcagcacttcgaggccgcgaatccacatcttggccggggagaaggtgtggcaccaggtgatgacgccgatgacgttcgggttggcggaagcctcgaccatgaactccttgacaccgtcggaggacttcagggtgggcttgaggacgatcttggccggaatcttgccggtgttgttcaggtagtcgaccatttcagcggagtgaatggcgacctggcgcagggcttcctcgccgtacaggtcctgcgaaccaacgccgaaccagatttccttaccttcgaagggattttccataaccatagggttacttcctttacttctttgtttatgggggtttgtttaagttttattcgccgaccgaggctcccctcagtcagctatcgctgacagctcccttcagagaggggagccaagacaccaccgtgctggcggagtcagcgctgatttgatgtgtgtgcccgcaaggcgcggaaggcgaaggcgtacgaaggtacgtcgagccttccgcaacgcggcggacactccatcaaatcagtgctggccgtagacgttctggtagcggtcgttgagcttatcgatgtcggcctggtcgatctcgatgatgtcaccgagctgacgggcggcccacatggtgtgagcgacttcctcggtcatggcagcggccttgacggcgccttcagcatccttgccgatggtgaaggggccatggttctgcatgaggacggccggggacttcgggtacttcttgagggtctcgacgacacccttgccgatcgcctccgagccgatcagacggaacgggccgaccggcaccgggccgccgaactcgtcgcccatcatcgtcaggccgcacgggatgttctgaccagtggcagcccaagcggtggcgtaggtggaatgggtgtgcacgacaccgtagacgtcgggcatgttgcggtagatgtaggcgtgggaagcggtgtccgaggacggggcttcggcaccgtcgaccacgttgccgtcaaggtcgcacacgaccatggaggacggggtcaggtactcgtagcgcaggccggagggcttgatgacgaacaggtcggcggtgtgcagacgctgggaaacgttgcccgcggtccacacgaccaggttccacttgatcagctgctggtgcaggttggagacgacctcacgaacctgcttgacctcggcgcgaacctcggggccgtaatcagccaaagttgccattattggttttcctttccactgtgatggatggacgttttttcaaaatctcaaggacctctctcaatagagggaggtcagaaaggcttacttatcttcgaggttgatggtttcgatggcagcgtgctcgatgggcaggcccttggtgaagcgggcgaagaagtcctcgaaaccaaccacatcggaagccaccggcttctcagtggtggactgggcgtccttgaacacgaaaccatcaaggaagtcagcgaggttgctgtgatcctcgttggtgttccacaggtagttggcgagcacggccataccccaggcaccaccttcggcggcggtggacatgaccttgatcggggtgttgaaggcagcggcgagaatcttctgagccaccttcggagtggtgaagatgccgccgtggcccacgagagagtcgacctgcacgtgctcctgcttggtcatcacgtccatgccgatcttgaccggggagaacgcggagaacagctgggcgcgcatgaagttgccgagggtcatgttggcttcggggctgcgggcgaacagcgggcggccttcaggcagaccggccaggaattcgccggaacggaacggatagttcagcaggccgccgcagttggcgtccacgtcgtcggcgatggccgcgcggaacaaggtgccgtacagcataccggcatcaaccgactggccgatggccttggcgaactggccgaacaggccgacccaagcgttgaggtcggaggtgaagttgttggcgtggctcataccggccagatcgccggccggggtggtgaccaagtcaacctcagggtggagggccttgagcttgtgctccagaaccaccatggcgaagatggaggtgccggcggagacgttaccagtgcgtacgcgcacggagttggtggctaccatgccagtaccggcgtcgccctcaggcggggcgagcacgatgccgggattcagggcaccggacggatcgagcagcttggcgccttcctcggtcagctcgccagccggagtgccggccacgagcggctcaggaagcaggttctccagcttccacggctgggctgcgacctcaggcagagcgtcgaacttctcgatgaatgcggtttcgtaagtgtgagtggtcgggtcaatcgggaacatgccggaggcatcgcccacaccgaggaccttctcaccggtgagcttccagtgcacgtaaccggcgagtgtggtgaagtaagccacctcggagacgtgctcttccttgttgagcacggcctggtacaggtgagcgatggaccaacgctcggggatgttgtactggaacagctcggagagcttcttgtgagcttcggaggtgttggtgttctgccaggtgcggaacggcaccagcagttcgccggcctcgtcgaatgcgaggtaaccgtgcatcatggcggagaagccgatgtggccgacgtgcgtgagcttctcgccataggcggtctcgacgtcgttggccatggaggcgtaagcggactgcaaaccgccccagatctcctcggtggtgtagctccacagaccatcctccaagtgggaggcccagctgtagtcgccggaggcgatggtctggaagttgtcgtcgatgaggacggccttgatgcgggtggagccgaattcgatgcccagcgtggtcttgccagcgcgaatcttctcggcgatgtgggcggcctgctcggccgcgttgtcggttgctgccatatctttcctttgccttggagcgccggcgttgttatccccttccttggggaggatgttagcgctcacaatttcaaaaaaacattgtaccgataacctgcattcgacacaacttataccgtgtcacgcatcataacggtttgataacagcgccaatttaccgccgaggagccggccccaaggaccgccgagcacgcacctcggcgggaatcagccccacgccgtgctgggtggtcaggaaggtcggctcgccgccctcccccagcaaacgcagcgtctcgcgcatggcggccacgccgagcccctcgaaatcgggatgcacggtggtcagcggtgggtacatgttatccacgccagacatgtcgtcgaatccgaccacgctgatgtcttgcggaatccgaagcccatgctcatgcaacgcgcgcatgatgccgacggcctgattgtcgttcgcggcgacgaccgcggtgggcaacgccgtgcctcgacgcccatactcatcaatgagatgattcatgtgcgcatatgcctcagaggcatcccacgtatggcagcgcacgatctgtgaatcgatggatcgggaggcggcgagcttgcgccacgcatccagtcgggtgtgggcgtcgcgccattcgttgggaccggcaaaatacagagccgatttgtgcccgtattcgcccagcaaggccaccactttggccattgcaccccactggtcgataccgaccagtgcagtgcgacgcttgttttcggtggagataaggcccaatccctcacgcacggtcatttggccgtgggtggcggtgacgatgacgcgcggctgagtgactcgcgcacggcaggcggcggcgaacatcacgtcggtcggggtcaggaagatgaaggcgtcgacgttctgctcgttgaaggtgtcgcacaggttgtcgaattcggactgcatgcacaaggcctcgtggaccatcatcacgctcatgaacagaccgtgttcgcgggccatggattcgatggatgagatggaggaaatcgggccgaagaatttgaggcctccggcgatcagccctatggtgcgcgaacggcgggaagccagtgcgcgcgcggagttggaggggcggtagccgagttggtcaatggcggcctggactcgcgcacgggtggcgtcggaaacgtccggcgagtcattgatcacacgggagacggtttggtggctgactccggcgagcttggccacttcgaacatggacggacgtttgcttggcttgcggctggtcaccatgctacctaacctccccgctggcggccggcacccatgcgcggccaggcttgtaccttaatcaatactgactttagcgcgtccacaacagttttgcgttagcgctcacactgtcgtgtcgcacgcggctcaggtcaggtgccatgagacacgatggagcggagtcggcccgtgttcggcgatggcggcacggtgtgcggcggaaccatagcccttgttatgagcccattcgtaggcggcgtaacgtgggttgctttgcgcgaggtcgaccatcagccggtctcgggtcactttggcgatgaccgccgcggtggcgacggtggcgcaatgctggtcgcctttgactttggtcgttatatcggctggaatcggcacgtccggcgcgtcgaacgtgttgagcgccttggtgatgtaatcgctcggcccgtcgagaattccggcgactttgggcaggacgcgaacgctttccccacaatttccaatggattcccctacggagtctcccggacgaccttccacaatctcccccgcagccttttttgccgtcaatccccctccaagccgtaagccaagttcgcgttcgacttggctgagcgcgcgcagggcggccacgccgagcgcataggtgatgccccattcgtcgatctcggtgttgctggcctggcctacggcgtaggccgcgcaccagtcgcgcagttcgtcgaaaatcgcctcgcgcctatgttcggtgagcatcttggagtcggccacgccgtccggtacgccgaggtaggtccgcccggacagttcggcggaatcatcgccgtcaagcggcgccaaatcacaggcccagatggcggcgcacccgaccatcaccggaccggcgagcgcgccgcggccgacttcatcgaatccagtaataaggtcatagccctgggccgcaaggctgcgttccaagtcaagtgtcggggtaatcatgcgcggctcccatcgtctcacaatggttaggattcagacggtccaggttcaaatggttcaggattcagacggcccggaactcaatc

SEQ ID NO: 3606 - DNA, 4093 bp, Unknown
  R85_18m  MAG No. k141_30475
caggcacatcgagcagccggcgttacgccattcggcgccaaagtccttgaacaccttatcgaggccttccttctccgcctgcaaacgcacgcgggaggaggccggcaccaccagcacgcggtggatgttctcggccttgcggtggcccttcataatcgcggcggcctggcgcaaatcgtcgatacgaccgttggtgcacgaaccaatgaacacggtgtccacggcgatgtccttgatcggcatgcctggcttcaaacccatgtatgtaatcgcacgttcggcggcggcgcgcttggtggcgtcggcgatcttgcccggctccggcacggaggcggtgatcggcagaccttggccggggttggtgccccacgtcacatatggaccgagcttggtggcgtcaatatccaccaccttgtcgaatacggcatcgtcatcggtcttcagcgtcttccagtacgccacggcctgatcccacagctcgccttccggcgcgtgcggacggcccttcaggtactcgaacgtggtctcgtccggcgcgatcatgccggcacgcgcaccggcctcgatggacatgttgcacacggtcatacgttcgtccatggtgaggttgcgaatcgcctcaccacggtattcgatcacgtaaccctggccgccgccggtgccgatcttggcgatgatcgccagaatgatgtccttggccgtcgcgtccgcgggcagcttgccgttgacgttgacggccatggtcttgaacggcttcagagacagcgtctgtgtggccatcacgtgttcgacttcggaagtgccgatgccgaacgccagcgcgccgaacgcgccgtgcgtcgacgtatgcgaatcaccgcacacgatggtcatgcccggctgggtcaggcccagaatcggggcgaacgcgtggacgatgccctgatcggcgtcgcccagcgggtgcaggcgcacgccgaactccttgcagttcttctccaaagtcgtcaactgcaacgcgctcgtctcatccggggtcgggcgatcgatatcaacggtcggcgtgttgtgatccgcggtggcaatgagctgatccacgtgacgcggcttgcggccggccaagcgcaggccctcaaacgcctgcgggctggtgacctcatgcatgagcatcagatcgatgtacagcaaatcaggagctccgtcgctgcccttgcgcaccagatgatcggcccagaccttctcggccagtgtcgttcccatagtgattcctccaaaaaattccgcgcgaggtattgtgttcgcgccttgttcgtggtattagcctatgtgcttgcgatgggcccggccatgagcatgccggatattgagatacggtcaaatgatggcctcaatatgactcggacccgactcgaacatgacctagtcatgactcggttccgctccagacatgtctcttcggcatccacgaacgccctttcaacttcatggccaccctgtgagacacttccccaatttgccatttcactatgtgagatggcataatcgcccttattatgactgattcccgggaagaaccattgaacaacagcttgaccgagtccgagccggttgaagacaccaccgccaaggacgatggggaaatccattccggcgttggcgtccttgataaaaccgtaaagattcttgacgcactggaatccggcccgtctacgctgggccagcttgtggccgccaccggtctcgctcgaccgaccgcacatcgtttggctattgcactggaacgccaccgtttcgtactgcgcgaccagcatggccgattcgtactcggctcccgtttcgccgaacttgccgccgcagcaggcgaggatcgtctgctgaccgccgccggcccgatcctgcagaccctgctcgatcgcactggcgagtctgcgcagatttaccgccgccaaggcgatcagcgcgtgtgcatcgccgctgtggaacgcacctccggcctacgtgattccattccggtgggtgccatgctgtcgatggaagccggttccgccgcccagattcttctggcttgggaggattccgaccgtctgcaccagggattgcgccacgccaagttcaccgccaccaagctggccgccgtacgcaagcgcggctggtccgagtccgtgaacgaacgcgaagagggcgtgtgctcgatttccgccccgatccgcaacgcctccggccaggtcatcgccgccatctcgatttccggcccgaccggccgcatgggtgccgcccccggacgccgctatgcgccgctggtgatggccgccggcaagtacctcaccgaagcactggtcaaagccgttcgctgaaacataccagtcaatccaaccgatagcccaaccggcagaaatcccgcgtcacaacgaaagagacgcgggatttctgggctataggaacaagagtgtggtgttcgcgcaggatgggcaagatcgggtagccggcggtggcgatggtgacggacggtccgaacatcgtgtagtcgccgattcatatctccgcgtcgtcgaccatgctcatgaacgcgttgatgtagatgactttgccgaggtgtacgcgacggcatccgttgctcgcatgcaatggcgtttcgatgtgcacgccgtcgccgacttcggcgcacatgtctttgagcagttcggcgcgccgctcccgttcggtgggtttggtctggttgtattcccatagtttgttctgccatgcgagctgtccgtccatgatggccgggtcgtcgtagtggtatggcaatcccgcatccctgcgcgccgtattgtccatgtcgtagtcccttccgtatcggttcatcggtctcggcccatcccatcgtcctttgttcgggccggaacgcacacggcctttctcaccagcatgaggccgcccgcgctgaccgattcccatcgcaacgtcgccgcacgcccccacggttccgtttcatcgaggtcaaggccgaagacgggttggacatgcttgaagaacttggaggcttgtcggaggaagccgagagccgcttgacgaagctgaatgagaccatatcctcccccgatatcggtttgggttcggattaccatgtcggccctgcgtatttcctgaatctttccaaatccgaatccacggcgaaagcgttcgatgacctttggcgtgatttcctgcaaccgctattgcacgattacgtgcgcggcatgtataacgaaacagaaatcatggagaagctgaaagcggcatatgaagatgcttcggattcgccgccgcgagtgctcgcgcatgggcgacgccgtcgtctccctgctcgactcccccatgttcgcaggccgccgcaagatcctcgtcgggttctcccagggcggctatatgtcgtatcgcatggtgctcgagcatccgcacgtgttcgacgcggcgatcctgatgagcccgtcgttcaagggcgaggagtcgacggacctcaccggtttcgactcccccacccgtttcctgctcttgtacggctcgcgggaccgcacgattccacctgcggaccagcagaccgcgcgtcgcgtgctcgaggccaccggccggctcgaataccgcgagtatcctggcatgggtcagccatcgtcgacgaggagatcggcgacatccgcgccttcctcggtctctagccggttccggacggaccgcccggttccgctcggtccgtccaccccgccatccgaccatccgtcacacacgtcacgcacccgtcaccgcccgcaatcggtgtcggcggcacgcgtcgccgccgtcacacgccgaggctgcgtccgatgacgccgaggaacgtttcggcgccggcacgcacgttctacggttgcacaggtttcccgaattgcgggtactccaggccgtgcaggtgatttcgacgtgaacggttcccgccgcgtagactgttttctccggaccaggcgaacctcctgcgtcgcaccccgaatccgtccgcaacggctggcatcgccatgccggaccttgatccaatcacacccgcacggcatggcgcacgggcccttccggggcgcgcttgcgccgacgggccgccgcaatgccgacgcagccgcacagc

SEQ ID NO: 3607 - DNA, 33182 bp, Unknown
  R85_18m  MAG No. k141_30758
aacatcatattcgaccagctgaaccattcgcgcgtgtacttggtcggatcatccacgtcgatgccttcgtgcatgagatgtgtaccggcgtcggtggttacaagacggtcgaggatatgcgccttgaagtccttgctgtcgctggtcatcgcctcgatagacagggcgatgggccacacatagcgcggcggggtgtgcggtgagccgatgcccttgagatactcgccctcgtaatagtacgggttttcgtcgctgagcagcgtgcgtcgggtcgccagatacgtcggatcgtccggtgcgcagtaccccaagtaaggggccgccatcaaggagggcacattgctgtcgtccatgatattgacgtgacccaggccgtcggtctcgaacgcgtaaatcgtctcgccattgcggttcgtcgttttggcgtgggcttcgatgccttcggtgatggtgcggcgcagctcgccggcacgggcggcgatatcggcgtcatccagaatctcaccgccgaagatgcgttccagatagcccatcaccacggcggcgaacatgttcgagggcaccagatagtggtaggtgcaggcgtcgtcgctggggcggaagccggaccaggtcatgccggtgtacgccaccggcgaccccttgccgtcattgctcagcgattcggtggggatgtccgtgtcgcggatgaagaaatacggggagcgttcatgatgctgctcggtctcgaagacgtcaagaatcttcttgacgccggcaatgaattcggcatcgaagtgatcggcgttgccggtgttcgcatacagcatccaagccaactggatggggtagcacagcgaatccacctcgtacttgcgctcccaaagccaagggctggagaaatcggaccggtcgtccttgtcccaggaggcgccgttcggttcctcgttgaaggcattcgcatacgggtcgatgatgatgtagcggaactgttgccgtatcagaccggcgatcaggttcgcaatatcgctgtcttcggcggcaagggccagatacgggcgcaattgcgcggtcgaatcacgcagccacatggccgggatatcgccggtaagcaggaatgtggtgccgtcgtcatgccgtttgaccgtggtggtcagggtgtcggcaaagcaggcattgaagttctcggcccaggcggcgtgttcggtgccacacaggtccgtgatgtgctgcatgaaatccgagaccgacttcggtatcgcggtggtcgtcataaattcaacttctttgtttgagggatatacatatcaagggaacagcattattctaaaccgctttagttcatgacacgcgaaaggatgtgaagagcatgagtgtgagcgcaccatatgaaaaaccggtgagatttcctgttcggagaatctcaccggttgcgatcagtcgattcgtgaagtcgcacgaatggcggataaggggatgggtggattacttgccgatttcagccagatagtcgggcatctcggccgggtactgcggccaggcaccggcctgggtgcagacgtaggcggcggtgttgacggccttgcggtgggcttctgccagcgtgtcgcccagcaggatgcgggcggtgaaggtgccggagaaggagtcacccgcacccacggtgtcgttcacctcgacgtgcggagtgtccagcgtggagacctcgcccttgcgggagatgatggtggagtaggcggagccggcggtcagaatcacgtagtcaaggccgaattcctcgatgaaccagcgggaggcgtcttcgccggaggtgccgcggatgtcgaacatgtcgcgcagcagcaggagttcctcgtcgttgatcttgaagacggtggccgccttgaggagttcctcgatgaggtccttggagtagtggtcgccacgcaggttgatgtcgaagaacttcatcgcgcccggcttggtgtgcttgagcagctccgtgatggtggcgtgcgattcgggggagcgcagggccagggtgccgaagcagacggcgtcagccttggagaccacgtcgatgagctggcgggtgtagaggatgtggtcccaagccacgcccttgacgatggtgtactccgggatgccgttcttcagcgcgacctcgacggtggaggtcggccaggcgttgcgctggatgacggtgttgatgccggcctcgttggccttggcaatcagttcgtcgccgagctcatcctcgccgaccgcgctgatagcccagccttcggtgccgttcttcatcgcgtggtaggcgaagttgacgggggcgccgccggctcgcttgccgctcggcagcatatcccacagcagttcaccgaggctcagaacgatcggggtagtcatggttggtttcctttcctttgtttcttttaccgggtgtttcgtatggaacatcttgtgatgtcggcgcttggtttaggagacgtcgaagaacaccgaggggtgttcgaggaattgggtcaccgccactgctgcggcaccggagaccgccgcgtcggcggacagggtggataggctgatggaagtggaggcattgatttcggggatggcccgttcggccaccgtggcgcgcacctcatcgagcagtatcgggccggcttcggacacgatgtcgccgatgatgatgtgctcaggattgtatccattgaagatggtgacgcatccgtagccgacgtatcgggcgacttcgcggacaatggcgattgacgcttcgtcgccgtcgccggctttggcgaacagggcgcgggcggcttcggtgtgggtcatatcggccgcgccgggaaccacggtgccatcggcgatgagcatgtcgtgaatggcgggggtggagcagtagcgttcaaggcagccgacgttgccgcaatcgcaggggcggccgttgacgtcgatggagatgtgtccgatttcggtggcggcaccgaggaagccgttgatgagacgaccgttgtcgatgacgccgaggcccacgccttcgccgaccagataataggcgaggttgccgtcggcgtgcaccgacgggtcgaagagataatgtgcgagggctccggcgcgggcgtcctgttcgatgaacacaggcacgcggaaagcggtggcgaattcgtcgatgaagttgattttgcgccagccctgcatgctggacaccacggcggtgcggcctacgttacgcaggtaggggccgggcaccgccatgccgatggccacaatggacgggtcgttgtcaagcagttgttcgacgcgctggtggatggtgacgatggtgccgttgatggtgttgccgtacaccgtgggcaggttttcaaagctcagggtgttgccacataggtcgaacacgccgatctgcaccagcgagcgggcgaatttgatgccgatgatgcggaaccgcgtggtgtcgagtttgagaccgatggaacggcggttcttggaaccttccaaatcgccggtctcttcaatcatgccggcctcgataaggcgtgcggtgattttggtgatggccgcgggggtgagttccagtgccttggcgatttgcgcgcgggagctgatgccgttgtgatacaggtgcttgacgatgcgggagcggttggattcggagacactggcttgggaagtggcatgggtggtgtttgttgccatcggtcttaagtcctccttgtctgcaccgttgcgagttgttccgctcgtctttgaatctgaacttgattaagatattaacgctgttaattgattgacgcaatcaatatgtcattcggtgtgtcgtgcatgtgagtgtcgtcttgggggaatttgttaagatggttgtcaatagtcggatgcacactgatatcaagcgaaacgttcgatgaagaacaggggaggactgatgtctgaaaacactatgaacaatctcaaaatcggtgttgacgtgggcggaacaaaaatcgaagctgtgctggttgacgcaatgggcacggtattgggttccgcccgtattcccgccaggcatggcaacgatgccgtgatcgaagacatcgtcgctgtagcacatcaggcagcgggtgagcgttttgacgaggtgagggccatcggtgtcggtaccccgggcacggtggattcggccagcgggcatgtgggcaatatcgtgaatctcgacgtggtctcgctggatatggggccgttggtctcgcagcgttcgggcgtgccggcccatgtggaaaacgacgtcaatgccgccgccgtcggcgcggccaccgtattgggcggtgcggacggcatggccggtaccattgcgttcctgaacttcggcaccggactggctgcgggcatcgtcgaaaacggcgtgctgatgcatggctatagcggcgcggccggcgaaatcggccatatcccagtcgaacctcatcgcctcaagtgcccttgcgggcaatacggatgcttggaaacagtctgctcgggcgcatccgtggggcgtctgtggcccaacgccgacccgccgatgcccgacctgattcgtcgcgcgaaaaagcgggaggccaaggccgtcgatgtgctggacatggtagtgcgcgccatcggcgacaccatacaaatcctggctcagtccgttgatccgcgactcatcatcttgggcggtggcatggccaaaaccggcgaaccattggtcgaggtgatcacggctgagctgcgccggcgcgaatcgcaatgccgattcctcgaaacgctggacctgccggcccggctgcgtctggcacctgtcggccaaccagtcggagccatcggtgccgccatggcggcgtagcctggcatagtgccggggcatgggagatgaggcctcagatttgtctccgaggccccatctcccacgcagtcctatatcgctttatgtcgtgctgtgccgcgcttggtcttgcgcgtttcgttgccggggtgaccggcttttatttggccaagtgttggaagaccacggcgatggcctcgccctgtacggtgatgtcaggtccgcattcgcagcgccggattaccgtgtgtttgtggaaggacgaggatgtggcggcatccagatattgctgggccgcgccgatgaacgtcgcgttgatgatgttcggctggccatagacgcatacgtctgccatatccaaaaggcccacaggcatggccagggcttggccaagatagcggcccgcccgagcaaggataccctgatgctgctccatgtctgccgcgctgagttgcttcttcaatgcggttccggaaatcatcgtctccaagcaaccgtgcttgccgcaagggcacagcggcccgtcaagatcgatggaaatatggccgagctcgccagccgcgtgcagttcgccgattaccggcgtgtccgagagcagaatcgccgaaccgatgcctctttcgatgcgcacgaaaagcatattcggcccgccttggccaaagaaacgttcggtgagcatggctgcggtggcgtcgttgctgacgtttacttcaagtccgaaatgttcggcgattggcgtggacaggtcgagattgttccagccgcgcatcgtggaggagcggaccacgccgttgtctaccacgccgggggaggcgactccgatgccgatgacctcgccatcggacatgcccagcatcttctcaatgagctcgatgatcacatccacggaaacgaatgagccggtgttcagggtgacttcggcgtgacgcagcggctggccgagcagattggtgactgcgccgtgcagcaggtgctcctgcgtcaggtcgatgctgatgatgcgcagtcgatcgatatcgatgctcagcagtgtgcctcgtttgcctttgccgccgctgggtgcctgaccggtctcgcgcagcaatccttcctccagcatccgaccgaccacatcggaaacggccacgcggctcaatccggtgcgtcggccgagctcggcgcgcgaatactggttggtggggaacaacaacctgaagataagttggcggttcttgcggcgcacatcggcgggggaagccttggccgcatggtcgtcggtcgttgtgttgagaccgagatatgacatgtttcctcctacctgatggtgagcgagtggacggcgattgttgttccatacacagcttagacggtgaagcgcaatttcgtcgttgaaactgttatgaaacttcactaataaattccagtgtacctgtgtgaagcgtcaggaaacaccgtgagtgttcatgaggtccaaaattgttactatcattaacaaatagcgaatcaccaatcggcgctacgccgaacggtggttggaacgccgcgcggcacccggacgtgacaaggatgttgccattatccgcaagacgggcggcggtacagcgactcgcatcgggcgggccgcacggaactggaggaaaccgatgccggaaatcatcattgtcaagaacgaagccgaggccggcgagatctacggccgttgcgtggcggacctgatcaaagcaaagccggacgccgtgctgggcctggccactggctccagcccgctggccgcctatcaggcgctcgccaagatcgtcaaggacgaggccattgacgtttcgggcgtgcgtggtttcgcgcttgacgaatacatcgggctgccgctgacccatcccgagtcctatcatgcgaccatccatcgcaccgtggtcgaaccgcttggcctggacccggccaaggtccatgtgcccggcgacgtactcaacggcactccgctcgaagacggcgacaaagtcgcgctggccggcccggcctatgatcgtgccatcgaagccgctggcggcatcgacgtgcagatcctcggcatcggcaccgacggccacgtcggcttcaacgagcccggttcctcgctggcctccggcactcgcgtcaagaccttggccgaacagacccgcatcgacaacgcgcgcttcttcgacaacgacatcaaccaggtgcccacccactgcatcacgcagggtattggcacgatcatgaaggcccgtcacctcgtgctgctggcgttcggtgccggcaaggccgaagccatcgaggagacggtggaaggcggcttgtccgcgttctgcccggcttccgcgctgcagatgcacccgcacgccacgattatcgtggatgaggaggccgcctctcgtctgcgccacaaggactactatcgctacgcctacacccacaagccggcctggcagggcatctgagttatcgtgtgctggcttccctctttgtgtgaggggagctgtcgaatgtaatgagactgagggtggttatcggcggcggcatatgtgtattgcttcccgattggaccaccctcagtctcgtttcgcgagccagctcccgttggcgggagcgcatgagcggtaaggagaacaacatgtctgataggaacgagatagtctcgcgcgtgaccgcggcactggagggcaagccggctccggtggcgattcgcaacgcgcgcaaggtggatgcgtgcggcgaacggcgcggatattgggtcgtctccgatgccgccggcgtcatcgtggcggccggcacgggggaggaggccttcgagcactactgccgcacggtggggctcgacccggccgatcgcaacgcggtcatcgacgccgaaggccgtattctgacccccggctacgtggacatccacgcgcacggcgcatgggagaagagcttcgacgacgggtcggatggcatcgatgtggcgcgggccggccacgccgtgcacggcaccacgcgccaggtgctctcgctgatcaccaatcccgtggacgtgatctgccggaacatccgcaccgtccgcgccaagatggagtccggccgccccgacatcctaggctgtcatctggaaggtccgttcctggctctggcccgcaagggcgcacatgacccggaatgtctcaaggatccggtacccgacatcgtcgacgacatgcttgaggcttcaggcgcggcgaacggcaagattggctgcatccgccagatcaccatcgcccccgaactaccccacggcatctccgccatccgccagttcgccgctgccggcgtggtgccggccgtgggccactgcgacgccgactacgagaccgccaaagccggcttcgacgcgggcgcgggcatcatgacccacatgttcaacgcgatgaacggcctgcaccaccgcgagcccggtccgattccggccgcggtggaggatccgcgcgtcaccatcgagctcatcaacgacggatttcacgtgcaggatccgatggtgagcctctccttccggttcgcgcctcatcgtacggccttcgtaaccgatgcaatggccgcgaccgactgcccggacggtgcctacaagttgggtgcactggacgtgaacgtggtcgacgggcatgcgcgtttggtttccaacggcgccatcgccggctccactctgctgctggaggtcgccgtgcgccgtgcggtgtgcgaactgggcttgagcccggtggacgcggtcgaggccgccacattgacgccggccaaggcgttcggcttcgaccggccgaacccggtcaccggggtgcctatcggcctcatcgcccccggcttcgccgccgatttcaaccttgccgatccgaccgattggacggtcgaacaggtgtggtgcgcgggccgcaagctcaagtagcagtaggccgaccggttgacgaatggaaagcattcgtctacaagcatgttcaaatggtgacatgatagcatgttcatctcaccatttgaacgttattcacgtcgtaatacaagaatccgtaatactgctcgataccgcataaaaccggccatggtcgccacaagcgaaacataagtcgatggctgtggaaacgcaggggtaacacatcctcaccatagtcaggcggtaatccacgcccgcagtgatggcgtggaaacaagttatgagagaggattcctgttgaattccaagaagattctggccgccgccgtctccgtggccgccatcgcatccctgaccgcctgcggcggtgtgaaggatgacaccaccgcaggcgccgattccggcaacgccatcaccatcggcaccaccgataagatcaccagcctggaccccgccggctcctacgacaacggctcctacgccgtgcagatccaggtgttcccgttcctgtatgcccaggactacaacacctccgagctgagcccggacatcgccgccgatgacggtacctggaacgatgacggcaccgaattcaccgtcaagctcaaggacggcctgaagtttgccaacggcaacgacctgaccgcttccgacgtcaagttctcctacgaccgcatcaagaagatcaacgacccgaacggcccgagctccctgctcgccaacgtcgaatccgtgaccgctaaggacgacaccaccgtggtgttcaaggattccgtgcctttcgacgtgactttgaagcaggtcatgtccagccccgccggcccgatcgtcgatgaggataccttcgacgccgacaagctcaccgacgccgacaccatcgtctccaagaaggccttcgccggcccgtacacgctgaccgccttcaagatcaacgagtccgccgcctacgctaagaacgactcctacaagggcctgaccccggccaagaactccgccgtgcaggtcaagtacttcgccgacgcctccaacctgaagatggccgtccagcagggccaggtcgacgtggcctaccgctccctgagcccgaccgacatcgaggacctctccaaggactccaaggtcaaggtcgtcaagggcccgggcggtgaggagcgcttcatcgccttcaacttcaagattcagccctacggtgaatcccagcccgacgccgacgctaacaaggccaaggccgtgcgccaggccgtcgccaacctcatcgaccgcgaagagctctccaccaaggtctacaagggcacctacaccccgatgtactccttcatcccggacggcctggccggtcacgatgacacgctgaagtccgcctacggcgacggcaacggcaagccgagcaccgagaaggccaagaaggtcctcgccgatgccggcgtcaccaccccggtcgacctcaagctccagtacaacagcgaccactatggctccgcctccgccgacgagtacgcggccttgaagtcccagcttgaggaaggcggcctgttcaaggtcgacctgcagtccaccgaatggacccagtactccaaggaccgcgtggtcaccgacgattccgacggtgtgtacccggtctaccagctcggctggttcccggactactccgacccggacaactacctgtccccgttcttccgcgacggcaacttcgtgaacaacggctactccaacaaggaagtcaacgacctgatcgtcaagcaggccggcgagaaggatgcctccgcccgtgaggacatcctcaagcaggtccagaaactcgagaccgaagacctctccaccatcccgctgctgcagggtgcccaggtcgccgtcaccggcacctccgtgaagggtgtcaccctcgacgcttccttccgcttccgctacgcctccgtcaccaagggctgatccagcatgagctcccctctttgaggggggagctgtctggcgacggcagactgaggggagcccaactcgtatgactcccctcagtcggcttcgccgccagctcccctcggagaggggagcctgtattgctttatataccgattaccaacaccaaggagcatcgcgtgtcagacagcgccacagcgacctccagcaccactccggcgaaagccaagacgaagaagaaccgactgtcaggtagtttcttccgcttcgtgctgacgaggttcctcctcattatccccaccgttttcattctggtcaccatcgtgttcttcgtgatgcgcgccaccggcgacccgatttccgccgccctgggcggccgcctgacacccgccgaactccagcagcgcatccacgcggccggctatgaccgcccgctgatcgtgcaatacgtcgactatcttggcggcctgctgcacggcgacctcggcacgacgctgaccgataaccagccggtgatcagcatccttacgcactacggcgccgccacattcgaactggccttcctcgccctgatcgtggcgctgatcgtcggcatcggcctgggccgactcgccgcccgcaaacgcgaccgtgccgccgacgccggcatccgcatcttcgccatcctgtgctacgccaccccggtgttcttcctcggcctcgtgctgaagctcatcttcgccgtctggctcaacatcctgccagcctccggccgctccgacctgaactccgaaatgcagttcacccgtctggtatcgccgaccggcttctacatcatcgacgccatccagctcggcgacatgaacgtgctcgtcgacgtgctgcgccacgccgtgctgccggccgtcgccctaggcctgctgaccgccggcgtgttcatccgtctggtgcgcaccaacgtcatctccacctacaattccggctacgtcgaggccgcccgctcgcgcggcgtctccgaaaagcgcctgctcaacaagcacgcctggcggccggccctgatcccgatcatcaccgtcatgggcatgcagatcgccctgatgctcgccggtgcggtcctgaccgaaaccaccttcgaatggaagggcctgggcttcatgctgtcccagtacctgaaggcccgtgacttcgtggccgtgcagggcatcgtgatccttatcgccatcatcgtggccgtcgtcaacttcctcgtcgacgtcatcgccgcgcttatcgacccgagagtgaggtactgagatgaccaccgcatcctccgacaagatcaccgtccccggtgacgaccgcctcaccaagctcaacgtcagcaccaagacgccgttctggaccaagattccaatcatcaaggaactgcgcgtggcggtcggctggcagaagggcatgctgatcaccggtctcgcgatcaccgcgttcttcctgctcgtggccctcttcgccccgctgatcgccccctacggccacgcccagatcaaggccgccgacggcacgtccttcccggcgcaggccgcgccctccgccgaacacatctggggcaccaccgccgccggattcgatgtgttctcccgtgtggtgtggggtgcccgcaccgccgtcatcgccatcgtcgtggccgtgctgctctccatcttcgccggcgtgctgcttggtctggtgtccggctactacggtggctgggtggaccgcttcctggtgttgatcgccgacgccgtctactccttcccctcgctgctgctcgccattctgatggccatcatgatctcccacggccagtccggcctgtggagcggcatcctggcctccggcatctccatcaccgtggtgtacatcccgcagtatttccgcacaattcgcgccgaagtgatccgcatcaaggaatccgcgtatgtcgagtccgcgcgcgtggtcggcgcctccacctggcgcatcatgaccaagcacctgttcaagaactccacccgcacgctgccggtgatcctgacgctgaactcgtccgaagccatcctgaccctcgccggcctgggcttcctcggcttcggcatcgagccgaccgccgccgccgaatggggctacgacctgaaccgttcggtttccgacgtgaccgccggcatctggtggaccgccgtgttcccgggcatcgccatcgtgcttatcgtgctcggcatcacgctcgtgggcgaatcgctcaacgatctggccgacccgcgtctgcgcgcccgcaagtccgccggcgaagtggtcggatcgatcgaagacacgtccgtcgacccaaacgagaagccgtccgcacgcaacgaggtgatcgccgaactcgacgcgaacgtcgacccgccggccaccgtcaccgaccatgacccgaccatcgtcgcctccgaatggaccggcgaaggcaagccggaaggcaaggagtgagagatgagcgaagacaacaagaatctcgccgatatcaaggacctgtccgtctccttcatgaccgacgccggttccatcaaggccgtcgaggacgtgaacttcaccattccgcgcaagaccgtggtcggcgtggtcggcgaatccggttccggcaagtccgtgaccgcgcgctccatcatcaagctgctgccggagacggccaccacctccggtgccgtctacctgtccaagcgcgatggctccgattcgctggacgtgctctccctgagcggcgaacagctgcgcgaagtgcgtggttccgaggccgcgatggtgttccaggagcccaattcggtgctgaacccggtgtacaccatcggctggcagattgaagagggcctgcgcgcccacggcatgaaggacaagaaggaactgcgcgccaaggccatcgacatcctgaagaaggtcggcatcccggatgccgaaacccgcgtggactactacccgcaccagttctccggcggccagaagcagcgcatcgtcatcgccatggcgttggtgctgaaccccggcctgattctggccgacgagcccaccaccgccctcgacgtgaccgtgcaggccgaaattctcgacctgctgcgcctcgcccgtgacgagttcgacgcctccgtgctcatcatcacccacaacatgggcgtgatcgcggacatcgccgaccaggtggtcgtcatgtaccgcggccacgtggtcgagcagggcgacgtggagcagatcttctaccatccgaaggacgactacaccaagcgactgctgggtgccgtgccgcgcatcggtcagaagctggtcgtgcgcgaccgcgagggcaagccgatcgagcgcaaggccgattggcgcgaacagccgatcgccgttgaggccaagaacctgaccatcacgtacccgggccatctcatgcagcccgacttcaaggccgtggacggcgcgaacttcaccatccaccgctccgaagtgctgggcctggtgggcgagtccggttccggcaagtccaccaccggccgtgccatcgccggcctgcagaaggtgtccggcggctccctgaacgtgcttggcatcgagatgaacggcgtcaaggagcgtgacttcaagcccaagcgcgcggacattggtttcgtgttccaggacccgggctcctcgttcaacccgctgatgaccatcgcggagaatgtggccgagccgctgctcgtgcaccacaagtacggttccgtggccgaggccaagaactatgtgggcgacctgctggagatggtccagctgccgcgcgcctacatgaaccgtttcccgcatgagctgtccggcggccagcgccagagggcgtctttggcgcgtggtttggcgttgaagccgtcgctgctgatcgccgatgagccgacttctgcattggacgtgtcggtgcaggccaaggtgttggagctgttcaagcgactgcaggcggaaatcggcttcgcgtgcctgttcatcacccatgatttggcggtggtcgatatgctcgccgaccgcatcatggtgatgcataagggccagatcgtggagcacggcgatgccgaccagattatgcagcacccggagaacccgtacaccaagaagctgctggcctccctgcccgtgcccgacccgcgcgaacagcagcagcaccgcgcccacctccacgagctcctagcccaagaggcgtaatcgcatagcattggagctccctcgtcagagggagctaactttatatccgctagtactgctgcccatcgaactggaacagggcgtgggcgtcgccgtgctttttgttctcgatgtaagtatggaacagctccagccgctcgctcgtgctggccgccaggggagtgggcaggtcatccagatcgaaccagccgacgctgaggctttcctcgtcgcccacgaacggctcggcattgccgccgggcttcagggcgcacaggaacgaatgatccatgtacatggtgttgtcgccattggcgtaggtcagcaccttgtttgacgaggtgacggccaccaaatcggtgacgatggcatcgatgcccgtctcctccttgatttcgcgcaccaccgtgtccgccggctgttcgcccggctcgttgatgccgtagaccatcgcccattcgcccgtgtccgaacgacggcccaacagcagttgaccatgttcgttcagtacacaaccggtcacgccattgagccatagcagatcatggccgatcttcttacgcaattccaacacaaattccggagtaggcacattgcctccttagtagaaaaaaggagctccctctgatgagggagcttaagggttacttggcttgggcagcctgcttaatatggtgcgcttcgcgcatgatttcattttcctcgcgcttgtcagcgttcggcgtcgcctacaatcagtccaccggactgattgctttacggctccgcatccacgcttcgacgtcgtcgatctgcttcgggatgccggcggaaatccattcggggccgttctcggtcatgagcacgtcgtcctcgatacggatgccgatgccgcggtattccggcggaatcagcagatcatcctcgcggaagtacagaccgggctcgatggtgaagatcatgccgggcgtgatcttcgcgccctgataggactcatagcgggcctgcgcgcaatcatgcacatcaagacctaggtggtgggccacgccgcaggcgagccaacggcggtgctgctggccttgcggggacagtgactcctcgacgctcaccggcagcagaccccaatcgtgcagacgctcggcgatcacacgcatgcaggcgtggtggatgtcggaataggtggcacccggcttggcggcttcgaaaccggcctgctgcgagtccagcacggcctggtacagacgcttctggaagtcggtgaacttgccgttggtcgggaaggtgcgggtgatgtcggccgtgtacagggaatcgacctcaacgccggcatccaccagcagcatgtcgccggtcttcaccacaccggtattgcgcatccagtgcagaatcggggcgtgggggccggaggccacgatggagtcgtaaccgatggcgttgcccagctcacgggacacggcgttgaacgcgccttcgaggatacgctcggaacgcggcttgtcgagcgcggccggcagtgcggagagcagacggtcgaagccgtgcttggtggcgtccacggccttgcgcatctcgttgatttcgtagccgtctttgaccatgcgtgcctcggcggcgaactcgtgcagcttgtcgtcggatgcggagttcttgtccggatcggcgaaaccgttggcctcgcggatggactcgaccatcgaggtgatttcgggatcggtctcgctgaccacgcgcacacgcacggcgccggcctcggcacccacgtccttggacagggcgtcggccagctgggcgatgtcgtgggtctcgatgccggtcatcgcctgcatctcctggaggccagcacgcgggccaacccagtattcgccgtagtgggcggacatgaagaagtcctcggtggagttgtcggcgcgaggtgccacgaacagttccggagtgtgcgtcttgccggcggcggcttcgggggagtcggggtcgaccgggttcaggaccagcacggcgccggcctcgtaatcggaacccagaccggtgtagtaggcgaacgtggtgtccgggcggaacatgtaatcgcaatcattgttgcgcaccttcggctggccggccggaatgaccagacgctcgcccgggaaggctttgcccagcgcctcaaggcgggctggcgtgaacttggaggattcgagaggcttgatctccggatcatcgtcggcccagccggacttcataaactccttgaatgcagccgactgcgggcgcagcgagcggttgttcacacggtcgctcatcgactggttcgcgcccggcgccgtagcgcgctcctcggcctcatattccttgtccttggcggtgatcacttcacccattgccactctcctgtatgtagttgttgtcgaatcatcgattcccacctcatactagtcggctttatgcgatgtgccacgattgacggctgacggtaaaaccaagtacggaatttggacggtcttccggacatgcccatatggcgagtgcatcgggctggaatgcgggcccgtttattgttctcggtagggaaggaggggcatgggctggagcttgccgattgatattggcatattttgcgggctgaatccatgtgaacccatgcgatgaaggttcatcgcatcacgggacccgctgctctgcggatgcctccatctggggcactctggctttgagcagttttacccgcagcggagtgcgttcgatgacgtcggcgtatgtgaaatggacgatttcggtggcaccggctcgtttcagtccctcgtcgcgtgctcgttccttggccaccacctcctgaatgctgcggttatcggtcatggctgggtccacgtatttttgtgtgccgtcgtattcggccactatcacgcgcccgtcatcgagcttccatacgaaatcaacgcggtgctcggtattcgtctgcgggtcggtcaccgttacctgaatacgcggcgtgaggaagcgatcctcgatgatggtgcctcgcgcgagggattctccaccattctcgctcctttcgtttgcatagcgcagcaggcggaatactcgggcataatcgattctccattgaacgcagtcggcggctatctcttccttggttattcccttggcaagggccgagtcaaagatcggcaacgcaaaccgaaaatcaaggtctatagcggcctcgaccaaggttctagccggtgatatcagggataggccggaggcctcgtaatgtgtcttcggattgttcatatcgggcatatagacatgtcgtaagcgctgatggcattgacgagatccatgatcggaagtcacgatggttatgcagccatcatgcaaatgccattgatgttcgaatccataagcacttactgccaccaagccgccaaaaacccactgaggatgctcttgcgcaagagcgcgggccatatgcaacgttcgctctggcggcggcaaaccatcccagtatgcggtatttgcataaagactgggaatgccgtcatacactttcaacaactcgccactctgggcacggcggcgtagagcggtctgttccgcttcatttcttgaatagacgcatctcagctcattctgcgcggctgatatgagcgaggccactgctttgtgtgtcttcatgacgtcgagcgtagccggaacgaagcagcgtaagtatgaattttagccattgtggttctagcctcggagcttggctgtcttggagtgagatattcccgataatttcaaggtattaggccgctaattcggaatagtggataacatacaaaacttatccaccatcagtaatgtcattcgaacaacgtgctttggggattcgaacaagatatcatcggcgaagacggatgtagctggtagagggcggcgaattgacggttaacggtgcttatgctttgtacgccgtcggtgctggttcagatattggctggcttctgtctgagtgtggaatctagcgtcggcgtgagtccaatggttgtatcgtggccgacgatttgctgcaatttattggcggcatagatccagggcttggacggctgccgacggtgagagcagtcataacagtgaatgagcctctgcgagttcaaaagatgatgtagaggacgtttgtgagagtcgtttccggggcaagacatggtcgattgacgacgttgaaatttctcaacgacggcagaatggcatgccttggcgaggagacgacactgagaggcgatggagtcgggattaatccaggttttggccagctaccgactcgcaagagcatcatagcgtcggtgtaccgccagaagctggcactgtaccgacgctgaatagcatcagcgtcgccggacatacaagttttggattgcagccgactaagaatgggatgccgacggcaagagccgcattgcaactatatgagatggcttcactgtgcgcgctgcaggaaaaggccgcccgcgcggcggcgacatatgagacggtttcactgtgcgcgcacgataaaccaccccggcggctaggatagagggaattgagggagtgcggctccacgcgtgaaggcaagaatcccgaaccatgcagggcaaacctgtgcgaggggagcttcctgcgcatgcggaagcggaatatatgcgggcatgcgtagacatgacgagaatggcacgaacacgtaagtggcatacgcactccgaacggttcaacagcaacacgagcagaggtcagaagaggatatgtcattcgagcatccgaatcggaacaacgagagcatgcgggacgtcgaactggacatcatgagccgcccgccggagcataacaccaccaatctggatctcgaccggatgaacctgatgctcgacatcctgggccacccggagcagtcgttccgcgtgattcatatcaccggtaccaacggcaaaggctccaccgcacgcatggccgaggccatctgccgcgcctacggcatgcgcaccggcctgtacacgtcgccgcatctggagaagatcaacgagcgtatcgccatcgacggccagcagctgtccgacgacgatttcatcgacatctgggaccagaccaaggatctcgtggccctggtggacgccaagatggaggagcaaggcaagccgaagatgagcttcttcgaggtgctcaccgccatggccatctggaagttcgccgacacgcccgtggacgtggccatcgtcgaggtcggcatgggaggcctgtgggacgccaccaacgtgctcaacgcggatgcggccatcatcggtccggtggacatggaccacatgcagtggctgggcgacaccgtcgaacagatcgccaccgagaaggccggcatcatcaagccgaactgcaccgccatcatcgggcctcagccgcatgaggaagccgtcatgccgattctcaccgaagccgccgaacgcaaccacgccatgctcgtgcgcgacggctacgaaatgaccgtgtccgaccgcatggccgcagtcggcggccaggtcgccaccctgaccacgcccaacggcacttacgagggcgtgccgattgccaagttcggcgagcatcaggcccataacgcacttgccgcgctcgtcgccgccgaagtggtgattccggtcaatggcccgctggacggcgacttggtgggcgaggcgttgagctcggtcaagattcccggacgcatcgaacagatccgcacctcaccgaccatcattctggatggcggacacaacgtgaatgccgccgaagccctacgcaaggccatagaggaaagctacgacttcaagcaactggtcggcgtggtcgccatgatgcgcgacaagcaggtcgaggaatatctgggtgttctggagccgatcctgagctccgtggtggtcaccgagaactcgtggcgcgagcgtgtgatgccggccgatgagctcgagaagattgccgtggacgtgttcggccgtgaccgtgtgatcaaggaagcgaacctgcccgacgcgattcagactgccgtcaacatggtcgatgccgaggacgagctgggcgtgggctacggccacggcgtgcttatctgcggcagcttcgtcaccgccggcgacgcacgcctgatgcttgaggagcatgccagccccacgatgaggcaggccatggccgtccatcagccggcggtcgacccggacgattcggatcggccggcagacaaggccgaggatgaggccgccgacaacctcgaggattcggtgagcccggacgacttcgacgtgttcgacgtcctcggcctcggcaaggaacaggccagtgacgccggtaacgccggcaccggcacggccagtgccgacacaggcaccgacgattccgccgacgtccggtaacccgcatccaaggcacatcggatacccggacgcccgacatacggaaaacagtctcacgccatgtatctcaaggaactcaccctccgcggattcaaatccttcgcctccgccaccacgctgcgcttcgagcccggcatcacggcggtcgtcggccccaacggttcgggcaagtcgaacatcgtcgacgccctgacctgggtgatgggtgagcaaggtgccaaaaaccttcgcggcacttcgatggaggacgtgattttcgcaggcacgtcctcccgcccgccattgggccgtgcacaggtgagcctgaccatcgataattccgatcacacgctcgatatcgattacacggaagtcaccatatcccgcaccatcttccgcaacggaggctccgaatacgcgatcaacggctcgcaatgccgtctgctcgacattcaggaactcctctccgataccggtcttggccagcagatgcacgtgattgtgggtcagggacgattggatgcgattctgaaggccgacccgtccggtcaccgtgcgttcatcgaagaggccgccggcatcctgaagcaccgcaagcgcaaggaacgcgcgttgcgcaagttggccaataccgaaacgaacctgagccgacttgacgatttgctgggggagattcaccgccagctcggccccctcggacgccaggcacgcatctcccggcgcgccgacgcgattcagatatccgtacgcgacgcccaagcacgcctgtatgccgaagacgcccaacgctcgatgaaccgccgcgacacggtacgtcaagagcttggcgatgtgcgcaaccagctggccgtcgcccagcgtgaactcgcccaagtcaaagtacgcatcgaacaggtcgaggcgttgagctctgaatccagtccggccatcgccaaggccaaccaatactggcatgaattctcacagacccgtgaacgactgaacgcgctcgcccagttggccgaagagcgcagccggtcactcaccggccagatcgtcaccaacttcggtgaggatcccggcatgctcgtcaaacgagccgaggaactggagtctcaggccgcggcacaaaccaaggccgtggccgatgcacgcatcgcactcgacaaggccaccgaggaacgcgccgacgacgagaagaagcttgcctcagtccgccagaccttgacggaactgcgcaaaaccgcacaggagcgcgatgcgcagatcgcccgactgcgcgaactcatcgcccgcgaggaatccgccgtgcaactggcgaccagccgcgccaaggattatgcctcccaacgcgacttgctgacttcccagcgcgacgatgcccagcaacagctggacgcattgcgcagcgaagcagactccattgccgacgatgacggtgccgcattggacgccgcgcgtgcaacgctcgccgaatgccgcgaacgactgaacgaactcgccgataagcagcgcgagatacagtccaagatcatctcgctcaaatccaaggccgatgcgcttgccgacacgctaggcagccgcaatgcctccggatcattggaacgcgacacggacgtggcctcgcttggccgactcaccgacttcatccatgtggccgaaggctgggaagaagccgtggcccacgcgctcgaccagtatgccagcgccatcgtggtacccgaggcaggcaacatgttgcacgccctcgaacgcgctcgggaagataagctcggcaaagccgtggtgctgaccgcgagcattgccggcgatcccgccacagagccaggcacggagtcggaggagagtagcgccgagaacacggcggccgccccgcaatcgggcaacgcgctggcagcactcgtcaccgcgaacccggatgcagagaacccggcacaggccgaagctgtcgtgcacaccgtgcgtctcctgctggctgatgtagccatggccggcaccgccgacgaagcacagcacatcgtggcatccggcgaagccatgcgggccgtcaccaagaacggcgagaccttcacacacggcgtggcggcggtcggcggctcttccatctctcaatcggacctgtctctggccgcccgtcgagacaaagcattggcacaggtcaaacagttggccgcccaagacggcggaatggctgagcaagtggccgaggccaaagccaaacgcgatgaagcggcccgactcgtcgaccaggaatccgccaaacgcaccgaagcccggctcaaagcccaacaggcggagaaatctctgaaatccgccacagaccgcgtcgcatcgttcacccgtcagcttgagcagctggataggaaaatcaccgagacccaagagaatcgcaacgagcatcagctcaagctcgacgatctcaatcgcgctttggcatcggcccggcaatccacagcggaacatgccgatttcgacgaacttgatgaacgtgaacgcacgctggagcgcggactgaacctgactcgcgagcatgaggtcgccgcgaaaatcgcgtggaccgaagcaagccgcaaaggggagtcactgagccgacaggccgggctgctgcgggacaacgccagagaagccgccgaacgccgcgcccgcatcgaggcgttgaacgatcgcagatgcgagcaggccgcacacctgcaaggtgtggccgatgacgcgcgagcagtggccgccatggtggaacatacgctgcatgacgtggccgccaaacgagacgagctgcaggccgccgcctccagccatgacgaggaactcaaggccctgcgcgcgcagcgcaaccagatcgagcccaaggtcaccgatctgaccgggcgcgaacatgccttggatgtaaaccgcgaacggttggccgccgaatccgggcagctcatgcagaaagtgtccgacgaactcggtctcactttggaggaattggttagtggttacggccccgaacagccggtgcccgtgctggatgatgagggcaaccctgtgccgttggatgagacggaagctgaggctgggaccgaagagggagaaaccgggggagagaccggcaccaacggcgattccgccctctttaagaccgtgccgtataaccgtcaggagcagaagaagcgtctcgataaggctcgccgcgatctggccgcactcggtaagatcaaccctttggccaccgaggaattcgaagcgcttgaggagcggaacaagtatctcaatgatcagcgcaacgatgtggtcaaatcacgtgacgatttgatgcagctcatcaaggatctcgattccacgatggtccaggtgttcaaatccgcgttcgacgataccgccgaggcattcgagcagatgttcgccacgctgttcccaggcggcaccggacgactgcgcctggaaaacccggaagacatgctcaccaccggcgtactggtcgaggccagcccggccggcaagcgcgtcaaacagctgagtcttctgtccggcggcgaacgttcgctgaccgcgctggcgctgctgttcgcgattttcaccgcccgccccagcccgttctatgtgatggacgaggtcgaggccgcgttggacgacgtgaacctgacccgtttgattaatgcgttcaatgagctacgcgcccatgcgcagctcatcatcattacgcaccagcaacgcaccatgtcgattgccgacgcgctttacggcgtaaccatgagagccgatggcgtaacagccgtggtgagtcaaaaactcgaacgataaacgaatggttcccgctgacaggaactggtaccacaggtgacagagggcggtccatatcgaaagaccgccctctgtctcgcttcgttcgacagctcccaccagcgggagcggggagaggtattagcgcaatgccttgcgcacgccttggatggtttgcagcgtcttgtagaagaccttcttgatgggtacgtcgcgggcgggggccaccggggtgatttcctcggtgaacttgcacttgaactcgttaaggcccttgagagacggcgcgaagtcggagccaatgcccatgagatcgtattcagtaataccctgcgagcctaggatgcagcattcggaatacagcagcttgtcggtcacatgcagacgcataacctcgttgcgcatgccggcatagtagcgcaccgcatgcgtgccgttcacggtgacaatcgaccatgccaccacacggtcttcaatacgtgcggcgaacacacggcaatgatcggcacccaacgcgccgatcatatcggaatagtcgctcatcggagcaggcgtgaatccatcgcgctggccggtctcgaccatcacatcgtaatattcggagaaatcggccagcgccttatccgtctcatcggcaacctcggccgggcactcgcgcagagacttgcgcacgtcacggcgtccacgacgcttcatccgagccagaatctcatcatcgccaccggtgacgtcgatgaccacggtctggtcgtacggcactgtggacagcaccttctccgtaccatcggcgaaccaggtgtcgatacgcaggaacgcgatgttcttgtcggccttcttgacggtgtccacgatggcgtcgacgacctcgcgctcctcagcctcggtgggcttggcgacccacgccggcccatgcatcgagcgcagataatgataaccgtgcgtctcaaaatcgataaaggagatcacggcgaccaattcaccatcacgcttgatcagataatcgccccatggtgtgcgtccgtcgatatccgcctgaaaaccagaccaaaccttggtctgttcgataggcaacgtgatgccggccttctcggcttcggcttccagtgtggctccgtcaactttctccaacgtgatcattacgattcagctatcctttttcgttcgtatccgtatgtcgtgtttctggtttggtcgtattgcgcgtgatctgatgtgggccaatcgggatccgatcaggatctgattggccggaatcccgtcacaagccaaacatgcgttcgacgacgtgatcgtcgccgtcgaacggcacatgcttgtgatggtccttgatccagcgctcgttgcccttgccgataatcagcaggatgttgaatcggtcggcgtgcgcacgggcatcgtaaatggcgttggtgatggccgtcggacggtcggaaatcaccgtggaggccacatccttgttcgtgatgtagccttgcatttccatgcagatgtcgatgaacggttcggtgtccgtatcttcggcggtgaaaatgaagttcgcgatacggttctcggcagcctcgacgatttccttacgacgatcgtaggccttgttgccggccgatccggtcaccagcgtgatacgcgggttttcctcgccccaacgctcgtagacgaagtcaagcagcgcggtgacggatgcgtagttgtgcgcataatcgacgatggcgagcgtgttcgactgcggatcgcggaactgttccatacggccggcgatacgtacggattcgatggcgtgcagtgcgccggcgtcatcgagcgatacgccagccgcatgggcgatggcgatggctgccgccgcattgaggtagttgaagtcgccatcgatggacagatggtagtcgccaagggtctgatctccgtcggcgatgtggaaggaggcgtgcgccgtgtcggcgggccaggcgacgacgtccgcactggtgccggcattatccgcgtcatgcagggcgaaggtggtcacgccgatgccggctgccgccgcgtcctcccgcaacagatcggcgtgcagactgtccgcgccgagtaccagcgacttcgcgttggcgatgatctggcgcttgcaatacaggtaatcctcgaacgtggggtgttcgatcgggctgatgtggtcgggggagatgttcaggaacgcggccacatcgaaagtcaggccatagacgcggtccaccttgtacgcttgggaggagacctccatcaccagatactccatgccgttatcggccgcctcgcgcatcatgcggaaggcgtccatcgattcgggcgtggtcagatcggattcgacgtaggtgtggccgtcaaggcaattatcgaccgaggagaacaatgcggccttgccgccggagacggcgttgataagcgcctgcgtgaagtacgaggtggtcgtcttgcccttggtgccggtgacgccgatgaccgtgagctcgttctgcggatatccgtagaacgcggcggacagcaggctcatcgccttgcgtgcgtcgttgacgatcaggccgggggtggcggttgcggctgagtactcggtttcggccacgtatgcggccaggccggcttcgtcgatgccgttcagatactcggccttgaatcggcccttgcagcacagcagggtgcccggcgtgaccttgcgggtgtcgtaggtgatgccggcgaacggttcatccgccgaagcgatacgggccgggtcgtcggtccagacatccccttggatgatttcacgcagcagatggtgttccttgagcaggtcagcggccgaagccaaagtcaaagccataattgtttctccctattatctagccgatacgccattctacaggtggggtgtagcgtgttgtggctcacacgtcatcgaccacgatatgggcacatgatttgattagaatggtgaaccgtgacgacaagcgaagcaactacgcaatccgggcagtcagccggatcgggcgagtccatggcagccaagcgcgccagattcgagcagctcgccatgcccgccgtcaatgcactgtaccggcaggcgatgaggctgaccaacaatcccgatgacgcgcaggatctggtccaggacaccttcgaacgcgggttcaaggccttcgactcattccagccgggctccaacttcgaggcgtggatgaccaccatcgagcgcaatgcctacttcaaccagtatgccaaggccaagcggcgcccgcagcgtgccaacgactccaccggcgaatacgacgattgggacatttacgatgccgccgaacatacgtcggacgggctcaagtccgctgaagaggaatatttggacgccttcgcgcccgaggaaatcatggccgcgctcgccaaactttcgccggaacgccggcaggtgttcatcgacgccgccatcgacggcaagtcctaccagcaggtggccgatgagcagggcgtgaaaatcggcacggtgatgagccgcctgaatcgcgcccgcacgcaactcaagcgtgagctcgcctcgtatgcgaaagagcgcgggtacgtgactggttcgtcggctggttcaccatccgcgaagttgggtgaaaacgttggtcgaatcgccgattccggccataatgaaagtagtgaacagactgttggcagcaatggcgacacgcaagccgtagtgagacatagtcatgcgactcacgcccacacgccacaacagtcaagcaagctttcgggaaaggagatctgatgaacgatcagccggtagagcgtactcgccatatctccataacccgtacggcggccgatggcacggtaagccagaccgaagtgcatatcacggcggtgcatcatcgttcagtagataccggctcggccgctgcgtcggtccagacagacgtgcatatcgttacggagggcgactgttttgacccccgtacctgctgcgacgagcgtgaacaggcgttgattgccgcgttgcgtgcctacttgcgcccggatgtggcgcccgaatgtctgatggcccggctcaaggccacgcttgatcactgctgcggcgaagataagtaacgacatatacaacaaggcccgtctgatgtatcatcagacgggccttgagcgttctataagaaacgcgaagaatcaggcgttaggacgcttgccgtggttggcggccttcttacgacgatccttgcgcttacgtccgcgcatgcccatgatggactcctttgctgcagtaaaaaaataagccttcggaattatgccacataagtacgacgtgatgcaacacgggtgtccatgtggcgatgatcgtcaggcttggttattcggtttttcagatttgttcggcgtggaaggtgaccacggtggtgtagtcatcgcccggctcgagcacaaccagatccttgccggtgcggaaggcgtcggcgtaggcggtcatcggttcgacggccacgccggcctgacgagccttcccgccgatttcgttgccggtgcacacctgccaggagttgatggtcttgtcgccggtcagcgtgaccttgatgccgtcggggcgggtgaacacggcggaagtgctgccgtcttcgccgcggttggtgatatcggtccaggcatcgtcgaagccacgtccctccagcgtggggttatcgcgcaggtcgaagatgccggaaaccggctcttcaccggtgggcagcaggtgttcgtctacggtcacgtgggtatcgcagtgcagctcaagacggcaggactcgttgtcggcggtaatggcctgaccggtggcgtgcttgccgtttgccagccacgggtggatgccaaatgcccatggggccttcacgctgtcgttgttgtgcacggtgaaggtttccgtgagaccgttctcgtcaagtgcataagtggcggtgatggtgatatcaaacgggtagccggcgatgtcgggggagcgccaggagagtgtcacatgtgattcctgcaaatcaacgagctcccacatgcagcggtaggcgtagccgtgcagggaggattggcggtcgaactcgtcgattggcatctggtagtcttcgccatcgaaagaatactgaccattggtcacgcggttcgggtacggtgccagcacccagccgttgcagcaggggatgaccttgttcgggtcgaaggggacgatgaggtcttcgccgcgccacttcagctcgcgcaggctggcacccagttcggtgacgacggcactccattcgccggacgagatgacatattggttaccagtgcgaggcttcaaagccatagtgcacactcctttgtgaaacagattgttaccgctcacaatcgtatcgcataagtcccaagacgcggcggcacataaggataaaaaattggctcccctctggaggggagccagcgtaacggaactacttctggactacttcgtagcggaccacagtggtgtagtcgccattgggggcgagcgtcaccaagtggtcaccagtgcggaaggcattggccggggcggtcatcggttcgacggcgataccatacggatgctcggcgaacggcgcgccagtggcggtgtagcactgccaagcattgatcgtctcatcgccaatgagcttcacttcaataccgtccgggcgggtgaatgtggtggtggtcgtaccatcggcggcacgctccacgtcgacccaggcatcatcaaaggcgcggccttcgagcgtcgggccatcgttcaggtcgtagatgccggtaaccggttcggtgccggtgggaatcagcgcctcgttcaccgtcacatgactggcggccttgatctgcaggtggcaggcggcggagtcggcgtcacgctcggcggaagtcgcgccctgcttgccgttggccagccacggatgcaggccgagagcccacggtgccggctcgtcgccatcattgcgggcattgacggtcacggtcatgccgttgtcgccgagttcgtatgtgacggtcacggtcacatcgaacgggtatccgtccaggttggggaagcgcagtgaaagcgtcacggcgctatcggtcaacgattcaagcttccacatgtagtggtaggcgtatccgtggttcgcgttgttgcgcggtgcgggatgatattcgttgaccggcgcgcagtaatgcttgccattgaaatcgtattcgccgttttcgatgcggttcggccacggggccagcacataaccgttacaggtgggggtcaagtcgttgactccgaacgggcagaaaatttccttgccttgataatcgaatcggcgaatcttggcgccgagttcgcagatgacggcggaataatcgccatagtgaatcgaatactgatttccggtgcgtggtgttttactcgtcatggaatcactcccgtagtgaggttggtgggccggtagctcctgctatcgctggccccagtctagcgcgtctcctctatcgaggcggggattggcgatagccggcatataataaacaattcgtacagacacggtagcaatacgtggagtgacgagtctcacaccatcatgcgagaagcacgtggattccttggaaaccggtgattcgtgggagacgcggaaaagttgtgacggcagattcctgtaatccctgccttacactggaaaacactattgacgttcaggaggttccgatgaccaaaagcgttgtgctcgctgatccgcgaggcttctgcgcgggtgtggaccgtgcgattcttaccgtacagaccattctcaaagccgcggaggcttccggaaagcgaacgcgcgaggatgggctgcccccggtatatgtgcgccggcagatcgtgcacaacaagcatgtggtcgaggatttggccgggcaaggcgcggtgttcgtccaggaattggcggagattccggatgctgctgcccaagcgggtattccggtggtgttttccgcccatggcgtatctccggtagtgaaggcggaagccgaacgtcgtggcatgcatgtggtggatgccacctgccctctggtgggtaaggtgcaccgtgaggtgctgcgtttcgtgcgcgaggggtatgaaatcgtctatatcgggcacaagggccacgatgaagcagtcggcgtggtgggggagaaccccgaacatgtgcacttgatcgagcatgaatcggatgtcgattcgttggattttgcgcccgacaccaagctggtgctgctctcgcagaccacgttgagcgtggatgagaccgccggcaccattgccgcgctgaaggccaagttcccgtggattcaagagccgccgagttcggatatctgctatgccacatcgaatcgtcaggctgcggtcaaactggtggcccagcagtccgattgcgtggtgattgtcggatcggccaactcctcgaattccgtgcgactgatggaggtggcgcaggagggcttggggaagcgcggcaaagcgtatcgcgtggatgatgccagcgagcttgatccggcgtggttcgtcggactggagtccgtgggggtctcctcaggtgcctccgtgccggacgaactggtgtccggtgtgattgacgctctgcaaaacttgggtttcaccggtatgaagtccgtcgaaaccatcaaggaaaacatgcacttcgtgctgccgtcggagttgcgcaggaagaagtagtcatccttggctcccctcaccgagggaagccaagaacggtcaccacgtgccgattggtgcggcaacggcgttcaagaccttgagcaggtcctgcgggttcacgcctacggacagtccgcgtttgccgccggagaccagaatctggtcgaattgcagggcgctttcatccaacacagtcttatgacgtgtcttctggcccaacggcgagatgccacctaccacatagccggattcacgcattgccaccttgggatcggccatagaggccttcttggcacctacagccgcagccagggccttcaaatccatatgtccgctgaccggtaccacgcccaccacacgctccgaaccggtgtccgccatcaacgtcttgaacacctgatgctcgtcgaagccgagcttggtggccgcctccacgccgtagccgtcatccatatggtcgttggagtgctcgtattcgtatacgtggaattccacgcccgccttctccagttggactgtcgccggggtggaacccgcgcccttatcatgcttgtttttctttgccatgattaccgttctactacgaaaaacccccgcacaaggcgggggtctcacagcttagttctcaaacgaaccgtagcggcctagaccgcagtggttcactcggagatctcagcgaagtacagcagggtacgaatcatgttggaggtgaagccgtactcgttgtcgtagaaggacacggtgcgagccagggtcacgccgtcaatggtgttgacgtcggtctgggtcgggtcgaacacgccaccgtgggtgtcgccgaggatgtcggaggagacg

SEQ ID NO: 3608 - DNA, 3342 bp, Unknown
  R85_18m  MAG No. k141_31094
acgttcccgattccacgccggtgaccatcagctaccagtacgggttcaaaggctccgccggattcgacgtgaagaacactgcgcaattcaccaactcgccatggtctgatgccggtgcatccaatgcgaacggcgcggccatcagcagtagcggcgtcatcgtgcagacgtcgacgatgctgttgcataaaaccgatgatgatgcatccggctaccgggatctggccggtgccaaattcgaactgcttgaatgggacggccatgactatgtatcgaacaagcccacgcccattacagcggtgacggacgagaaaggcatgatcgtcgtcggcaaaacccacggattgcagtgcggcacggcgtatcggatcaaagagctccaagcgccgctcggctatgagatcaacgacgagcagaccgatttctatctgacgaattgcggcggaggcgcgtacttcggtccgacaaacgaggatggcagtccgcaggcgtcggtgcatcaatggaccggcggctatacggtgacgattcgagacaagaagatcaccggctcggtgtcgtggagcaaggtggacgccgaccatcacgaggaatatctgtccggcaccacgtggcggcttgaacgacgcaacgatgacggtacgtggaacaaggtcaacgattccctctataacttcgccgattgcgtgggcgacggtaatgccgcctgtgccggcaccggagacaaggatccggccgtcggcaaactgaccatcgacaatctcgactggggtacctaccggctgacggagatcaccgcgcccggtggataccggttgcccgacagtgaccgtacctgggccgagttcacgattcgccgggaggatcccaaggcgaaagccgtgctgcaaggacgaggtgattgggctggcgttacggacaatcgtctgaccaatcggccgcaaccggtttccgcgctgccctccgcggggcgtcgtgccgcgtgggtggtgacgattgtcggcatggtggcgtccggaggggcgttggcggtgttggcgatcgccgcgcatatcagaaaacgttcatacgggaaccgttccgtatgaccaatatggattcatccatattccataaggaggagaacaatgaaagcaaaatcatggatggcgggagtcgctgcggcggccacactgtttgtatccgtaattgcgccggctggcgccatggccgaagagacgaccgcaccgagtgcccccgcaacttccacgacttgcgcgaccaacggcaacaccatcacggtgaagggcacggatgcggacgcgttcaagatgtggaacggaaatacctcttcgagcaaccgtacgttcaaagtggcgaaagtcgccgactacaagattagcaacggcacgtccggcggctcggtgcatcttgagacggtgaaggaatcgaaggatgacattattcgggcgatgagagaactgaaatccaataatggtgaatcgctgtatatgagtgaggatcagaatggagacccgatgaactggcttgccaacaccggacaggattcgttgatccgtacgtacgcgaatcatccgggcgtcaacggtactgagcttgacaagatgcaggtgaatgtcgacgacaagaacgatactatgacactcaccatgcccaatcccggcctgtatgtgatctccgacgccacggatccaaagaagcagaccaaagacactggcgataccaccgttgattattcaggcttcaacaatatgctcgtcggcactccgcttgagggctgcaacgtgtcgaataacacgggcgtcgtggatctgacgtccgaggcgaatgccaagaccggttccacgacgaccgcgcgtggtggcttcaagttcatcaaggtcggtgtgggaagcgacagaaccggtttgtcgggtgccacattcaccgtgtactctgacgagaacttcacgcagattttgaaggatgccaagggtgtgaaggtcgaagccacgtccgtcggtgaaggcggtcacgtcgatttcagcggcttcaagctgaatgccggtacctattacctcaaggagaccaaggtgccagatggctattggtccggttccgcggccaaactgaaggtcacgatgaagaagaacagcaagggggagatcgagctggagtcgatcaccgacatgaacgttcccgccagcggactgctcagctatggtgaagataacctttgggtgtaccgcaacatcaaaagcatcacccagctgccgttgaccggtgccatgggcatggccattcttggcatcatggcggtgctgtgcatcggtggcgcctcgatcatcatcgttcgggcccgcaaaacgaagcgtagcttcgcagcctgagcatagggccgaatgacgctggtggcaccttcgttcgagcagctggtcgacgttgcccaagaataccgggcgtatgcccgcatgcggcggcgattgcgcgtgatgtatgccgtcgcggggattttgatcgctgtggcggtgatatgcacggtggttccgctgctgatgcagtattcgtcgcagacatccatgtccgcgtcggcgtcttccgtcgaacagcaggtacgactgtggccggaaagccggattgacgacgaactgcgggcggcacgtgcatacaaccgcgatctcgcccgctccgggcaaccggtgctgggagtccatgccgacccgttcaacaacggggaacgcctgtcctcccagtcggcacaggatcaacgctacggcaggctgctcaacgaaggtcgcggcatcatgggccgcgtgtccataccgaagatctcagtggatcttcccatctaccacggcaccggagacaagcaactgtcctttggctccgggcatctgtatggcacgagcctgccggtcggcggcaacaacacccatgcggtcatcaccggccatcgcggcatggtgcaggcgcagatgttcaccagattggatgaaatgcgcgaaggcgatttcatctacatctcaacgatgaacaggaccttggcctacgaagtcgatcgcattaccgtaatcgaaccgaccgatacctcgcagctgcgcattgttcccgggcaggatcggctgacattgatgacctgtacgccatacggcatcaattcccaccggcttttggtctccggccatcgtgtgggcatacccgttcccgcccccaatccgaccgatctgcatgacggccggaccgtcggcgcatgggtgtgtggggcggtgctcctgtgcggttggggcggcattgtggcggtccgtcggtgcaagcgcgcgccggaaggacccgtgcgccatgccgtgtggctgcgatagacga

SEQ ID NO: 3609 - DNA, 3043 bp, Unknown
  R85_18m  MAG No. k141_31260
ccctgcagttcaacggcacagacgtcaccgtcgggaaattattcaccagtatcaggcgcggcatcgaatcggcacatttcacatacgatacggcctatatgcgctcttcaaacgcagtatccctctgtccagagatgccccctcccccggaacgttcccggccgagcataatgcgatgcatcgcatctttcaagactgcatgccggatcgttggggcaggaacctcatgcttcgtgcagaacatcaagatgctcgttcggagcatcgcacagcacgcacactatttgagggagatctcttgctatccgtcaacgatgagacccgacaaggcgcattgcgcttctggaacaacgacggtgacgcgctagctcccagtgagaccggcgttccaagagaagtgaccattcagtcccgcatccatagcaatgatgagcagctgctttgaatccggcattgcgcggcttcgcgaagcaagcgcacaatgacttcacattcccgccttgcaccagctggctgcaatctgcgtatggtcatgtatctgtaggccggcacgaatgcggctgatgggtgcggcgaatcgtgacattgcttattacccattcgccccttcagtcgtaccattcgggtcgtcgcagttccaggaatggccgctgtttgcgcgctgctgcggtctgtgtgagatcgatgtcggcgataatcaactgttcttggtcgtcggccttgctgacgacgttgccgtacgggtccaccaccaccgattggccgacgaacgtcacatcgccttccttgccgacccggttgcacatgacgatggccacctggttctgcatggcctggacacggattttccacaggaacggcttcgacggttcggcgtcagtgttcggaaccgatgctcgccgtcggcacgatgaccaggcggcgccgcgcaacgcgcatgtgcggatgccttcacggggttcactcaaatagcgtcatccagtcgggatcgcggtgggccgcaaaacacatggcgatttgttccgcggtgtttcttgtttccgaaagccgcggcaaccggtcttcctcgaagtagcggatttccgtcgtttcgatgttggccgagaaccaaccgccggcgcggctgcacaatacgaagaacttgagcaccccgtacggataggtcagcgcgttgtgattggcgcagtcctgcaccgcgatgagtcgctcgcccctcacatcgagcccagtctcctccttgacctccttgacggcgttggaccgaatggactggttctcgtcgacccagcctccgggcagtgaccattccccgctgttctcatgcgtcatgaggatcctgccttcctcatcgaagatggccgcacgagtgtcgagtttcggcgtcggatatccggcgctgagcagtcgactcacctgtccggccggcgcatcaacctgcgtggagagcatgtcgaccgccatcgcgcgaatacgctcgtagcgctcccggtcgaaggggtccttgcagtacatcagtccggtctgggccagcgcctgcaattctcgggcctgttccagtaacgtgcggttcgtggccatcatcgttcatcctgtcatcgtaaggtcttggatccgtttgcgctcaggcatcgcagcgtagtgcaagcagtatagcacttcgaaccgttccggggacgagggtctcagcgcatcccccgtaacctctcccatgtgccatcaacgcttggcgagctgcacgttcttgcgctgtctgcgattgcggctggcgaccgacttttcacgctcgcggcgcacgtgggcctcctcacgcgcggccgccgcgcgctcttcttccaaagacggcaatccggaggcggcgcggcgccggttctcccgctcatggtcgcgttcggccttgcgctccccgcctcggatccgggcgccggaaaccatcgcagttggcagagcgtctggccgaagttccacaggttattggtcagccagtacagcagcacgccgaacggcaaggtgccgcccgacaccacgtagatggctgggaacacaaacgcggtcagctcctgcgtgcggaactgcggtgaatccatggcgtccttcggcgtattgcgatggatgagcagccactgcatcgcgaacaacatcagacacatcaacgccacggccacgccgatgacgacgtgcgactgcggcgagacgaccgtgccgaacgagtcggcgatgcgcacgccgaatatggacgatgattcgatgtcgccagccatgacgcggtcgatgccgctcaacggttccgcattcccggcggcgcttgcgggcagggattgcagcgtgtagaacagcgagcacagaatcggcgcctgaatcagcgaagcaggtatgaaccgagcggattggcgttatgccgctgctgcaaagccataatttcacgttgcatggcctctttggaacgcggatccttacgcgcggcgtacttgcgttggatacgttggatttgcggttggagcacctgcatacgctgcgtcgcgcgcatttgggagaagaagagaggcaatagacagatacggatgatgagcacgaggcacataatcgcgatgcctaagctgtgcggcaccgactccttctacggctgcggcatggtcaccggccagcccatcggcaccatgatcggctctcgcatgatcaacaatgcgcaagccggcttcatcatcggcgccgtgatcatgggcttccggattcgtggcgcttgacgtctgacctcgcgaggaatcctcaaaggacatggaacgcaccaagatgacgctcaaggatctcgctgtctccttccacttcccgaagttctccacctcgcgtgacttctacaaggcgttcggctgccgagtgtgcatgttgctcagctaccagatgatctccgtgtaccaactctacatcgtcgaggattacgtgcaccaaaccaagaccgaggctgccggcaccatcgccaccatgtccatcatcaccatggtcgtttccctgagcgcttcgcggatctccggcccgatctccgaccaga

SEQ ID NO: 3610 - DNA, 3528 bp, Unknown
  R85_18m  MAG No. k141_31445
caggatcagggcgaaggcggctgcacaccagtaggcggcggtggagtacaccttggtggcggccatcacgccgatgttctcgccgtaggtggtggtgccggagccgccgccgaagccggcgagcgtggtgcccaggccgtcggccatgagggcggtgccgatctggttgtcgtagtcgcggccggtcatctgggccacggacttgacatggccgacgttctcagccacaagcacgagcacaacagggacgaacatgggaaggatggaaaaatcggcctgcggcaggtggaacttcgggaagccgatccatgcggcgtcaccgatggcggagaagtcgacctggccgcggatgcaggcatatacatagccgatgattacgccgaccaaaatgttgaggcgacccagcaagcccttgaacagcacggccacgagcagcacggccagcagggtaaccagtgcggtgtccggcgcggcttggaagttggtccacacggaaggtgccagattgaaaccgatgatggccacaatcgcgccgttgaccacgggcggcatgatgatgtcgatccatttggagccggcgtaatgcacgagcacgccaatcagggccagcagaataccggtgaccatgatgccgaagctggcgaccgcaatgcccttgttggcggtggtgaccgcggtgatcggtgcgatgaagccgaaggacgagcccaaatagctcggcagcacgttcctgttgataagcaggaacagtgcggtggacatagccgtgaagaacagggtggtggacgggtcgaagcccgtcagaatcggcaccaggaaggtggcaccgaacatggcgatgacgtgctgtgcgccgataccggcggtgcgcacccaagtcagacgttcatcgggctcgacgacctcgccgggcgccagcgtcttgccgtcgccatgcaattgccattggaagatattggacattactactctcctcgctctcgcttggggcacggcattcacaaccagccgcactacgcgccattctagctcacgaagattttgtgaagtctctcttccgggaaaggctatttgccgtaatactccagcaggtgcggatcgacggcctgcaccacatccaccaaatcgccattggagagatacgggcgcttgaattcgcgccacggctccaccttgacctcccagcggccggtcgtctcgtcgagcacgggccgggcggtctgctcccagcgcacacgcttggaggtgcggccggtttccgggtcgcggcgcgtgtagtgcaggcaggtgcagttggtgatcttccagtcgtccgagtcggcgcgatgcaggaattcctcgtcggccagatcctcgatggtgagcatcagggcgagcatgaagtcgccgtgggtgaccatgaccacggattccgaatcggatttgcggctcagcgaggtcaggatgttgtgcacacggtcctcggccacatcggcaatcgactcgcctgccggcggacgccagtacagcggatcggtattcttgaagttccagttgcgtgcgtagttgtttttgaattcgtccttggtgatggtgttgatttcaccccaagaacgttcgcgcagcacacggttctcctcccatttggccttgggcagggccatggtggctgcggtttcgcgggtgcgcacgtatggcgagaccatgtaacggtcgaacagctgctgctggctgaccagccaacgaccgatgcagtcggcctgcttgcgtccggtggcggtgagtctccaggagcggtcgggtacggtgacgttgtcctgcgtatacagggagttgtcgccctgttcgcccgcctggacgatgacgttcgcttcggattcgccatgccggattacgtatagatcgagcggcatgctcatatggattcctctttcgttattggttacgttgtgttgttttctgctgtttcctacttgacctgcgtaatggtgttccccttgaccatgaacgcatgccgggccatgtcgatcatcggctgatcgaacttggagtcggtgtagaactcgtcgatgacggcgtccggaccgtacagttcgcggaaccgtttggtcttgttggtgttgaagttgaggtacgtgaccttcatcgtctccacatccacctcgctggccacgagattcctcacgccgagtctgcggcaggcctcccccaccgtcagaccgaaggatgcggtgaggatcacatcgtccgactcaggctggtaccaaggcttgatatgtgcgtaatatcggtcccagaaatcgtccacgagctgttcgacgctcgccacccgtttggatcggctcagttccgtgagatagccttcggtcatcttgcccacgccgtattccatttgttcaagcgtggcccggccaagcttgtatttgaccgcgtaccgcagcacgggggcgatatagcggaacactttcgggtcgtggcgggcggaatacaggtacaagtcgaacaggctttcgccatcatagatggttccgtcgaaatcgaatacgcgcataccttctgcttctactctgttattccttgtctaaggctaatctcggtaagccggcgaaagcgcaaatacgcagtgaatttcacatgaacactgttttttggattgatttcggtacaggtaacgtacactggtgacagcgtggaaggaggtgcgtaatggcgacgtctgaaatcgaacaatggtggattgataagtttcaggagaacctgggtccgattcgcaaggtagccggatggacgactcagcaactggccgacgagctgggagtcgcgcgacagacggtgtctaacttggagaccggcaaaagcccgatgaccaaactgcagtatctcgctttacgtacggtgttcagcgccgagatcgcacgtcgtgaagaccgcgatctggcacgcatcatcaagactttggtcgacgatcccattgagcaacgcattcgcgaacggcgcgcccaagagcaggacggcgaggccgttgccgacaatgccccagtcaatacggacggtggcaacgctgccgacaatgccattgccgagaaacgcaagcccagtgccgccacattgaaggcttcaaagactgccgcaacgggcaagcccacgctcagcacggcgatgcaggctctcgccgtcatcaccggcgcattggccagtggaaccgccgccggcatcatcacttacttgatgttcccggacggcggcccgaacaagcgctgagtcgccgaaatatcgaatccgttactcgcaggccacgccatcgtgatcgcggtccaacttgccgttgtatccaggctgcccttgatacaacggagcagcaccagccgcacggacttcagagcaattcgcataatgcacattttgctgcgcttgctgttgctgttgtgcctgtcgagcggcctcctcagcttgccgctgggcctcggcctgcgcggcagcctgttcttcagcggcctttcttgcagcctcttcttcagctgccttcttggcggctgcctcttcagctgc

SEQ ID NO: 3611 - DNA, 5819 bp, Unknown
  R85_18m  MAG No. k141_31666
cgcagctcacccgcaacgagcgcctcgaccgactgccgttcaacaaggcgcatcgcaaactcctcgtcgcctccggcgtcggctgggcattcgacgccatggacgtcggcctcgtctccttcgcggccgccttcatcctcgcctgcatagcagccctctgcttgcccgagcgcaaaggcctcaatctcgaagactgattacacttcagccttcgctactaaagtggcccacaccaatgtgtgggccactttttgtcttatagctcccgaatgacacggcaagggttgccgtatgtcactgatcaatcgagggaacgacgggtgagattgcgcggtggttttgtgaccagccacgccaccagcagtccggttaccactacgccgaatgccagcgccgcctgcaatccccagatcggcacggtttccagccaatgaccgtccacaccgatcctgcggttccatgccacatgcagccatcccaacgccacgccggataccacgcccactggcgcgccggccagcagaatcaccgcagcctgcgtcaggccgtaacgtctgaggaatcggggtggcgcgcccacggcgaccatcgtggccatgtcgcgctgggcctgcgtgcgggccagcagcagtgaaacgagcgtggccatcagtgccagcaatgccaacaggccaatgcgcaccaatgccatattgtcaccccacggcaggcgattcccgtcagtgctcgtggatgccagcggcagattttcgattgcataagctgaggccttctttacggtaacgggggagttgccaccggcgaagtctagatactcacccagatactgcaattgtttgatgccgagcgcctgtgctgttgccgggctcatcaccagcgggtacgcgccgcgcacgtagatggccttgcgcttctcgatatgtgtggcctgagattcgtttgcaattgccggattcggcgaaatggccacacgcaccatacctcccgcgtcgattgtgccggcatcgccgaccaccacaccgcccgcatcaagcacctgtgccgcctcatccgcgttcgggaagccggacaaacgcatcgcattgccatccataatgagattcacgccgcggaaactcggcagtatattcgaatacgttggctgatgggatcggtctatcggcacacaacgtatcggaacgtttggatacagggccgaagcggcatcctggcccacccatgtggacgtgtccggttgctcttggatcgttgggttatcacaagtgtgaccggccgggagcaatgcagcggcatacatgtagccgtgttcggcgttcaacttgtcggaatcgacttcggtcgtatcattgagctttgaccatcgcttgacatcctcggtgtacaccgggtaatgagcgcgtatcggcgtctctttgccaagccggtgtatcgcatccgacaccacagcacggtcgaactcattgctgacatgcacgtcggccccaatggccatccccgacggtccatacgtcatcgtcatcgtggaatttcgctggtccgccaccatggagccggtgattaccagtgtgtacgaggcgatgcacatggtaatcagcaccgcgcatgccgccggaacgaaccgtcgatgatgctcggctgcatccctgagtgccaggcgtgcgccgatgttcagttgggaacccgctttgccgcaccaccgtgcaaaagtgcgaatcgacaacgcaagccctatgacagccaacaaaatcgtggcaacaagcagagccatatgcgtttcggttccggccggaaccgcgcccggattgtgatcggccagcgtgggcaatggcaatgtcagactgagcgcggcgcatacgatggagaccaagaccagaatcggaccaaccgcaacacggagcagtctcaaaggattacggcgaagcttcgtatccacgccattcgcggattcaccgtagccgatttcctctcttgtcgggcaatccttcaacgcatcgactggatgcatacgcgccacatgccgagccggcgcaatcgtcgcggcaaatccaatgatgattgccgtgacaatacccatcggcagcgagccccacgagaatccgtgcaggatctccagcggcgtggatccacgcaatgcgcctatcgcagggccggccgccaaggtaagcgcgaatcccaatgccgagcccagcacgccaccgatggcgccgataacgagaccttgcgaggaaatgattcgactgaggtcacgtggtgcagcaccggatgcggccgcgagcccaagcacacgacgtgactgatctgccgacaccgtaaacgcgggcgtgaccagaaacagtaccagcaacatacccaccagcatggtgatgaccacagtgaccatgtggttcaacatggtagccgcatcgatctgcatcgggtagagctgcgatgcgggcggatagccgtcagtcagcacatggcgggaaatgacgatggcctgcaacaggttcatgctgcgggtgtgcgcccacgtgaccggctctggaccgaccaccaaataatggccatccacaccgacgccatcagattccaatatggctgacatccagccttccaagccccatgccgcggcttcggattcatcggtcagcccgctgactgtccaagcacgctgagtgtcggccaccgcctcgccgatgcgcccgtccaggctcatccagccatcgaacggcggagcgacgaacgtcaccgtgctaccgagagaagcgccgagattatccgccaatgtgcggctgatgacaatctgcgtattattctgcggcgccgaacccttgaccagcttcggcaacattcgttgcaatgcctcaggtgaagcctcggtcatggtcgcggtggaggccgcgttcagatcaatgtcgttcccgcttttcacgtcgatcccagccttggtctgttcgccgggttgcaacgcggtgccggtgatggcgatgagttcgggcgactgccaatacgggagcagccgatcctgttgcggcagaatcttcgcaagctcggcggccgaggccggctgctgggagggatcgtcctgccacgtgccgccgctttcgggtgactgccggaacggttggccggtgcggggcctggcggtggcggtgatgaccgcctgcgtatcagccgggattgtcgccagcgcacgcgatctggtgggcggtatggtggtggtcataccgatggaggccaccattgcggcgattggcagcattaccagcagcaaggacagtagggtgcgggccttgtgccgtagtgcgtcgcgccagccgagtcgcagcgcggcccgataccggttgcaacgtgcgccaaggcttggcctagcggcatggggaatttgggcagagcgaccgacggtggcattggcaagattattgagggctgcgcgtgccatcatgctcccctttcctcaaggttgagcaaatcatccatattgctggagccggtttcatcgatgatacggccgtccttcaaaaacaccgtgcggtcggcccaggcggcgaagcgaggctcatgagtgaccagcagtacggccgcgccgcgatctgcgcgggtgcgcaacacttcgagaatcgtcatgccggcattggaatccagagctccggtcggctcgtcggccagtagtagacggcgtgggccgaccagtgcgcgggcaatcgccacacgttgcgcctggccgccggacatgtcttcaggtcggcgatcagccatatcggctacccccacttcattgagggattgcatcgcggcctcacgtgccttgcggggattccagccatccaattccaaggggaacgacacgttctcggctgcgctcagggaaggcagcagattgaaatcctgaaacacgtagcctatcgatttgcggcggatggccgcgcgttcggccactgacagtgtggccagatcgcggccttcgaccagcacgtgcccctgcgtgggcacatcgagcccgcccgcaagattgagcaaagtggatttgccggaaccactggggcccatgatggccacgaattcacccgggcgaagcgtgagattggcgtgactgagcgcggtgacacgacgtgcatctttgccgtgaacgcgagtgacgtcgtgtaattccagcgcgcatggggaagattgcgggagagaagaaagaacgggagaagtcatgatgtgctcctatgcactattgaatggtggcggtgagtgcggctgagcttgccgtgagaggtgccgaaacggggtgctgcgccagttgtgctcgcagctgggtctcatccacggtatcgagccagcgcaattccgcttcagtgatgaaaatatggtggtcgagtactagacgtgtggcgagttcggtgggcggtgtttgccggcgcagtcgggtgatgtcgtgcagcagttgctgcaaagcgtggcgttggtgttggatgagttcggaaacatcgaggccgggtatttccacggcgacggccagcttcatcaccagttcgtcgcgtccgcgttgttccggggtaatgggggagcgccaccatcggtcaagctcttgggcgccggaattggtcaatcgccataatggtgcggccgctgcggtgccgacatcattggatccgctagtagtcggcgcggtctcttcaatcagtccgtcgcggttcaaccgctgcagcgtagtggaaacttgccccatattgagcggccaagtcagaccgatggtgcggtcgaagtccttcttaagctgataggcgctggccgggcctcgctccaacagtgctaatagcgcttctctgattgccataccgcatcccctttgcatagacggtttgccttgggcgaaggttactgagtaactatcgttggatatcaggttactcagtaactacccatgacggtgctgtactcagggatgattcaggggagattcaggggatacacttgcgcccctcagttgcccacggcgacagctcccctcagggaggggagtcgagagtgtggaatacaaaaagtctcgcaagccagatgacatgtgactaattctcagaaagccgggcccgttgtgtgtcaaggtgtgccagtaacatcgtgacggtttgtgtgtaggtacaggttgatatccaagagcaagtactcgagaacgcaagtaccgaacgattacgcaagaaaatcagtattaagagaggtttcgatggcggttcgtggagatatccgtaatgtggcgattgtggctcacgtcgatcacggcaagaccaccctggtcaatgccatgcttcagcagtcccacgtgtttagcgagcgtgaggaagtgccggatcgtgtgatggattccaacgatctggaacgcgagaagggcatcaccatcctcgccaagaacacggccgtggaatacaccggtccgctggccgccaagtacggccacccggagggcatcaccctcaacatcatcgatacccccggccacgccgacttcggcggcgaggtcgagcgcggcatctccatggtcgacggcgtcgtgctgctcgtggacgcctccgaaggcccgctgccgcagacccgcttcgtgctgcgcaaggccctcgaagccaagctgccggtcatcctgtgcgtgaacaaggtcgaccgccccgacgcccgtatcgaagaggtcgtcggcgaaacctccgacctgctgctcggcctggccgacgacgtgcagcacgagggcatcgacctgaaccttgaccagctgctggagatgccggtcatctactgcgccgccaaggccggctacgcctccgtgaaccagcccgccgacggtggcctgccggacaacgaca

SEQ ID NO: 3612 - DNA, 8903 bp, Unknown
  R85_18m  MAG No. k141_31725
ccgtctgcggcaagcgagcgcagcaggtcggcgcgatggtagaagtcgtcgatgattttcttctggccggtgtcttggccgccgcctcccagaataaggtccacctggtcgggccagtcgtcgccttgattgtactggtggacgaccggttcgtaaccgtacagttccagacggcggcggatagtcagcacgttgccggaatcgccgtagatgttcatgtctttgggatacagggacaccacatcaattgttctggccatgtcgcgttctccttgtcgatgtcttcccgctaaggggaagtcttattcctcaccatgtcctcctgcaggcgggaggtggcgcgcgggcgctagagggtggttacttgcccacgcccgcgtcccgtacttcggtgatgcggcccagtacggcgcgggttttgagcatggcggtgtaggtgcagtagatgtgcttgcgtgtgccgggattggcgttgacgaatgcggtgaccgcctgttcgaggtcggtgttcgtatcggcgactggcacttggtcataccccaagcgcaatgccatgtcccaggcgcgcacgccggagaccatggcgacaccggacgcgcgcaaagaggtgaagtccacgtcccatagccagctcatgtcgcggccgtcggcatattcgtcgttgatggcgatcatggtgtccgcgttggccgggtcgaagctggcgagcgagaggcggaagcccatcgggttcttgaccagcagcagttcgaccggggaaccgttgacgtcgatgacctcgccacggccgaaagccggcgtgacgcgggaaacggcggcgatgagctcgtcggcggacacggcgcaggcgttggctgcggcagtggccttggatgcggcggcattgtcttgcatcaccgcacgtaccacggcgagcgcggcggccgcgttgtacaggttgtagacgccttcaagtttgacgtcggtggcgtagtcctggctgtccatctggaaggtggccttgtggtcgcccacggcggtaagtgtcacgtcggcggggagttctgccgtgcctgcggaagctcccctctccgaggggagctgtccgcgaagcggactgaggggagtactgactgaagggagcggcccggccataccttccaccgacacggtcgtggccatgtcgtcatcggacgggaaatagtggcgcaaatcgtcggcgaggccgaagtatcgcactgtggtgccagccaggaccttcgcggcgagcgcggcgatacgcgggtcctcgcggttcagtaccacagtgccggtagtcgccgcagccacatggctgagcagtttggccgtggtgtcgatttcaccgaatcggtcaagctgatcgcgcatcacgttcagcagcaacgcataacggggcttgacctgcttgacgaagtggacggcgtacgcctcatcgagctcgagtacggcgatgtccgcgtccaatttgccgccgaaagtgacttcggtgagcagtgcggagaccacgccgcgcacgaagttcgagccggtcggattggtgaacaccttcaatcccagatcggagagcatcgaggcgaccatgcgggtggtggtggtcttgccgttcgtgccggacaccaataccacgccaagcggcaactgcccgagcgtacgggtcaggaagccggggtcaatcttttctacgactttgccgggcaaagccgaaccgccatgtttggtgacgcgggatgcaaaccgcacgaagcggcctgcggccacggtggcgaacgcataccacggtttgcgggtctgcaccacggacgattggtcttgcgaaacatcgcgtgaaacgttgcttgccatcatcacaccccctgattgctgttgtagtcctgcggcatgtccttgaatttggacgtggcaccgaggaaggcgaggtggaaggtttcggtcgggccgttacggtgcttggccatgatgatatcggcctcgccggggcggtcttccttgtcgtagaagtcagggcggtggaccaggaacaccacgtcggcgtcctgttcgattgagccggattcacgcaggtcggagagctgcggcttcttgtcgttacgcatttccgggccacggttcagctgggaaagggccacgaccggcacttcgagttccttggccaagagcttcagggcacgggagaattcggacacctcttgctgacgggattccacggccttgcccgaggtcatcagctgcaggtagtcgatgactacgagtttcagatcgttggtctgcttcagacgacggcatttcgcacggatctccatgaggctcatgttcgggctgtcgtcaatgaacagtggcgcattctgcatcttggtccagaactggttcagggtgttccagcgttcgggggtgatgtcgtcggcgcggcgcagggcggccatcggaatattggtttcggcggagataatacgctgagcgagctccaccttgctcatctccaagctgaagaccacggaagtcatgttgtggtgcaacgcggcggcgcgggcgaagtcgatgccgagcgtggacttacccatggccggacgtcctgcgacgacgaccatctgtccgggctgcaggccctgggtcacgtcgtcgatgtcgcggaatccggtcggcacgcccttgttgacgagaccctgctgcagtttgtccagctggtcgagcgcgtcgtggaccaccgggccgatggcggcatagtcctgacgcaccttgcccatcgacatctcgtagatctcggactgggcgaggttaaccacatcctcagcctgcgatccctcggcggaataaccgagctgggcgattttggtgccggcggcgatcacattgcgcaaaatggcccgctgatggacgatctccgcgtagtacatggcattggcggcggtcggtacggatgcgacgaggctgtgcagatagtccgcgccgccgaccttgtcgaggttgccatccgccaacagctggttggccacgagcaccacgtccaccggctggctggcggaaaacagatcaatgatcgcgttgtagatcgtctggtgcttgggctggtagaaatcggtgacgtcaatggtctgcgaaacttcgccgatggcatccttactcatcagcatgccgccgagcacggccatttccgcgtcgtcatcgtgcgggggcacgcggtcgaaaatcgggtcgccagctgccgccgcctgcgcgccgccccggcccgcgcggtcgccacgatcgccacgatccgagccactgccgaacccattctgatacgagtgttcacttccttctgccatagccctcaagtataggaggtggcgtggcgagcggaagatatcgcacgactacgttcattaggtcgattcctcactcattaggtcactgtgcttggtaacaccacaaaccatgcgcttggaatggcggcattctgaggcgctcgatcaatatctctcaaagtccaccgacctaatgaatgcacaatcgacctaatgaacgcatgaaagtgcaagtcgtgccgaatcatcgcgcaccaatttcatcgttggttcaccttgcggtcagcgcggcgacacgctgaagcgtcaaatgtggatagaaaaaatagttatccacattttggggataagtctggggataatccactcatttatccacatattggggataacttggtggacaagctgaggataactttgtacggctgcactaggtgcttgcgcaacgtagctaagcatgatatgcgtgtgagcgtgcatagcaactccaccagcattcatcgccaaatcattgcgttggcgctaccgacttttgggcagctcatcgcagaaccgacttttatccttattgacaccgccatcgtcggtcacattggcgatgccgctttggccggactgtccatcggatcgaccatcatcctcacggcagtcggactatgcatattcctggcctactcgaccactgcgcaggtggcgcatctgctgggagcgggtcgtcgtcgcgagggactgcaggcaggcattgacggcctgtggctggccttgagcatcggcaccgtactgggattgggattgttcgcggctgccgagccattatgccgggcactgggcggtcagggcgaagtattggaacaagccgtgacctatacgcgcgcaatcgtgctgggtgcgccaggcatgctgatggtatatgcggcgaacggcattttccgaggattgcagaaggttcgtatcacgctgatcgctgcggtgggcggcgcggtggtgaacacggcgcttgatgtgttgttcgttattgtgctgaattggggcattgccggctccggagtggcgacgctgatagctcagtggttcatggggctgttcctggtaatccccgccattctgtggtcccgggcggacggtgcgagtctgcggcctcgtttggccggtattgcggcagccgggggcgacggactgccattgttcattcgtacattggcgattcgtgcggccatggtggctacggtcgcctgtgccgcgcgcatgggtactgccgtgttggccgggtttcaggccgtgaactcctcttggaattttgcgatgaacatgctggattccgtgggcatcgccggccagacgctggtggccacaacgctgggcgctggcagcgtgcagcaggcgcggcggttgacgcgggcgaccgggcgtgcggggctggtcaccggcgcggtaatcggcacggcttttgcggtagtcggcctgttcgccgggcacttcttctcccctacgccaaatattcagacgttgattgccgttggcatggtgacgatgggcatcttcttcccactgcaaggctggatgatggcaatcgacggcattcttatcggcgcgcgcgactaccgctatctggcaggcacctgcacgctgaccgccgtggtgtatgtgacgctcatactcatactggccaatatggtgacgccggcgctgacgagcgacctgatgcgtaccgccgtgctctgggccgcgttcaacgtggtgctcatgggagggcgcggcctgtccaacgggctgcgcgtgcgctcggacgcatggatgaagtaggtatcggccgcgcgaagtgctgggcgattccgtttacatcgcggcgcgagcggcggaatacatgccgcgcacgatttgttcgcgccacttggaccagccgtattgcttggtgatggtctcaccggcggtggcaccgagcgaggagccgtcggcccgggtcaggtcgaacagcatatccaacagcatcttgtcgtggtgcaagcggtcggccaactcctccgccacggccggatcataggggtccttacccgtggcaaattcggatagggtcaaatgctcacgcaccagcacggtggcccagtcgacgatgtccggcgcgtagcccatacgcttgagaatcaccggcacatggcgggcaccctcggcggcgtgatcggccacgaacgcgcgcttgccgatgtcatgggtaataccggccaacagcaacgccttgaaatgatcgtcatcataccgtcccccggacggtgtctcacgacccagacgcgacgtgacctccaccatatgccgatcgatggtgtaccggtgggcggccgaggcggacggacggttgcggacgccgagccattccggcatccatcgacccggaatgtccacgaagtcgatgctctcccacacttccataagattcggcccgcatgcaagcagacgaataaacagctcgcgcgattcgtcatcccactggttgtcgtgaatcgggcagtgcttcagattaaccaaggtagacgggttgatgggcaaaccgaattcgccggccgccacggccatacgcaacgccagcttggcatccttggcaggctcggcaccgggtgccaacaccaattcgccttcgtgcttggccacgccgggagccaccacgtcgaattgcggggcttcacgcttgccgccagagcgctgagagaacatctggaagaacgcgaatcgcggcttttcgtgggtcagcgaatgtccagcgcgggatgcggtggaatcaagcgagaaggagatgcgccggccgatacgggcaagcagcgtctgcaaatcgtcgatcgagtaggcggcacgctcgttttcgggccaagtcggatcggcaaggccaagcatggcagccactttggcctgatagggcgtcagcatcaggttggtatccttgccggccaccagatggatgcagtcgcgtacgtcgagcagacgttccacggcttcgtcgtagatgccgtgcgggcggtcggccagccatgagacggcgagcgcggagacgagcaccgaatcgcgcaaacccccacgggtctccttgatgtcgggctgattgacgtattggaggcggccgaattcgtcgagtcgggctttggcggagtcgagcagttcgggcaggcgcttgcgggcggccttgcgccagcgttcgaggatggatgtggcggtggtggtaatcagagcggtgtcgccggcgatgggcttcacgtccagccagcccatggcggcgggaaggtcatggtcggtgacttcctcgcattgggcgcgcgtgcggatggagtggtcgaggtccagaccgctgtcccatagcgggtaccagagtttgttggccaactcgttgagctgctggtcgttcaacgtgcgaggctcgtagatgatgaccaagtcgaggtcggagctggggcccagttgaccacgtgccagcgagcctaccgcggcgaagccgatgccggagtcgggcacggggaaagagacatccttgcaggccgcattccacagctccgtgaggcattgcatggccagttccgtgcgggctttacgcttggtcgcaccattccggtagacaccatcgtcatccggctggctcatatccatgaatcgttgtttcaagccatctactgctgaagtcattgcttcatctttcattgccaaaaaggtccccgcacggcgtcaattcgcggcgtgcggggacctttcccatgcagtccatccccttctaggcatggacgtctgtgttatcagatcgcggcggaaccggtctcaccggtacgcacgcgggccacggagtccagcggagcgacccacaccttgccgtcaccgatggtgccggtgccggcggacttgatgatcacaccgaccagcgtctcggcatccgcgtcatcggacagcacttcaacgcgaatcttcggaatcaggtccacggtgtactcagcgccacggtagacctcggtgtggccgcgctgacggccgtagccgttggcctcggacacggtcagaccgtgcactccggcggccgcgagggcctccttgacgtcgtcgagcttatggggctggatgatagcggtgatgagcttcatctcacctcacctccttgagaacagagctggcagtaccagcaaaatcgtaagcacgttcgccctggtcggcaagatcgatgccgccgacttcctgagcttcggtgacgcgccaaccgatggtcttctccagagcgaaggcgatgatcgcggtgatcactgcggagtagaggatggcgacgagagcgatgaccagctgaacgacaagctgcttccagtcgccaccagccagcagaccagtgccttcaccgaagaagccgatgaggacagtgccggtgaaaccaccaacgccatgcacgccgacgacgtcgagggagtcatcgtaaccgaacttgaacttgagaccgcaggccaggcaggtcagaacaccagcgatggcgcccatcacgatggcccacagcggggaaaccacatcggcggccggggtgatggcaaccagaccggcgaccatacccgaggcggcacccatagcggtgtagtggccggagcgaatcttctcggtgaagccccaggagagcatggcagcggcagtggcggcggaagtggagacccaagcgtagccagcggtgccgttggcggcgaaggcggaaccagcgttgaagccgaaccagccgaaccacagcaggaaggcgccgagcatcacgaacggcacgttgtgcgggcggaacggctgcgtgccgaagcccttacgcttgccgatgatgagcacgataatcagggcggcgactgcggcgttgatgtgcaccacggtaccacctgcgaaatcgtgggcggccgcgccgatagccttggagatggcgccgtcagcagacagcagaccaccgttccagaccatgtgggccataggagcgtagtcgaaggtaacccacagcgccacgaagatcatccaggtgctgtacttcacacgctcggcgatggcgccacagatcaggcctacggtaatcatcgcgaaggcgacctggaaggcgacgtccacagaaaccgggtagttgttgccgttcagaccggtggcggtgaacacgccgtcctgcgcgaccatggagtccttcagcaggaagccgctggccggatcgccgaagatgcctccgatgtcggaaccggcgtatgcaatggaccaaccccacaaagtccaaataatcatagtgaccgacagcgcggccgcctcaagcatcagcatgttcagtacggccttggcgcgaaccataccaccgtagaagaacgccacaccaggcgtcatgaggaaaaccaaggacgcggatgtcagaatccatgcggtgttaccggaatcaatcgctcccatgtctacctccctctctttcgttcatggcaccgggggctttgtgcggccggcgtcttatttgtctctacaatgccgtccccctgatgggggctaacagtttgtcagttaaagccggtctcgttttggtttcgttacgccaagttacgcgattgttaagcgtggctggaagcgtacgtgcgaccgctcgaggaaattttggcgcgattccaacggata

SEQ ID NO: 3613 - DNA, 10814 bp, Unknown
  R85_18m  MAG No. k141_31978
gacctcttccttaccaaggaagtgctctaccactgagctatcggggcgtggcggatagtggattcgaaccactgaagcacgaagcggctgatttacagtcagctccctttgaccgcttgggaaatccgccagtctgtttcccgccgcggtgtttgacctcaacaggcaacttggctatataaccacatattttccaagtacgcaaatcgacctctacgcgaaccttgttttaccgcggaattctgcggttttatcggcgtgtctcacagcgtggtttcagggtccgcttcggccctgcaaacagccccgaccaaggccgcaccccgcacttctaccaatcatttttcttatatggtgttccagaaccttgcaatggcgcggttttcgagtggcgtcgcctccttgcggcggcacagcgcatgccggcatactgggcgcatggcttctgatcttgtacatcacggacaatcattcgacgaccagccgctcggattcggcacgctggccattcacctcggcaacggggtcgacgccgaaaccggcgcgatccgtcgccccatcacgctggcgaacacctacgcgctgtcctacgacgcctcggccttggcgattgccaagcatctcgaatcgctggatgtggtgcgtttcgtggcgtaccccggtctggaatcgcacctgcaccacgaggtggcggccagccagctggcccgcccggactccgggttcggcggcgtgctgtcgttcggcctcgacaccgaccacgacgggcacaaccgattcgtttccaagctcaatgtgattacgtctgccgtctcgctcggccatgactaatcgctgatcgtgttcctcggtgaggatgacgagcgccagtacctgtacccgcctgagttccaccgcggcttcttccgtctggccgtgggtctggaggatacggacgatttgattcgcgacatcgatcacgcgctggtggaggccggattcgaggtgtgagaccgcaccgcgcgcatgatttcggcctcttccgccctgctgccgccgtcagtgagtcacaagatggctcggtgacgacgatggcagggctttttacgtcggcacagggacaatacctggcggtctgccgacgatgacggcacttatcgtcggcagaccgccagtttttggaccgtcgccgacacaaaacgccgatttgccgtcggcaatggtccaaaaactggccctataacgacgccaacgcggctcagcatcggcacatcgccatttcgtggcccactgccgacgctggcctcatgccacggcactcagcgtcggtagagagacaaccattggcacagcgacgacaccacgaacctgcgacacggaaaaaaacaacataccgtcgacctactgccgtcttgtgcaaaatgtcttaagccgctcggccaagtcgccgactgagcctcttccatagggaccccaatccgttacccagtgtagatgcggtgcaacgccgaactcaactacgttgcgcgcatgcacctttatgcatagcaggcatggctgggcgtttggcgggagcggttttcggctcccctctctgaggggagcccctctccgcctgacaagagaaaaccccgactgttcgtgggaacagtcggggttgttgaagttcgctaggcgactaatcagccgaggatggcgagaatgtcgcgcgcgccgacgatgaggtagtcctcaccctcgtagtggacttcggtgccgccgtacttggagtacagcaccttgtcgccgaccttgacatccatcgggatgcgctcgcccttgtcgtcacgacggcccgggccaacggccaggacttcaccctgctgcggcttctccttggcgttgtccggaatatacagaccggaagcggtctgggtctgggcctcggcctgcttgacgatgatcttgtcttccaacggtgtgagcttaatcgacactgtgggtcacctcgtatctacttgtagttcgataatgccgcgccagaacgcctcaagaggctgacgatcacttgcgttgtccctttgcgctaggacacatcgtagcgcgattattagcactctgccaactcgagtgctaacgctgtgagagaaaatcggcgaatcgcaacgctcagttgccgcggcgggcaagaatggagtccaggcctgcgcccaacgaatcggtggtcgccgctggcgcttcgacgtcggcacgctcctcggattcgtggaatgcggctcgctgggcggcgtttgcagcctcgtcatcggcgtccgtagcggcgttcgtatcggcatcatcgcgctgctccgactcagtgtctacagcgtttccggcactgacagccttgcccgcatcggcggccttggcatcgtccgcggccttgacggctcgggcctcgtcaatcaacttttccgccactgcgggttcgacaggttccgccttggacacctgacgggtcgacttgatctccaagctttccggagcgttgtcggcgttatgttccccgcccaaagtgaaggagatgagatcctgcgaggtggccatatcgaagacatccagtgctcgggcagggcgtacgctgaccagttccgacgtagcgtcggcagcggcatcgtcgcgctcatcacgctcgtcacgcaccgtaagcgatggttcaactcgaggggcgacggacttatccgacttagtcgacttatccgtgcgagcggaggcatcgggcgcggcggaagattcactggtttcggcagcggacttacggtcagcggattcatcgaccatagcagacggttcggcggcaggcttatcggcggcggactgtgcagtatcagacttctcagactgtttggcgtgctccgccgcggcctgatatgcggcggcggactgacgcaacgccttggccttggcctgctcaatctcggcatcgcgtaacgcgcggcgaatctgccgctgttccatgacctcggtggcagcatcctcaacatgctcggaaagctccttggcaggcgcagttacggccgcaaccggttcggccttgttcacacgcttgctgtccttggactcggcagacggtttcttggaccagcccgtaccgctatgagtccgctcgtagcggaccaccttgcgctcccattgccgggcctggcgtgaggcattggctcccagcaccagcaccagcagtaacagcacgaacggaataagagcaagcagcgggctgaaatgcagggggaacgatacggcaaacaccaacacggttatggcaagcaggcatacggcgagaatctgccggcggcggatggccgcgcggcgcagttcccgcacatgggcgatgtgctcaggtgtcagcctcgctgacggtgttgatgctggcattgctgcccctttcgccttatgcggcttgatgtctccgaatcgtctgccgttctctgcatcaacgatatgcagggaaggcgaataacgatcctgccggtgctcgtccacacgtttcatgccgttggccgtacgtacgggcagccatacaacgataataatcgccacaatcaccagcacgacgacagtgctcagtgactcataacccatagagtcaaggataggagacgtaccgacgaactggggctttccgtccgggcgtgtcggagcggaattcttccggtcgacgcttatctggaaccggtggcggcgagtctggcagagaacccttgccccatatcttcagccaacagcgcaaatgttacgtggtcgcgccactggccattgacatacatataccgctcgcgcagtccctcatgatgggctccgaccttacgcactacagccaaagagcgcgcgttatccggaagaatggcgatttccagccgatgcaacgcgggcccgaatgggtctccgagtgcccaatcggcaagcatggccagtgccatcggcgcaaatccgtggccggcgtaccgttggtcaacccaatatccgaccacaccggtgcgcatggcaccatacgcgatggctcccaacgaaatctggccgacgatacgcatctggtattcgatggcgaaaatcacgccgacgccatgctgctcattacggcgctgtcgctgcacccattgattgaaggtgatggagccgccatgcatcgggtcgccggattcccaaggcgccagccagtcgttgttgcgccagcgcacttcgttccagccgtcctcatcgtccatggtcagggggcgcaggattatcgggaaaccgggatgggtgaggcgcggcggacggatctggtggtccagcttgaacgcctctttaatcgactggaaaactgacacggcctttattgtagccatatgaagggcttgcgccgctaccgtggccactttcgttttacggtggaaacactagattgtgcggtatgagcgaagcggacaatggcatgaatatcggcagcgaccacagcggcacggagaaaacagaaaagatggataaagcgacgctgcgccaccatatactgtctcggcgcaagcgcattccagcggaagaacgtggagcggccggtgaattgctggtgcgacggttcccggcacacatgattcaggatggttccacagtggcggcatatgtgtcgatgggttcggaaatcgaaacccggccactgttgcgatggctgttggctcatggctgccacgtgttggtgccacgattgggatctgggttggaaattggctggagtgtgctggattcattggaatccttgcgctcgatggatgcagtgggtggcgcgaacaatgccggtagctgcagctctcccagcaccgtccatcacagacccgatgagccaactggcgcagttctaccgcccgaagcgttggagaaggccgatctggtcatcgccccggctttggcagtggacccgcaaggcaatcgtctggggcgtggagccggctggtatgaccgggccttggctcgacgcaagcccgcgtgccccctgattgcggtgtgctggccgtgggaggtgttggacaccgatttgccggccgaaccacatgatgtgccggccgacggagtgctgacgccggggggataccggcggcttggcgaatcgggccggctgagttgaccggccggccaagatactcggcgcaagccagactgaccaaccagccacgcacactggccgatggaaccagagtggcaaaagcaggctggctagtaagaccgtaacgccaatgtgtcagggcggcgactaggatatgaacggttgcacggcatggtgttgcacgccatgcgcgagaaatatgactttgttggaggaatccgttgcctacctatcattaccgttgcaagaactgcggctatgacttcaccgaacagcagtcgttcaatgacgacccgattaccgtgtgccccaagtgctcgcaggagcaggtgcgcaaggtgtattccgccgtgccgattgagttcaagggtcacggattctaccgcaccgacaaatccggcaagtaaggtcggctccccgtttttcctctgtaaacgacggtgtcgacggcggtatgccgcggatattggcactacgggcactgtctgttgcacgggtttgaagcgttgtggataacttggcaagctagaaccacataggtcgattcagcttgcgcttacgaaaaacttcaggtcaccatggttgcatggtgaccttttcgtttattaagccgcctgcgcgcggctcattgcggcgacggcgcatggcggatgccttgcgccgactcactgctgcgttgtgcgtgggactcgcagtgttgtttgggcttgaagccgtattggccgtggtggagaccgagccgatggtggtggccgctcgctcgattcgacggggtgacattattctggccgccgacgttcagttggctgatatgccggtatctgcgataggcccatcttgggcgtgcaatattgaggatgtggtgggcaaggtggcgcaaatcgatatcgaagcagccgatcccatttccacgcatatggccagagatgcgcccgtagcaccgaccggcactacggtgattgaagtccgcttggccagtagcgtcgacgatgtattggccggcgatcaggtgagactggtttccgccgtcggttgcgaaggtgccgattgcacgctggccgagaacgccacggtgatgaatgtcgacaaaccggatacgactggcgcattgggaagcaacgaccgactggtgtcgttcgcaatgccgccggaggccgcggccaaggttatggagctgcaacaggccggagcgattatggccgttgtgcggtaggaagcggaatcggccttcggccgtttttgtgttttccgcagccgtagggctgcggaaaacacaacatcagagcgcacagagtgcgcctcaactcctactcgcgctcgttgaaaacagcccagtgtggaggcagttcgccgaggatgcgtttgtcgtcgtcggattgccgttgttggtcggtctgcatgtctccgggctcgagtttgacgctgtcagcgtcaaactgctcagtgcctttcatcaccacgcgcttgtgcttgcgcggtgtgcgccgtgtagccgagtattccgccatgattattcaacctcgcggtagatctcgccgatacggctgacgatacggtcgacttccttatcggggttcacgaaggcggcgacactccagacggtcatcacattccagcccaaggaaatgagatcctgtgccgacaaacgatgacgcctgcgcgtggattgcacggacataaagttcgcgtcatcggtctgcacggccaaggcaaacggcttgtccttcaatcccaccacgagcggaatcttcacgcccttgtcgaatccataatcaacagcagcgttcagtcctcgcgcgcgcaacctgtcggcgatatcgtcgaacagcacgttgccgcctgccgcatcacgcaacggaagcaccggacggtcgtcaagctgttcggcccacgtcaacatggtcttcaggaaccgaggaccggactggtgcagtcgttcttcatccaaatcttcggaaccaaaggccgacacaatatccaagctgtggtccgccaatgccagggcatccagcaacagtccgcgaccgcctgtgctttcgagcggaccgaactgctgaagcagacgtccgtgcgtggttttcgcatagcacatcgacagaatcacgtcagtggcacgacctccggccacgtcacgcaaggaaaccagccgcacatggcgcaggaatcggcccatcgccttggatttgcctgccaacgacttcaattcggcacccaagcgtgtgcggaatgcgtcggtcaacatcacgaccacaagtcgatagctggaaggaaccacagcaaaaccggcggcacgttgcgtaatcagacgcaccacttcatcaatctccgactggctggattccaccagaccagaagacataaccggcacaccgctcgcttccacacggtggaaccgcacctcaccggcagccggctcggtggccacatcatagcgaacaggaccatatccctcggattcaaggaatgcggacaggcgcggcgcacggcgagacggggcagcatccacctcgatatgaggcaacgtgtcgatcagctgcttgacgctttcgctggttaccgtcgcgcagtgggcgatcaccaccacctgctgcacgcggccgatgatggacagcaactcgatagcgggaatgtgcgcgcacgcatcgagaatcgccacatcagccagcacacccggctcggtgagtgcggcgagcgtacccggtgcggccaccagaatcggcttggccgcggccagaatctccggatgatcacggcgaatcctgctcagcgacacactggcgcgccctgccagcacggtgtgcatctggttggcttcctgagtgcgggagaacagcatgtcgcacaggcggcgcatggattcctgcgacaccatcggtccgatggagcgcacgtgctccacatcgacctgtgcgaagcggtcggatgcggtctgcagcgcggcaccatcctggttggagatgatggcggaagaacgcacaatgtcctcaaacacggtggtccaccatgccagctgcacttcgccacgcacctgctccacgcccacccggcgagcgttgagatcggcgaccagttcgttcagaccggcagaggcgaattcctgctccagcaggcaacgctccggcaaggtgtccagtgccttgcgatcatccagcagtgctttcaggcgtgcttccaccttctcgaaatcggcggtttccagattgccaccagcgggtgtggtggaaagcacggtatccagcgcggtcatattgctgaccagcgcctcttgggtggagatgatctcgtcgagcttgctgggcagcaccggccaaccgccgtgaggcacgaactgatgccactgctccccttgcttggcgactaccttcaacgcttcgtgcaagtcctcgacctgcgcgccgacgcgcagcagatccttggcttccttgacgtggcggcggcgctcccagaatcccatcgacgtgccctcggccttgcgctggctcttcggcttggtggcctcgatcatggagctgatgtctcgctcgaaaatctctggctggaacacgtcaagcactcgtcgcagattcttcaaaaccgtaacctgacgctcccactcgcgagtggtgggaggaaccgggaatccgcaggtctgcacggtgcgtgccacctgctcacgggtggcgggcaggaagcgacgcagcaaatcgtccacgcgctggtaagcggttaccgcttgttcttcagtggtgatggacgccttgtaccatgcggtgtcttccgggccgatggtgtattcgccgagctcgccggcacgttccatcttgctgatccatgtgtcaatatcgttggcgacgctcagggcacttgactcgtcaagtcgaacgtgggtggcggggtgcgtcgggagcacggagatacgggccaggttctgaatggtctcgtatgcggacacattccacttatcgttgctcccgtgcaggtcgcccagatagcgggtcaagcgcgagcgcacgcccacgagttcgtcggccagctggtcgaatcgctgggtggcgactccgggctggaatccgactgcggcaatcagctgcttatcaagcgcggcgttggcgtgttcatcggatacatccagtacctgcgccttcatctcattggcggaggccgtctggatgaacagacgcttctgctcggccacgccgggcacgtacagcacggaacgaccattcatcaggcagcgcgatgcgatggccacagcctgctccgcggtgcccttcgggaaggtgccgtcgaccacgatgctatggccattggcagcaagtgacgcggcatatcgcaccgtattgtccacatcgccgacttcgtactcagcatgcgggtctacgtcgaaaggactgtattgcggaatattggcatctttgagcgcggtgcgggcggatttgtcgccggcaagcgcgtccaacagcacattgccggtggggccattctccagctggtcgatgaactgtcggctttcgctgatcatctgcgacgaggggtccatgaagcatccgagcacaatctggcgctcgatggcgaagccggagatacgctccgatgcttcggacgaaatacgggcgaacatcgcggaagtttcgggagtgccactgtcatagctggcaccgtcaaacagggaatcctcatccaggaacaccccctgctcacgcaatgcattgacgaacgcggcgttcagggtcacgcgaccggtgaatcgaatggtggtcgacaagccatcatcctcgatcgtgacgctcaccgggtacaacagcaccggcagcgcgttgcccctccacgtggccacaccgaccacgagcgacaactccgccacgcccgaaatcctgcgcttggcggcctggtcatccagtacgcgcccgatatggcgttcggcggccttaagcacacccgtgtcacggaacaacgaatccaaccgaacatggccggaagcgaacagctgggcgatgccggagggatgggcatgggtcatctccagcttcgcggccagttgattcacatcctcgagcggcgatggcggctgcatactgcggtattggtcacgccagcgacggatgcgattcagaccttccgtgagattctggttctgagtctggctctgggtcatctctcgactcactttccaaccgcttcgcggtattcctgatagcccttgttgtgagacagggcttcgtcaatatcggcctcgccacgggcggcgagccaagaatacatgtcgtcgtacaggtacggattcatggcgaggaacgccagtaattcgggatgacgggcgacttcgaactgaacgttgaaatcttgcgtggtttttgcctcgtcagaggtcaggccatcgacttcgactgccggctcctgtgctttcagctcgcccttggccacacgctcgaacaccgagccgggctcgaagaccggagtgtgtacgcccgtggagtagatatcagacgcttcatacgcttcggagaccgactgctgggcggtttcggtcgccagctgctgatcctcgggtgcgtcggttgccggttgagcggtttcaggctgggtggttgtcggctgggcggtctcagactgagtgttttcagactgggcggcttcggactgagtgccttcagaatgctgtgcaacagcgtccaccggctgagaatcgtcggtattcggagcggactgaacgttttcggctgacttgcttgcgccagccaccacatcggattcaacaaccgcc

SEQ ID NO: 3614 - DNA, 5375 bp, Unknown
  R85_18m  MAG No. k141_32296
catccgccagcaagccctggaaggcactgaggtccaaggctgcgtcagctgcatgctctgatcgttcgatggagcgtataccgcctttcttcggcactcggcgtaccttcgtacgccttcggcctcagacggcggtctccgcacacatcgaacaaccagaggccactctaaggaacctgcaatgtcaccaatgatttataaggcactgctccggctgaccgcgccggaggagttcgaaaacaagcccgccgacaactcccaagacgagtaatgcaaaggaatccccatggcaccgatttccattccgcgcaaaccgctgaaactcatcgaccgcgtctccgcaatcaactggaaccgcctcgaagatgagaaagaccttgaggtctgggaccgcctgaccggcaacttctggctgcccgaaaaagtccccgtctctaacgacatccccagctggcagaagatgaccgaggacgagcacacgctcaccatgcacgtgttcaccggcctgaccctgcttgacaccatccagggtacggtcggcgccgtctccctgattccggacgcgctcaccccgcacgaggaggccgtgtacaccaacatcgccttcatggaatccgtgcacgccaaaagctactcgtccatcttctccaccctgtgctccaccgaacagatcgatgccgcattcgactggagcgagaacaacgagtttctgcagaagaaggcggaaatcgtactcgactactacgagggcgacaacccgtacaagcgcaaggtggcctccaccctgctcgaatcgttcctcttctactccggcttctatctgccgatgtacttctccgcgcacgccaagctgacgaacaccgctgacgtgattcgtctgattatccgcgatgaggccgtccacggctactacatcggctacaagtaccagaagggcatcgcccagctgagcgatgccgagcgcctggatctgcaggactacacatacgacctgctcaacgagctgtacgacaacgaggtggagtacacccagtcgctgtacgatcgcgtgggcctgaccgatgacgtcgagaagttcctgcgctacaacggcaacaaggcgctgatgaacctcggttacccggctttgttcccggctgagatttgcgatgtgaaccccgcgatcctggccgccctgagcccgaacgccgacgaaaaccacgacttcttctccggctccggctcctcctacgtgatgggcaaagccgaagaaaccgatgacgacgactgggacttctgattcacctcggcagcagcaccgtcagcacaaaccagtggtcctcggtgcgaatcgtcacttcgccgccgtactgcatggcgatgtgccggattgacttcacgccgaacccgtgccgcgacgaatcacgcttggtggtgcgcagcgcgccggtcgaatccttcttgagcgcggaatcgtagtagttttccacgcgaatcaccgtgaactgcccctgcccgtacagcgcgagccgaatcagccgctgctgcgggtcgggcagtttgctggtcgcctcgatcgcgttgtccagcgcgttgccgaacagcgaggcgatatccatcgacgacatgccctccagcagcttgccgtccgccacggcggtcagcgtaatgccgcgatccgcgcacgtgcgcattttggtggtcagaatcacgtccagcaccggattgccggaatgctgctgggcgctgacctgcgccaccgaagcctccagctgctcgaagccggccgccgcatgctccgggtccacctccgcgcgcaacgccgcaatctgatgcttcagatcatgcgcaagccgcccgatcgactcgatattctccttggacgccagatactcctgatgctggctttccagctgagcgttgatggacgtcagctcggcgctcgcctccatgcgccgcgcctgctcctgctgcgcgtacagaatcgcgaacccgcagaaatccaccaacgtgcggatatagaacacctcctggcccactgtgccggagaacggcgtattggtggacacaaagctcaggttgctcatggcgaacgtcacgatggtgatggctcccgtaccgattgccagctgcgctgtggcgacggtcggcgcatcattggcaaaattgccgcgttcgattagccacgccaccgtgaagcagacggcgtacgtgaccgccagtaacagcagtgagaacaactgcgcccgctcgaggttctcgcccaagttcaggaacatcaccaactgccagtgcaacgaggcgaccagttcggccagcacgaacgcgcgcgccgcaatatacatgccctcgcgcttgccggtgcccgcgccgaacaagataatcgcccacatgccggcgaacgcaagcagcataccgatgacccagaaccagatgggcatcacgccgtcgaaatactggatagcgatcatcgccggcagtccgataagcccgaccgcaatcgtgcgccgcagcggcacgcgccggtagatgaccagcagatagaccacgcaggccagccattcgcagatgccggtgtacaggcgcgggatgtccggcagcgcattggtgatggtggtgctcatcacgccgcgcccatgtagttcgccagcgcggtcaggaacgccttcttgcgcggccggctcacccgcagcagctcctcgttcgacatcacgcagtcctgcccctcgacgcccaccacatgccgcagattcaccagatagcaggagttggaacggaagaagtcctgatcggccagtcgctcctcgaaatccttgagcgtgccggacaccgagagtttgccgctcaacgtatgcacgatgatcgtgtgccgaatcgactcgagatacagcacatccgccagctccacgcgcatctgccgcccgccggcctcgatgagcagcgactcgctgccacgccgacgcaccatatcgatcgaccgtttcagctcctggcggaatgcgaagtacggcaccggcttgagcagataggagagcgcctgcacttcgtacccgttgatcgcgtactgcggggcggcggtgatgaacacgataaccacagtgttgtcgcgctcgcggatgcgccgggccgccgccatgccgtccatgtgctgcatctcgatgtccagaaacagaatgtcgtacatcggcgtatatttctcgacgatttgctcaccatcgtcgaatacggaaatcgtgaattccgtaccggtttcgctgcggtactgattgagatagtcaagcacccgttggcaggaggcgggatcgtcctcgaccactccaaccctgatatcgcgcatgaccgcaccttcctgtcgcgtcttctccaagcatcttatcctgatgtccctgatatcggccggattccagccgcgttcgcacggcggcgctacgctggagatatggaacaggatccgttggtcagcatcattattccggtgtataaggtcgagaagttcctcgacgaatgcgtggcgtccgttgctgcgcagacgtacgccaatctggagattctgctggtcgacgacggctcgcccgacaattgcccggccatgtgcgacgcctgggccgcccgcgacccgcgcatacgcgtgattcacaagcccaacggcggcctgtccgacgcccgcaacaccggcatcgccggggccaccggtgcgtacatatacttcgccgattccgacgacaccgtggcccccacgttggtggaggactgcctgaacgccatgcgcgagtatgacgccgacctcgtgatgttccagttcgacaccatctccgagaacaacaagccgctgctgtccaactatcgccacaacgacttcaccgaggtgcagatcctgaccccggtcgaggccatcaaaaagcaggtcaaggctgagatcgacggctatttctgggccttcctggcacccgcctccacctatcagggcaccggattctccttcccggtggggcgcaaaatcgaggatctctcccgtatctgcaacgtgatcggcgaggccacgcgcgtggtccgtctgcccaaggcgctgtaccactaccgcatgcgcgagggatcgattaccgccaactgggatccgcagctcacccgcgactggacccgcgccgccgacgaccgcgaggaatacatcgtccaccgattccccgagcttaagggcttcatgacgctgcaacagctgaatttctttgccaacctcgattacgagaccatgcgccagtcgctgatcgccgggctcaagatcgatcccgaggacgccgacgcgcttcgtcgtcgcatcgagggcctgacccagtccgccgatgagggcgatgagcccgtaccggaaacgttgcgtgagttgctcggactgctcaagctgggcatcaccaaggtggccgatggcacgttcggtaaggccgatggcagcggtactgatgacgatgccgagaacgatgacgtaacgctggccgaccgtttccgcgacatgcgcgaggactggcgccagctgcgcatccagcgcatcgaaaacgccgaggagcgcaaggccgagcgcaaagccgcccgcaacggcgtcaccttcgagtctgtgttgcattagtcggcgactgatggaatccgtcagttcgggaagagcaggcctgctctacgccgggcgtgccggttcgcacgttcgagaaacaggtgtgtcatgggccgaaccacacaacacccccagaaacgcccataaagttaactacattttcagacacgccacttgccttggtccacggtccgtgtatagtagttctcggctcaacgaagagaaccttcactgaaccggaaaaaagtaaacgctgaagcttgcagtttccgaaagcaaagttgtacgtcggtggcgagggcggaagcgcagtaaagaacaaatccctttacaacggatcgtgaggcacgtacctgcctctgaaaggattagtaattatggcagaagtcgttttcgaccacgtcactcgtatctacccgggcaacgataagccctccgtggatgatctgaatcttgatatcaaggatggcgagttcctcgtcctcgttggcccttctggctgtggtaagtctacgacccttcgtatgctcgccggcctggaagaggtcaacaagggccgcatcctcattggtggcaaggatgtcaccacgatgcagccgaaggaccgcgacatcgcaatggtgttccagaactacgccctgtacccgcacatgaccgttgccgacaacatgggcttcgccctgaagatcgccggcactccgaaggaagagatccgcaagcgcgtcgagaaggccgctgagatcctcgacctgaccgagtacctcgatcgtaagccgaaggctctgtccggtggtcagcg

SEQ ID NO: 3615 - DNA, 3660 bp, Unknown
  R85_18m  MAG No. k141_32333
cattcgtttctggcatccgggcggtgacttgaagcccgtggccatcgaaaccgacgtgcaccccggctttatgaccgattggcagcagccgctcgtggtggctttgactcaggcgaatggtctgtcgattgtgcacgagaccgtgtacgagaaccgtttcggcttcaccaagccactggtcgagatgggtgccaccattcagctctatcgcgaatgcctgggctccctgccctgccgtttccagcagcgtaactacaagcattccgctgtgatcttcggtccgaccccgctgaccggccgcgatattgacgtgccggatctgcgcggtggcttctcgcatctgattgctgcgctggctgcatccggtccgtccgatgtgcatggcatctcgttgattgaccgtggctatgccgacttccgtggcaagctcgaggcgctcggcgctgacttcgactgatcttcctggcttctctcattgagagaagccagaattgtattgagccgtttagtcctcgaattgtttggacagcggcacgagcatcgccgtgattattccgaacaatacggtggagatgaacaacactgctgctaccggcatccggtcataggcccatccgtacaccatctggccgagcggctgggcgcacatgctcacagccgcggccatggacatcactttgccggtcatcgcttcaggagtattgagttggatggtgggcacggcgatgaggttagtgaaacagctggcaatcattgtgccacaagtgaagatgatgagtatcatgagcttggtccatgcgccgaccggcagcaggaatactatgccctgtggaaccatggctaacgcgagtgcggccatcaatcctggcaaccagcgcatggtgagttttgcggcgaacaggccggcgatgaaggcgcctgctactccggaaacgccaatcagaccgtcggcgatgccatacacggtggcattgaagcccagcacggtgcgaatcgtgtaggggaaaccgacgccggagtatccgatgagaacgaagttcagtgcggctgagaacaacaacagtttgaacacgttgggacggtctttcacaaggaatcgtatgccggctttgaggtcttcgattggtgtcggtagttcttcgtctccgcggtcaggtgcgctgagacggataaagcattcgagcgcggccgcgccggcaaagctcacgatggtgatgatcatcatgaggcgaatgccgaacatggcatatagcacgccgccgaggaagcttggcagcagggagctcaactgctgaacctgattgatcacggccatgccttggcgcatagtggcagggccgtactgccggaacatctggggaagcgcggcctgtacggtcggcgtctcgaacgcgccgagtacggcgagcagcacctgcatggtggcgatggccgcgatattgaagcccgcggcggcgaaaacgatggcgctcgccagcacgagcgtggcggagatggcgtcgagtgccaccatgatcgtgcggcggttgacgcggtcggccagcacaccgccgaacggggagagcaggatggtgggcacgatggatacggccagaatcgaggcgaagatggtggccgagccggtttcgtccagcacccacatcgacatggcgaaacgcagcatcatattgccgaacagcgaaataccctggccggcgaccaacaacacgaagtcgcgggaacgcggcgggcgctgggggctgttgtcgttcttgcgttgtattgctgtgttcattgtgagcctttccttggctcccctctctgaggggagctgtcgccgcaggcggctgaggggagtctgtcgaacgtcatcatgcctttggcggtcatttcgataagttcgtcgtcgaaaatcggcacgccaatcgcgctgagcatggctgccagacaccgtacgcggtgctccatctcggacaaactcgccggatagaaatacggcatcagccagtagttgggcaggagcgagagcagctcggcggcctctcgcggatatgcggtggggatggagccgtccttgacgccctcttcaatcagcggcaggaaccgttcgggcaggtgcttgctccagatccgcatgtttgcggcgaacgaaaccgggtcgctcagcatgggcatggcggcgcgcatgatctgcacatggtcctgtgcggtcaccgaatagtgccacaatatgcggaacttttcgagagcggtgaggtcgctgcggcccatcaccgattcgttgaagtcgtcctgcacgtcgttgtcccggttgatgagctcttcgaggatgtcttccttggatttgaaatgatggtagatcgcgcctttggaaaggtcgccgagttcgtccacgatgttctggatggaggtgtgctcgtagcctttggttatgaacagctgttgcgcggcgtcgagaatgcgattgcgcgtcacctcggggtgcgcgttacgtgccatgctggcctccctgcggtatgcggtatgcggcgttgccgatcactatagataccgaccgacggtatgtatagcggttccggcgagccccaacgtttttcaggggattgctgatggccgattttcgcttggtatgtttcggaatattgcgggggcgatctataggcataccggaccgcaagtgtcgccgttctcggtatccttagaagaatgagccctgaagccttaagtgaactgatttccaacattgcccataacctcgtcgcagccggccaagccggagaactgaccgacgagctgatcccgcccatcgacaagctcgccgtcatgcgcccgaaggaccgcgcgcacggcgattgggcctccaatatcgccatgcagctggccaagaaggccggcatgaagccgcgcgatctggccgagccgttcgccgccgcactggccgaagccgacggcatcgccaaggtcgaggttgccggccccggcttcatcaacatcacccttgattccgcctcggccgccgccgtggtggacactgtgcttgccgcggcccctgcggtcgatggcgacaagcacctgaacaaggtcaacgagtacggccgcaacgcccatctgggcggccagaccctgaacctcgagttcgtttccgccaaccccactggtccgattcacatcggcggcacccgttgggccgcggtgggcgacgccatggcccgtgtgctggaggccaacggtgccaaggtggtgcgcgaatactacttcaacgaccatggcgagcagatcaaccgcttcgccaagtcactggtcgccgcctgggccgaggccaacaagcttggcggcgccggttaccagaccgaaaccccgtgcgacggctacaagggcgcctatatcaacgagatcgccgcccgcgtcgaagccgaagccaaggccgacggcgtgaacctgaccgcgttggcccaccaggatcagggcctgaacgatgacggtgaaccgctcggcgaggacgacaccgaagtgcgcgaggaattccgcaagcgcgcagtgccgatgatgttcgacgagattcagaagtccatgaaggacttccgcgtgaacttcgacgtctggttccatgaaaacagcctgtacgccgacggcaaggtcgacgccgccatcgaagagctcaagtcccgcggcgacatcttc

SEQ ID NO: 3616 - DNA, 6025 bp, Unknown
  R85_18m  MAG No. k141_32750
acacccgcggccaggacattgacggtgcctgcgggcagttggccgctaaggagcggtagttacttcagcgcatccttgattgcgtccacgaagtagtccaaatcagcgggcttgcgggacgtgatgagcttgaagccgttggcgtcgtccacgtgcagctgctcgtcgacgtaatggccgcccgcgttctcgatatcggcggcgatataacggcagggcgcggcggtcttgccagccaccagacccgcgttgaccagcagccacgcgccatgacagatcgcggcgatcggcttgccttcgtgcgcgaactcctgcgccagcgcgatcgcatcctcattgacgcggatacgatccacagtgcaggtaccaccgggcaccaccagtaggtcataatcagcggtctgcacgtcgctcagcagcgcatccggcgtcagcgtctcgccttcgtagcggtcgtgctgcaccgtctcacacgggtccaaggtagtggcggcaagcgtcaccttggcaccggcggccttgagatcgcgcagcgggcgcgtcagctcggattctcatattccagaaacgggtgcggcgcatgtaacgggcggtaggtagtctgaaggactgtaatgcaaagccgaacaggggagtgaagcatgtcgttggcggtacgagtcatcccgtgcctggacgttgacgccggtcgcgtggtgaagggtgtgcatttcgaaaacctcaaggatgcgggcgacccggtggagctggcggccgaatactatcgtcagggcgccgacgagatcaccttcctggatgtgaccgcatccagctcccaccgcaacacgatgattgacgtggtctcccgcaccgccgaacaggtgttcattccgatgaccgtgggcggcggcgtacgcacgcccgaggacgtcgactcgctgctgcgctgcggtgcagacaaggtcggtgtcaacacggcggccatcaatgacccgtcgcttatcagccgcgtggccgaccgtttcggcaaccaggtgctggtgctctccgtggacgcccgccgcgaaaagggcgagcaacacacgcaatccggcttcgaggtcaccacgatgggcggccgcaaatccaccggcattgatgccatctggtgggtcaagcgcgccgagcagcttggcgccggcgagattctgcttaactcgatggacgccgacggtaccaaggaaggctttgatctcgagatgattcgcgccgtgcgcaaggaagtcaagattccgatcatcgcctccggcggtgccggcaaggtcgaggacttcccgcccgccatcgaagcaggtgccgacgcggtgctggccgcatccgtattccattacggcatcctgaccatcgccgatgtcaaggcggaactcaagaagcacggctacaccgttcgctaaacgaatacaccttgctcccgctggacgaacaatccagtggattgttcgtagcagtgcgctatgcacatgtcgcacataatccgggagctgtcagcgaagctgactgagggtggtccacataaggaagataggtatgacagacactacatacgacaattccactgaactcgatccccgtattgccgcacgcctgaagcgtgacgccaagggcctggtcgctgccgtcatccagcagtacgacacacacgaggtgctgatggtcggctacatgaacgacgaggcattacgccgcacgctgaccaccggccgcgtgaccttctggtcccggtcccgtcaggaatactggcgcaagggtgatacatccggccatgtgcaatacgtcaagggcgtgtccctggattgcgacggagacgcactgctcgtcgaagtagaccaagttggtgccgcctgccacaccggcaagcgcagctgcttcctcgaaggcggccccctgtccgtggtcgaaggccatcgcccggccgagcagtagaacgggcttccctgactgggggaagccgaacgaccgcgtactacgaaacaagacatcgagttgtaagtaaaggagcgaatatgagcgaatgcagcgtcaaacacctgaagtggggcgccacctggcccagtcgcggccagttccacgaactggccgacgccggctaccgtgtgattccgatcgtgcgccgtctgctcgccgactcgctcaccccggtcggcttctacgagcgtctcgccggcggccgatccggcaccttcatcctcgaatcggcggaatacggcggcacgtggagccgttacagcttcatcggcgtcaactcgatggcccagctgcgctccaacaacggtcaggccgactggctgggcaaggtcccggttggtgtgccagtcaccggtgacgtggtcgaagtcgctcacgccacgttgaagactctgaaggccccgcatgtggaaggcctgccgaacctgaccagcggtctggtcggcacggtcggctgggatgccatccgccactgggaaccgaccctgcgcgccgaagctccggacgagaccggccagcctgagaccgtgctcgccctggccaccgatatcgccgtggtcgaccacgtatccggttcggtgtggctcatcgccaacgcggtgaacgtggatgataaatccacccgcgccgacgtcgcctacaacgaggccgtcgctcgactcgaccagatgcagcacgatgccgccaccccggctccgggcgagtcccgcgtcaacatcttggacgaaacggtcgcccagcctgagctgcgcttccgcaccgagaaaagccactacgagcaggccgtcgaacgcgccaagcagcacatcgtcgacggcgacgtgttccaggtggtcatctcccagcgtctcgacatcgattcgcctgccgacccgttcgacgtgtaccgtgtgttgcgcacgctgaacccgagcccgtacatgtatttcatggcgttgaccgatgctcggggccgcgacttcaacgtgatcggctccagcccggaaaccctcatcaaggtggacaacggccacgcgatgaccttcccgattgccggatcccgccctcgcggcgccacccctgaggaagacgaaaaattcgccaaggaattgcttgccgatccgaaggaacgcagcgagcacatcatgctcgtcgacctgtcccgcaacgacctgagcaaggtgtgcgtgccgcagtccgtggaagtcgtgcagctcatggacatcaagcgtttcagccacatcatgcacatctgctcgacggtcaccggcaaggtcgacccctcgctgaccgcattcgatgtgttcaagtccgcgttcccggccggcacgctttccggcgcgccaaagccgcgcgcagtcgaaatcatcgacgagttggaaccggccgaccgcggcatctacggcggcaccgtcggctacttcgatctctctggcaacatggacatggccatcgccatccgcaccgcgttcctgcgcgaccatgaggcgagcgtgcaggccggtgccggcattgtgctcgactccgtgcccgctaccgaatggcaggagacgcgcaacaaggccgaggccagcgtcgaatccatccagatcgccgcccagctgcgcgaactgtaacgttcaacgcatagcgatgcccctgctgacaactgctgtcagcaggggcatgacaatatgcgtatcagtgggtttcgcccatgatgtcggtggcgtcggttccggtgctcacagcggcctcgatggcggcttcgatgccgcgcgccatggtcgcgatttccatggtcggcgtgccattcggcttgcccacgccctgcgcggtcgcatacggcacatgaatgaagccgcccttgacgccggggaatttgcggtcaatcagatacaacacgttatacatgatgctgttgcacacatacgtgcctgccgtatacgacatgaatgcgggaatcccgtggtcattgatgttcctgaccatggccttgaccggcaacgtggcgaaatacgcggtgtcgccgtcctcacgcaacggcgtatcgaacggctgctcgccatcattatcgggaatacgcgcctcggccaaattaatggccactttctccacggtcagagccgaacggccaccagcctgaccaatgcacagcacatagtcaggctgctcgcgcaccatggcttcctcaaccacggtcgcactgcgcgtgaacaccgtcggaatctccagtttcaccactgtcgcaccggcgatttcatccggcaacagcttgactgcctcgaatgcggggttaaccggctcgccgccgaacggatcgaatccggtcaccagaatcttgctcatcattagctccttatttcacggattgttgtggtatttggacaacgaggttattgcgcgatcagcatatagacgatctgcaccacaatcatcaccaatgcgggcagcacctgcttcttaatcacgcccatgcggtccttcatatcgagcatcgcgacgggcacgatgttgaagttggcggccatcggcgtgcacagcgtgccgcagtagccacaggtcagcgccagaatgccaatcaccgccgggtccgcaccgtaggcgagcacgaatggcgcgccaatgcccacggtcattacggtaatcgcggcgaaggcattgcccatgatcatcgtgaacagcatcatgcccacactgaatacgatgatgcccagcgtgacgttgcccttcggaataatgccgccgaccagcgtggcgatcacgtcgccgacacctgcggctgtgaaaatcgcgccgagactggccagcagcatcggcagcatgcagagcgcacccatggcagacaacaggcgttccgaatcgttgaggaatacgaccggcttgttgtcatgcgagaacgcgaacagaatcacggcggcaatcatcacaccgatgcagcagccggtcagggcgctgacgctgggaatcagggcgccgataatggcgaacacgcccagacacagggcgggaatgaagatgcgcatgccgatgcgctggaagttcgcggccacttcggcggtgctgggagcgctcgaatcggatgccgagcccttacgcacttggcggaagatggcgggaatgaccatgatgataatgagcacgccgtccgcaatggccggaatccaacggccgaatgcgatgacgataccgagcgccgtccagaacacgaaagtgccgtagcgggccttgttggttttatcgagtaggttgcgtacgcccgcatacacggacatgaaacccatgaaaatatagaagaactcgaggatcttggtgccaacggtcacgctggggtccatgaagaacgacatatcaggcctccttgccggtgatggtagcggtggcggcctgagcggcggcttcggcaccgtagtacttcttgcgcagtcgtgtgtccttgatgatgtaatagacggcggtgaccgccacggcaatcaccgcgacaggaatctcgataatggccatgcgcaacagttcgacgtcataacccagcggcttcaacgtggactgcacgagcagcgcaccggccgtacccacgaacagcacctggccaaagaaccatgcgacgttctccatgccggaagccatgcccttgagctcttccacatactcgtcgttcggctcgtgaccggacgcttcaatcgcacccaccgccatcggcatgatgaccggacgcacgaacccggccacgccaccaaaactcacgttgaacgcggcgaacacgagacgcatcacaccatacagggcgatcaccataccgggcgtcgcattcttcactttgccgatcagctgcgcggctgcggttttcagaccgttgcgctccaatgtaccggtgaccagcaacacgatgatgaaaatcgccatgctgcggttcgagacgaacgacgtacccaacgtggtcaggaagccgtcgacgccaatgccgccgaccagcgcagtcaccacagccgccacgataatgatcagaatcgcatcaagtttgagggcgaaacccacaatcacgatcacgattcccaataacacgagataatttggttccatgcgg

SEQ ID NO: 3617 - DNA, 12412 bp, Unknown
  R85_18m  MAG No. k141_33089
aattcgcgcccgttctcggatacagcccatacttcgccatccagaccttcggtaatcgatcgcatcggctcgccggagaacatcaccccacaggacgcaccatcagatttcaggcattcgaccacgccgtccgcacgcaacaccgcgccgccggatgaggaaaaaacgaagccccgagcatcgtcatatccgggggcctcccctacacgcaacggactggagctggccagggaaacgatatgaccaccggtcagcgtgtatacgcccgctgtcggctgctcggtagtaagtttcacatttgcgtcggcatcggaatagtccactccatcgccggtaatcctcagcgcgtattcggcattgccgtcgcccatagtcagacggatgcgacgtaccagcaggcctcgttcttcctcgttcaacgcattgataccgctgttgaggtgtatctccaccacattgttcttcaccggcacgctgtcgaccgcgagtttgatggtagacaagccggcgcctcgcagcactccttccaaccaggagggtgcatccgagagcacttcaccgactgcctgggtgcgccagttgcgccagctcaaccaacgaatatccgggataagttgcttgccggaagtactcacctgatacacggatacttggcggaacacctgttcaaaatctgcggtggaaatcaccacgccgctttccaatgacgagatgcgccattggccgcttttcttcatcagcgtatagggaagcctgcgcgtttgggtgctgtttgacggcgtgtatacgccatgcgaatccaaggaacccaccacctgaagttccacttccacaatcagtgagctttccgcaccttgtggcgcgcttatggtgttggcgcgtcggcggaaatcaggggtgccgctgtataccagtgccgcagaatctccattccacccggcagaagccgagccagtcaggaattcgcgagccacgcgatagccatcggactgcacgccagcaggcatagcgtcatagaaccctttgacaatggtttccggctgtgcatcgtccgcaggcccctgaggattggtgtaaacacgctgggtctgctgttccaccggtgccagagtctgcaccgagccgctaatcggcaaaccgaacggacttgagcatgccgtcatcgtgatgcaacaggctatggccgcgcctgcggcggcaatcgttctggtcactcgtctcatagtggcctccccatcatcgtgtcgcggcgaacctcatgataatcatgtgtgacttggctggtggccacaccaaacccaccggtaacacgcaggtcatccggcgtttcagaagcaaaattcaccggcagttcagcgtccgccacctcaccttggtcggggtcacgcggcagcaataccaagaaccaggtgccctcccccactgccgaacgtacacggatactaccgtggtgcagcaaggcatcagtcatggcgatggccaggcccaatccggtgccgccggtaacgcgtgaacgtgaaaggtcgcctctccagaatcgatcgaatacatgagcgactttgtcttcgtcgataccaacgccatagtcgcgaacgctgatggccacggctttgcggttggccgcgacgcgcacttcgatcggccggtcctcagcgaaatcgacggcattggccaacagatttctgacgatgcgaatcactcgacgcgaatcgatacgagtcaaaacctgcacattgggcagatacgtgtgaatcggcacccgtttggcttgggcgatgccgtcaacttggtccactgccgtttcaattggttcgcataaatcggtttccacaaggtcgagtgccgcataaccggcatcgtagcgggagatttccaacagatcggcgagcatgtcttggaatcgactgatctggccggccaacagttcgaccgtacgcttggtggaggggtcgaagccgtcttttttcatttcgagcaggtcggaagccatacgcatggtggtcaccggggtacgcaattcatgactgacgtcggacacaaatcgtttctggaaaacgcttgcttcctccagctcatcgatcttctggttgagcgcatcagccatcgtattgaaggattgctgcagcacaccaagctcatccttacgatccacggtaacgcgcatatcgagattgccggaggccagtgtttccgaggccgctgccactcgtccaatcgggcgcacgatgccacgaatcaccagccagattactacgcccaccacgatggacagcaacgcacagatgaccaccagactgagctgaatctgcgtcaaggactgctgctggaacgtgtacgaataaatggcgaagaattcgaggttgccggccacgccaaagtccaatacggtgccgagcaccgctgcgggcgtcccgctgcccggcatgccggaatcaccgggaatttcgaccggctgatagaacacgctgtcatccaagtcggaagccacggacgaacggatgtcgtcagaaatcagactttgatagctgggttcggtggatacggggatgatggcacgcgagttggtatcacgactccacaaatacacacctatcaggttggaggacccctcggattgcaacgaggacgccaagtcattgaccagctgttggatctgcactacggcggagacatcggccgcgtccagactggtttgggcctgctgcaccatgtttgaatagtcggcacgcgactgcgaagtgatttgggtaagcagcgaggcgcgcactgataccatcgatacgccagagaagacgatggccacggccagcgtaagaatcacggtgagggccacggtgcgggcctgcagtgagcgacgaacttcagcgcgtccgtggcgcagcaagcgtttgaggctgaatcgagggcgcaggttcattgttcaggagtgacgaacttgtagccgataccgcgtacggtctgcacgatttgcgggttctcggggtcgtcctccactttggccctaaggcgttgaacatgcacattgaccaggcgcgtatcgccggaattctcgtatccccagacattcttgagcaggctggaacgactgatggcctcgccggcggcggccgcaagcatgaacagcagctcgaattccatcggagtgagattcaggtccttgccatccttggtggcggtgtgttccaaacggtcgatgacgatgggtccgcgttccagatggttgacgtttgcattgccaccgcttgcgccaccggtggcaccgtcttcggcggccggcttggcgatgcggaagcgtgcacggatacgcgccagcagttcggctactttgaagggcttgggcacgtagtcgtcggcaccggcttccaagccggccacgacgtcaagtgtgtctgatttggcggtgagcatgataatcggcacattagaggtagctctgatgcggcgggccacctccgtgccgtccagcccggggagcataacgtcaagcagaatcaaatcgggcttgacgatggggaacatttccacagccctcagcccgtccaggcaggtcacagtctggaatccctcgttttccaaaacaagactaagcatttcgccgatggcctgatcatcgtccacgatgaagatggtcgccatggtgtttgcctcccctttttccactgttattgttgcgttacactttactcccctatgttcatttctgttcgggttccccaccatgcagtatcgggcgaatcttggcaagacgctggctgacttcgtgttcatagccgcgatcgttgggatggtagtactcggtgccacgcagctcttcgggcatatattcctgtggcgccacggcaccgggccaatcgtgcgcatacttgtagccctcgtggttgccccactctttcataagcttggtgggggcgttcctcaaatacagcggaacagcgccgatcttgccggtatccacgtccgcgagcgcctggttaatggcgttatagctggcatttgatttgggcgcggtggccacggcaatcgtggcttcggccaaaataatacgtgcctcgggcatgccgaccagcgccacggcctgcgccgcggccacggtgacctgcaaaatctgcggggcggccatgccgacttcctcgctggcggcaatcatgatgcgacgggcgatgaagcgcggatcttcacccgctttcagcatgcgcgccagataatggatggcggcatccggatcggagccccgcatggatttgatgaatgcggaaatcacgtcgtaatggtcatcgccgtctttgtcgtagcgcacggtggcggtgtccattaccgtagccacgatttcggaggtgatgatgggtcggcgtgcgccctttttgcgggcttcgtcgccggtgaccgcgccagccgcggcctccagaatcgtgagactcttgcgtgcgtcgccaccggccatgcgcacgatatcggcgatggcttcgtccgtggctttgacctcgtccctgagaccgcggtcatcagtcagcgcgcgctgcaccagttcggtgagctgatcaggctccaatgactcaagcttgacgaccaccgaacgggagagcaacggtttgatgatggaaaagctcgggttctcggtggtggcgccgataaaggtcacgtcgcggttttcgacggcgggaagcagcgcatcctgctgggatttggagaagcgatgcacctcgtcgatgaacagtacggtttcccggccgcgtgacacgagccgttcgtgagcgcgggtgagtacgtcgcgcacgtctttgacgccggaggtcacggcggagagttcctcaaacacgcggccggattggccggccacgatggtggcgagcgtggtcttgccgacgcctggagggccgaacaggattacggagctcggcgcggtgagactgcctttgctggccggattggcgaggcggcgcagcggcgagccctggcccaacacctgcgtttggccaatcacctcgtccaaagtgcgtggacgcatgcgcaccgccaacggccgtgtcatcgactccggcgcatcagccgccccaaacaaatcgttctcactcataacgtcctatagtaccccagtgttcgaacagacgttcgagctgcaccttggcttccctcagagaggggagccaggaatcagttactcaccttgtagtcgtggaagactacttcgccggtgtcttgggtggcgtcaaggtccacgatgccttcgatggcccagtcgtggtcgccatcggaatcatcgataatctgacgcaccttccacgtatgctcgtcgttctcgtgcttgtcatccaacatgaacagttcgggcgagcgcgcttcggcgccgatgcccacgtactcgtgctcgtcgtagtagtcgtcgagcacatcttcccattcgtgcacgccgtagccccagtccttgtcgagcgcgccgagcttgtccggctggtcaaggtccataagccgcacacggcggaacatggcgtttctgatcagcacgataaggcctcgtcggtcctcgaccaccgcgttcttcttgcccggcgccgccaaggaggccgccgcctcggactggtcggcggaatcgccggcgttctcccattcatccaccagcgaggagtcgatggagcgcacgagcacgcgcagccacgagatgatgtcttcgagttgctcgtcacgcttttcgggcggcacggtgcgcgccagcgtgcggtaggcgtccgagaggtagcgcaacagggtgccttcggagcgggcgatgttgtatcgggtgatgtatccggtgaagtcggaggcggtttccaccatgtcgcgcaccacggatttcggcgacagccagtagtcgttggcccacggcacatcgtggcggtactgatcgaacgcggcttcgagcatgtcttccagtggcttcggatacgtaatctcctgcagcttatccatacgctcgtcatagtcgagtccgtcggccttcatatcggccatcgccttgtctcgggcctgacgctcctgggcacgcagcacctgcttggggtcttcgagcgtggcctcggccatggagatcacgtccagcgcataggtgtcggactcggggtcgagcagttcgagcgcggccagcaggaacggggagagcggctggtcgagggcgaagtcgtccggcatatcaagggtcatgtagtagtccttgccgccgtccttgcggtcctcggtttcgatgacttcggtatcgaacagggtttggaagatctcgtcggcccgctggtgcagatgctccttctggtcgggggtctgcgcggaatcgtcgatgagatcgtcgatacgggcacgggcgtcaccgccctgcgccacttcattgagcaccatcgaatgcgtgattttcaggtgcgggaccagggtctccggttcagcgtcgatgagcttatcaaacgtgctctggttccaggtcacaaaaccttccggcgccttcttgcgcttgaccttcttgagtttcttcggatctcccccggccttggcgatggctttctggttttcgatttcatattcgggagcctcggcgatcaccagtccctcggtatcgaatcccatacggccagctcgtccggcaatctggtggaattcgcgggcgcgcaggcggcgcatcttggtgccgtcgaacttggtcagggccgtgagcaccacggagtgaatcggcacattgatgccgacgcccaatgtatcggtgccgcaaatcaccggcagcagaccctgctgggcgagctgttcgaccaggcggcggtagcgaggcagcatgccggcatgatggatgccgacaccggtgcgcagcagtcgctgcagaatcttgccgaaggctgtggtgaacttgacgcctttgatggcttctgcgatggcttggcgctgttccttgctggatacaccggtggaggcgagcgcttgcgcggtctccaatgcggcgtcctgcgaaaagtggaccacgtaaatcggggtttcgccgttgcggaaggcgagttccacggttttttccatcgggtcgagcgtgtattcgtagctcaacggcaccggtcgcggcgcgtcggcgattacatccacgtccggggtgtcgttcagatcggagagcttgtcggcgatggcgtccacattgccgagtgtggcgctcatcagcaggaactgggtctgcggcagcgtgagcagtggcacctgccacgcccagccgcgctccggatcaccgtaataatggaattcgtccatcgccacgaggcccacatcggcatgggtgccttcgcgcaaagcctgattggcgaggatttcggcggtgcagcagatgatcggcgcgtccgcgttgatgtggctgtcgccggtgatcatgccgacattgtcgcggccgaacacttcgaccaagtcgaagaatttctccgacaccagcgccttgatcggagcggtgtaataggagcggcggccagtgcatagggcggcgaagtgcatgccgagcgccaccagcgatttgcccgaaccggtcggggtattcaaaatcacatggtcgccggccaagaggtccataatggcctcttcctgatgcggccacggctcgatgcccttgacgtcttccacccagccgaagaaccgttcgtagatgtcgtcggccgtaagattccgttcgcgtccgtcgccgtcccattcgggggccagccgccccagggatccgtattccttctcgtcagtcataatgctcagtctacctagtggcctattccgacggcacgagccgccctccgtcgctatgcgacgcctcccgccagcgggcggagccatgcgaagagctgtgccatgcgcttggctccgccaatgggaggatcgctcacgccaaccggcggcgcacctcgtcggggtccacctcgggttcgaggggaggccaggtcatgttcatgttcttcaaggtggtgcgcagcagttcggagaccacggctcgcgaataccagcggttatcggccggaacgaggtaccacggtgcggcggccgtgctggttttctcgaacacttcctgccaagcgaacatgtactcatcccatcggtcgcgggcctcgaggtcggagatatcgaatttccagaacttggtgggatcatccagcctcccaagaaagtgttttttctgttcttcctggcttaccacgaggaagatcttgaggatggcgcatccgctggcggccagttcacgttcgaaatcgttgatctggtcgtagcgggcacgccatacgtcttcgggataggtgccatagacgtgcggcatgaccacatcttcataatgggagcggtcgaatacggcaatccaccccggcttgggcaattcacgcttcacacgccagaggaagtcgtggtcgagctcctcggccgtaggcttgccgaagccatggtaatggatgcccatcgggtcgccttggctgaacacgtgacgcacaatgccgcccttgccggaggcatccatgccttgcagcacgatgagcagccgccgtgtcgagcctttgacgccattcgcgtacatgagccgctggtatcgggcgatttcggaggagctgatcgaaatgaacttctcggcgtcctctttattgccgtcgaatccgggagtggaatcgccttcgacatcagtgacctgcatgccgtggtggaacataagacgttgagcgggcggcaacgaccatacggcgctgagcagttcactggatttcgccgcacgcgccagtcgttcaggcacgctggcactggagtcgatggtgtctatgcgatccaccgcgagctgtaataccttgtcgatccgtcgatcggttttggattcctttcccttgccgttcttgttgttctttcctgaggattttccggccgtaccccacttgccggcctcttcaggctcgttggttctgtcgtcgtccttggtcatgctcccgattgtacgtcttgtaactcaggagacctagcaacgtagcgacattcacatttcgcctgttactgcaaatctataggcatgcagtcgttcggaccgtaattgttggctttgcaccaattccaagcctcatctgtcgagtcgaagccctcaccggcaagaatcacatagtatttgtcggaattgctgctgtaggcgggccagtcacccgaccagataagcagtacgtttgaattcttgttgtgcatcgtgatgaattgcgcaagaatatcgcggtagttccaggtcttgccttcagcctccatacccttacgcttgctggacagctgtgcggtatacgtggaatagaacagctctgcggagtccttgtcgtgctcgacctgccaatccaatgccttgcttgcattattttcggcttcgtcatccgtaacgttgctgccgcttatcacgcctggatcagacgatccccagcaatatcttctttccggcagacccaccggaacgcggctgcgcagcgccaccgttgcctggcgccgtcgacaatgtcgaagtaggtgcggtcgccgtgttgaaacttgggggcaacggcatcgaactcgctggcacctgctggggagcagccggtaccagcgtcgggccatccatcgactgaggacttgggcttggcgcagactgtgccatcggcgcaccgcattccgtgcagaatcggcttccctccggcatctccgttccgcaaacctggcacttcatactctctccgttctctctcatccctatcggccaatcccccgtccgtttgcagtacataaagaagcggcaaacggcccgaaacatacctgagccatcaggaagacggcacgatctgctacgagaaagagatcatcaccgaccggcaaatcgtcggcatcatgctgaagcatccgaccagcgcacgcggcttcaagcgctacttgcgcgccgcatcatgacgcttgaccacgatggtgacgccacccgcagcgaacagcgtcgccagaaccacaaccaacgcaaccgaggcaccggtatcggccgtacgttcggtctgctgtggcttggtgctgccattggcattgacgctaccgctatggttgccgttatccttgtcgtccgtcccggtggacactccggtaacggcaacgggcagagcgaccgtggtcttattggtcgcaccggtcacggtcaggctgatatcaccggtcttggttccggcgggaatcgtgaccttgagctcggcggtatcgccattcgcaacctgcgcttcgccgaccacctgctcgccgatggtggcggtcagcttcgtctcgtcaggcacgcccagcgaggtgagcgtgagcttcgagaagtgcagggtgaacgagccaccggccttgaccgcaccggtcgggataccggtgacggccactgcacggcggtcgtagcgcggggcaaccggattgttgtccttgagatagtcgatccaagcatcgcggtccaccagaccggtgtccttggtgttcgtgccttgggcgaaggcgcggaagttatcgccgccctccaacaggaagctgaacgaaccgatacggtagttgcgtttcaggtccagaggctcaccgttgacggtcaccgaggtgatgtgatggccttgcgcggcatccggatcatacgtgtagctcacgttgtgggacagtccgagttgcagatacgcgcgcgatggcgtgctgccgtccgcgttcgtctgccactgctgttccagcgcttccttgaactgcgcgccggtaagcgtggtggtccacaggttgttcaggaacggcagtacagcgttggcctgggcgtaggtgatattgccgtcggcatcgagcgtgcaggcgtcattggtgccggacttgcagaattcggcacgcagaccgccggggttgaccacaccgatttcggccgcgccgcggtcctcgcctttgagcgaatcgagcagcgcatcggccaccagattgcccatggtcgattcggaggcgcggtcgtcacgcttgccgtccttgaatgcggtggtgatatccgcagacaccttgccgaccttctcgccgcccttttcatcggccaccttaagagcctggtacacgatgtccctcaccttggcgacagtcgggttcgcggcggcgagcaggccatcgttgtattcggcgtaatcgttgtagtgcggatcatttttgtcggcgggctgcgaagccacctgcacggccgtgttgccggacttgtcgtaagacaccgcaccggtggccgtgttgtaggtgagcaccacttggccgatgttggcggcatagctaccggtctggatgatcggtcggttgttgtgcgcgggatcggtgtacgaatacttcatgtgggtatgtgcagtgaagatcacgttcactgccgcatcggtatcgtccacgatcttctggaatacggggctggcggccttctgctcgtcaagcgtgggcttggccgtggcgtcatcttcattggaggctgcaccctcatggtattcggccacaatcacgtcagcctcgccattggattcgtcgccgtcggtgagttgcttggccacacggttcacggcttccaccggatcgccgaattcgatgtccttgacaccaccgggagcaaccaacgtgccggtttcctgagtgaccgcaccgatgatgccgaccttcacgccgttcacctcctgaatgctgtactcgggcagagccggggttgtggtgcccttcttgtacacgttggcaccgaggtaatcccattgggcgttgcgcgcgccctccttgccgatcacacgatcggtaaggtcggcatagccttgatcgaactcgtggttgcccaccgccgaagccttgacgcccaaagcgttaagcacatcgatggtcggctggtcctgctgcacagaagagttgaacagcgaagcaccgatactatcgccggcggacagcagcagtgatgagtcagggtattcgcccttgagctgctcgatggtggcggcgaacggcacggtgaggttcttgtcgatacggccgtggaaatcgttgaagttcagcagattgatggtggtgctggcgggaaccggctgattggttgccatatagcccatacgcaatgaatggccattggtcacgccgtcgtctgcccagaacaccggcttgtacaccttgccatttactaccttggtggcttcggtatcaggggtgatggcaaaaccttcggtgttctgcgtacggatttcatccggagcgtcggtcagcttggtcagctgcagcacaccgttcttgaactcgtaggtaccgattttggcaccggtgttcgcatcattgtcgctttgggcgagcagctggttgtgctcggcgtcccaagtcagatcgcgcggaccatcatagccggcgttcactgcggactgcggcaggtcgatgtcggccaccggatgcaccaggtcctcatcattcacggtttgcagtgcga

SEQ ID NO: 3618 - DNA, 8770 bp, Unknown
  R85_18m  MAG No. k141_33194
cgatgacggacggatgtgaggacgtctcaatcccttcggcttcgctcattgtttcactcctcccaaatacgcctcctgcacccgctcgttgccgagcaggtcgccggctttgccgtgcagccggatacgtccgttctgcagcacataaccatagtcggcgatcgagagagccagctcggcctgctgttcgaccatgagcacggaaacgcccaattcgtcacgcagtcgcactatctgttcgagtacgtcttcgacgagtttgggagacaagcccatcgtcggctcgtccatgcagatgattttcgggcgactcatcagggctcgcgcgaacgccagcatctgctgctcgccgccggacatagtgccggcctgctgcatacgacgttccttcaaacgcgggaaacgatcgtacatggcttccagatcgccggccgcaccctccctgtcgtgtcgcgtataggcaccagacaacagattctcctccaccgtcatctgcggaaacacgcgccttgcctcgggcacggcggcgataccggcttggacccgtctgcgcgtggacagtccggtcacatcctcgccttggaaccacagcgaaccggtcttcggatgattgatgcccaaaatcgtcttcatcgtggtcgacttgccggaagcgttgcctcccagcagagagacgatggcccctttgggtacgcagatcgacacgttctgcaacgcgtggacctgcccgtaatacacattcactccatcgagcgcaagcagggcatccccaccatcatccaacgtcccggtttcatctcgtccggtaccggcaccggtgccctcgacttcgacgacggcgccaatggagttctgcatcgcaagcacatgcgactgcccggcgacccgggtatggttcatttcacgccgcttgccgagatacgcctcgaccacctgcggggcattgcgcacatcatccggggcgccttgcgcgatgacgcggccgccatccatcgcaagcacacggtcggacaatgcagtgaccagatcgatcttgtgctcgaccaataggatggtatgtccctgcgctttcagatactgcagttgacgaagcacttcggcggtctccgactggttcatgccggcggtcggctcatcgagcagcaggatcttcggttcgctgatgtgggcacgggcgatttcggtacgacgacgattcgcgtacgacaacgtgtaggtgcaatcccgtcgacgcgcgctcagtcgttcacggaaacggtcgatttcccgatccacgcggatgttcacctcatcggcttcgcgccgagtccgcggtccaggaaccagcgccacgccggtctcggcgagcaacgacagccaacgcgcgatcggatacctttgcaggcttttgaacgggcgtgccgcgacgagtcgccggtgatatccgagattgatgttttcttcgacggtaagaccgccgaacacacgaccgttctggaaggtgcgcagcagtccccgttcagacatgtccgcagggctcagaccggcaaccggctcgtcggcaagatcgatgagcccggaatcaggctgcagaaaaccggagatcaggttgattgtggttgattttcccgaaccgttcgggccgatgatggaaatgacctcaccttgatgcaggtcgaaagagaccttgttgacggcgtgcagcccctcgaaggacttgtcgagctcgcgcacgcgcagcatcaccggcgcgtcaaggacggcctggcggtgtctttcggaatattcagccagatcatccgcgttatcgaggcgttcgttgtcgatatcgatgccggtcacggcgtctacggtggaaaatacggtctcggaatcggtcatggcgactcagcctttccgggcgaacaggccctggggacggaacaagatgacaagcaccagcagcacgccatacagcaggatgcgcgcgtcggaggcgaaacgcagcaactcgggcgctccgatcagcactatggagccaagcaccgcgccgagcggagagttcataccaccaagcacgatgatggtcaggatgagaatcgacatgttcgagttgaagatcgtcggatcaatgtacgtgtactggtgcgcgagcaacgaaccggcgagacctgcgaaaaacgcggcaagcgcatacgcgagcgccttataggcgccagtgcggatggacagcgcctccgaagcctcgcgatccgatcccacggcctcgaacacgcgccccagatgagcggttcggatacgcatgacgatgaccagcgtgacaagcagcacgatcacgtcaagcagatacatcatctgctgcgtgtacagcgtgacgccgaacaccttcgggaacggaatgccctgaatgccaagagaccccttggtcaacggctcggcgaggcgaatgatcgccaccatcaccgcacctacgccgatggtggcgatggcgacataatggccggaaaacctccatacggggaaggtgagcaccgaggcggcaagcgccgcgatcacacctgcggcgggcaacgccaccaggaagggccaatgcgcctgcgtggccagaatcgcggaggcataggcacccacggcgaacggtcctgccatgcccagaatcgtttggcctgcggagccggaaatcaacgtcaatcccacggcggcgatggcatagatggcgacctgagtgcccacgccggacaggtagtcattgaagaagaacggggtggatacgagtgccacggcaccgatgagattaccccaccaaggcagcgcgatcgccctgccgcctcccaggaacgtgccggtaagcggctcggatttgacatcggtcttcggcccaagcagaccctgcggcttcacgatgaggatgatgatcaacgcgccgaaggtgatgaggtcatgtgcaccgtctccgaacagagagatgccgaacgcttccaccacaccgagcacaagaccgccgaccacagctcccgggatggagcctagaccgccgatcgtggccgccacgaacgccgtcataccaatggtgccgccgttcatcggattgatgttgccgttgaacaagcccacgaagatgccggaaacgccggcaagtacggcaccgatcacaaaggagaggttacggatggccttcaccgggatgcccatctgcatggcggcttcgggatcctgggaagtggcgcgaatggcctgtcccgctttgccgaacttgaggaatgcccataagccaagcatcgagaggacggcaagcgtcaccatcacgatgtccgaagtgccgaagcgcacgccggcgacttgcaggttataggtctgcagcagtttcgggaatggtcgggtctgtggcccgaagacgacctgcagaccattgtcgagcacctggccgacgccaatggtggcgagcagcgccgcaatcggtttacggccttcaagcggagcgatgatcgccatgttcatgaccagccccagcagtgcggtaaccacaagcaccgccacgaatgtgggcacgattccccatccccatgatgaaccgagccaccaggcgatcatcatgcccacggccacgatggaaccttgggcgaagttggccacgttggtgacgccgaagatcagcgacatgccgactgcgaccagcgcataggcgctgccgtgtatcagtccggcgaaaagaacatcaaacattgtgtgcgttacctcgttcgtggtgtatgggaaagcccggggaatcaaccttcgtattgttcgaacttgccatctttgacgatgagcagaatcggatcgatgttatcggcgcgacgactctgccgattgaatttgaacgtgccgccattgccctggtagagcgggaaatccgtcacggtctgcagcgccttctgtatgccttcacgggtcggttcggtcttgttggcggcataggccagatcgatgatcgcctcgtaggcggtcacttcgaaattgcccgggttgttgccgtacttggccttgaagtccttgacgaacttctgggccttggcgtccttggtgccagtggcggagaaggatccggtgatgatcgaaccctcggcgtttttgccggcgagatcgaggaactccttggtttcctgaccaccgaagtacaggccgtcgtaccccagcttgtcgcgcagggtattgatcaccagagcaccgtccggcccgtagccgatgtcgaccaccgcgtcaggcttggcatcgcgcgccggaatcagaatcggcgacaagtcggtggagtcgggcagatagctggactcgtacacaatctgggtaccgtttttctcggcctcctgcttgaagtaccgataggcctgtttgccccagtcgttctcgatgtagaccaccgcgatcttcttggcttttttggccactatatccgcgttggtcttctgatacttgtcctgaccgatttggggagtccatacgtggtccccggtatcggtaaaggtgggtgccgaattattgaaaccgtaatgcacgaggccggcctgctggaagataggcgacgcggccgaggatgcgggcgaggcatagtcacccaccacggcgatgatcgacttgtccgacacgatcttgggagccaccgcggcgtcttgcttggcatcggactgcgtgtcatagtatcgaagaccaagcttcttacccttgacgccgccatccttgttcaccttggcaaccgccagatcgaagccttgctggaacagtttgccgtattgcgcatattgcccggtcttcggatagatgactccgatgttcacggtgtcgtcgctggaaccgctggcggcatccccgccaaggccgcatgcggagacgccaatcagtgttcccgcagtgaccacggatgcgatcgccgtacggatgattgtcttgatggtcatgatgttcccttctctattcgaataatcatgaagcgtgaatggggaccggctcagcccacgcggatgtcgctcaacgcctgcagcgcctcgtcgcccgctggggtcggaaccgtgcagcttggtgccagcaaaaacggtttgcccgtacgaagcgcgatggtcttggccaattcgcggcgcacctgttcgacgtcaccgtccggcgcgaacaggtcgtacggggcaccggcgaccggcacagccgtcaggtcggcatccacctgcgggtttcccggttgatactgattccactgcagcaggtccacacccttcacgtcgaaccaattcgggtgggattcagcacgacaggtgtgcagcagcaccacggcgtccgggttggcgcgatgcaccgcgtcaatcacgatgcgatcgtatggttcggagaattcaagatagcgttgcgcgtcgaaataaccctcgctcaccgtgccggtgagcgcgtagaacacgccgtcgagtcccgctccgccttcggactcgggacgaaccaacgcacgcgcataggaggcgagtgtgcgggcgatgttggcgagcgcctgcttggcgacaccaggctgatcgaagatcagatcttcgacgcggagcgtcgcggtggcgtaatcgtcacccgggtacagcggcagatcggcgatctgcagcaggacggacaatggcgaaaagacggtctgcagcacggcacgatcctcaaggccatgccggataagggcggcggcggccagagcctcggcgaaatactcattgtcacgaacgtcgagttccttgactccacgcacatcatccggttcggtgattgcggcgctgatcttcttcggcagcacgaatccggcataatcgttgcgatcgtaccgagagccccaagcctcggcatagtatatggcgcgcggattgatcttcacccattcccaatcccagcgattgacgaaatcgatggtggccttggcgaattcctcggcaccgtattcatgaccgacaagatgctgccaggcgctaaccagatacggcgtccgggactgatgattgacgatggcgtggaagtcggcgcgacgattgaccatattggggtcccttctcctgattcgcaacgttatccgtcatcgaagcgcatcggcgatgccgatgtcaagcggaatgccgcccacgtattacaggcatttcttatagcgtcttatccatccgcgaaatcattgcatccttgaagcgcctatcaagaacacctatatgccatttcggaagaaacgacgacggttcgggaatccatgcggtattacgggaactgacatacatccgtatccatcatcagaagaggtgaaccgatgggagcaaacctgtatttcatcggcggaggcaatatgccgagcgccatcatagaagcggtgcgacgtaaggccgccgcatatccggtcgaccacatctgggttgaggaaatctcacgggaacgcgccgaatatctggcatccacgtacaacaccgagacggcgtcaccgacggacgccccggatgccgacatcgtggtaatcgcggtgcgcccgcaagacgatgtcgccggcgtagccgcttcagtggcgcgacgtttcgacccggcgaagaccacggtgatctccatcgtagccggctataccatcgccaagcttgagcaagggctcggccatgggtggcgtgtggcccgcatcatcccgaacacactcaccaccgtggattacggttacagcggcgtggcgctgaatggggccgcggcacgcgaggacgtggatgcgttcctcaacactttcggcaaagtgctgtatgtcgaggaacgacttatcgacgtaatcaccggtttttacccgccgaacatcgtctaccatttcatcgacgcctacgtggatgccggtgtgcttgccggtctgccccgggacgcggccagagccatcgcgctcgacaccatcatcggcggcaccgaattcctcaaacagaaagacgtgctgcctcaagtgctgctcaatatcaacaactcccccggcggagtgggaatcaccgaggcatataccctgaacaaaaccggattcgcggcatccatacaatccgcggtgctggcggcggtcgagcgcaccacggcgctcggcggcgatgcaaagtaaaggcgggagccgatcatgacgcaacaattcacctgggaccatacggtcgaattcgtgaatgacctcaagtccgccgaacggacgttcgccgacgcagggctgacttcccaatacggcggcaagcatgtggggcatggcacggagaactccctggcctacttcgccgataactatttggagttcctggcattgtacgaccgcgaggaagccttgtcggagacgccggaccatgggctgatattccatgaagccggggagctgctgcccgggtatgtgggattctatcgtccggcattgcacgtgcatggcatcgaacaggcggccgaacggctcacggccaaaggccttgatctcggccatatcgttccgggcaatcgcacgacggccgccggtgaggagatacgctggcggttgctatggatcaagggcgatgatcggggcctgcgctatccgttcgtcatcgattggggtgcgagcgaatccgagcaactggcccgctacgagagcggcggactgctgcaccggcatgccatcggcgaagtggacacccgtcgcgcgattttcgcggtgcccgaccccgcggcggtggccgcgcactggtccgacgtgtttggtttgggtctcacggaaggcggggacgccgaccggcccgatgagcactatttcgatctcgatgtgggagggcatcgtgtctggcgcttcgtccagggtcaatgcaacgccatcaccgaattgcagtacgacgcccccgccggcaaatccttcgatgtgaccatcggccaggcgcgattcagaagcctgtaagtacggtccacacacagccgcaacaacgcatgaggcgtgtgccaccaatccaacggtggcacacgcctcatgccgtaagcgggccctgccaatcagtcagtcagcagattcaactcccgcagcttgttcctgatgtccttggcggagggctccacctggaaggagccatcatcgtacagcaccaccggaatatgctgctggccgctgatggccacggcacgatcggcggcaccgtcctcctcttcgatgttatgccagatatacgccgcacccagctcatccaacgtgttcttcgcctgacggcaatcaccacaccatgtggcgccgtacacatcaatggccatgccatgtcctttccgcatgccgcgcttcgtccgcggccgtctcatcgcgtccatcgtaacggcacatacggccatatcgcatcaggcgaacaccttcggagtcaacgcgccgaatacatcggagtcggtgtgacgtttcctgtaccgggcataggcgatatcgaaagcctgtccgaggtcttcgatcagatcgttcgcatcctcgatgccgacggcgagacgcaccagctcatcggtgatgccgaccttcagacgctcctcccggggcagttcgaaatgcgtcatgcggcaaggcagttccgcaagcgattccacggcaccaagggacacagccaatcggaagatgtgcagattgttgagcacatccgccgggtccacaccaggcactacttcaaagctcagcacaccaccggcacccttcagtcccttggcggcaagtcgctggtcaccggcccccggcaggcccgggtaatgaacggacttgaccagcggatgcgcgagcaggtaccgcgcgatggcattcgcattctcctgctgccggtccatgcgcagggccaatgtctggatgccgcggcgc

SEQ ID NO: 3619 - DNA, 2866 bp, Unknown
  R85_18m  MAG No. k141_33409
acgtgcggcgcgttgacgccgaacaaacgttcacccaacagtacgagcgggtaatcgccctccaaagctgcgatatcgtcaaccgtcatcatcagagggcttaagatgagcccgtccgcgctgtgcgtgcccatcgatgcgatgctttccagctcgcgggcacgattgttagtggtggattccacgatgacgccgtagccatgttgccgggcctcggccagaatatcctcggcgagttcggagaagtacacctgccgcagatcgggaataaccagcttgagcaaccgggtacgcccggaacgcaggtttctggccgacgagttgactttgtatccgagccggtcgatggcttccgcaatacgcgcggccatcgcctcgctcatatatggctgtttgttcagaaaattagacaccgaggctaccgaaacaccggcctcatgggccacgtccgccatcgtcactctgtttttgcctcgcacggtgaccaccctacccgactttgctggagatacgaaaacgactcccctgctacgatgagcagcaagggagccgttgggtaattaggcgctatgcgcggttttacagcttgacgacgagtacgccgttgggctggatggcggccgtgtgctcggactcgttgacctgggccagcgaggcgaccagcggttcgccttccacgtccacgaccgcaacatcgtgggtgcggttgaacaggaacacgaagtggttctcgccagtttcgtccgcacgctcgacgcgcagcacttcaccgcgatcgtcctcagccgaagtctcgatgccgagttcctccagcagcacgggcaggctcttggccaaaccctcacggccgagacgggcaccgacgtatgcggccttgccgtcgccgaagtcgttgacggtgatggcgggagcgccgtcgaaaccggtccacttatctgccttgaaggaggcgaccacgtgagcggtatcggccacggaggtgatcacgtcggcgaaatcgtgcgccacggttccgttgtccaagtcgaggtggtccatggcaccggggaagtcgttgcccatcggggcgaattcctcaacgcgcacgcccaccacgtcacggatggagccggggtagccacccagccagacgtgatccttatcgtccaccagaccggtgtagtaggtcacgaacagcttgccgccgttcgccacatactcgcgcacgcggcgcgtggtctcttcggacaggatggtcaggctcggcagcacgacggcttcgtactcgtcccaagggccgcgaaccggcaccacgtctgcggtcagaccgttgtccgccagcgcgcggaaccacgcgagcggctcggtccaatggcgtacctcctgagtaggcgtggcggtgtgttccgtagcccactgggactcgtaatcgaagacgacggcgaccttggacttgaccagcttggtgctcagcaggccctcgtcagcaagcttgttgaggtcggcacccagctcgcacacatcgcggaagatctgggagtcggggcccgcgtgaggaaccatcgaagagtgccacttctcggcaccggccttggactggcgccactggaagtagcagatggcgtcggagcccatggccaagtgggccagggagtcgcgcaccaattcgccgggctcgacgcgatagttgatcgggcgccaattgacggcggagctggagtgctccatgaggaaccacggattcttgcgggcgatgccgtcacatagggaggccgagtaagccagctcgtcgaagtgagcttcgccaggagtgaagtagtgatcgttggacacgaagtccacgtcgtaaccccacttgtcgtaatcgatgccggcaccgccggcggagaccatgaagttggtggtctgcggcttgggggcgatctcgagcagggcgtcgcgctcggccttgtaaaagtcgagcagggcgtcggagctgaaacgcttccagtcaagcagtttgcccgggttcatgaagttgccatcgccgatgaagcgcggcgggatgatctcggagaagttgttcatgcgctgcgcccagaaggcggtgccccaggcgtcattgacggcgtcgatggtgccgtacttcttctcgcaccacttctggaaggcgcgctcggcgtcttcggaatagtcgaagcggttgtggcagccgtactcgttgctcacatgccaagagaccacataggggttgtccttgtagtgctcggccatcttgcggcacaggttgagcgcgtagtcaaggaagaccgggctggtggcgcgccagtgctggcgggcaccgggctggcagacgtcgccgcggtagtcgacccagaggatctccgggtgggcctgggtcatccacatcggcggggatgcggtgccggaggcgagatcgacggcgatgccggccttgccgagcttgtcgatgacgcggtcgagccaatcgaagtcgtacacgccttcttcgggctcaagcttggcccaggagaagatggctacggagacgaggttgacgccggcctgctgcatgagggctacatcttcgtcccacacttcctcaggccattggtcggggttgtaatcgccgccgtaccagatgcggggcttgttgcccgcaagcggctgcggccacttgaactctttacgttccatgatgattcagctcctttattgaattttatcgataatctgcgtccgcgggaataaacagcccacagggctgtttgcctaacggctcagctcgtcagaggggggcttggcactattacctccctctgatgaggaaggttgtctcggcggagccgggacggagggagagaccccgccgcgaggcggtgaagacaccgcgtcggcggagccgact

SEQ ID NO: 3620 - DNA, 11223 bp, Unknown
  R85_18m  MAG No. k141_33666
cgcaggcgagtccacgcaggcgagttcacccaaagtccataaccgccggcccaacaagcagtccccgtaacagactgctatagttgggcttttgcgtctatagcgccataccgacggtacgtatacaaggaaaggagtcgagcaatggcagcactacgtggtccggatagttccgaggatgaacgtcgtttgggggagcaggccgtctttcccgagaccgtcgatgtcaacattcgtcagcttgaccccattcccgcgccgcgtgccttcctcagggagcagccgctcaccgatgagatgagcgagctcgtgctccactcgcggcaggaaatccgcgatgtgctcaacggccgcgacgaccgactgctcgtcatcgtgggcccctgctcaatccacgacccgaaggccgcgcacgagtacgcagaaaagctggctgccgtcaagcgcgagctggaagaccgactcgtgatcgtgatgcgcgtgtacttcgagaagccacgcaccaccattggctggaaaggcctcatcaacgaccccgatctggacggtcgcttcaatattcgtaagggcatgtggctggcccgcaaggtgctcaccgacgtgctgagcctcggcctgcccgccgccaccgaatggcttgaccccatcaccccgcagtacatctgcgacgcgatcagctggggtgccatcggcgcgcgtaacaccgaatcccaagtccaccgcgaactggccagtggcctgtccatgccggtgggcttcaagaactccaccgacggctccatcaaggccgccgccgattcctgcttcgcggccggcttcgagcatcacttcctgtccattaacttggacggtcgcgtgatttccgccgaaaccaaaggcaacccggattgccatctggttctgcgcggttccagccacggcccgaactacgatgccgaatccgtgcgtcaagctctggaagacctcaaggtttccaaagcgtccggcccgagccagcatggcctcgtcatcgatgccgcccacggcaactgcggcaaagacgaaaaccgcgaagccgaagtcatcgaagagatcgctgagcgtctggcgcacggcgaacaaggcatcaccggcgtaatgatggaaagcttcttggtcggcggtcaccaaaagccggccccgctcgaccagttggtctacggtcagtccgtcaccgactcttgcgtgccgtgggaacgcaccaacgagctgctgcacaccctagccgacgccgtcaccgctcgcagctcggctaaatagctttgtctttgtaaaaatgctcactgagacccactcagtgagcattttttgccaataacggtggtcatgtcagtttgttcccgtgacaccttatccttgggaaagatactgatccaaggagagatgttatgcagcagcaggaggaagcagcacattcgctgcatccgttgcaagtcggtccgcagccgttgaacaccccggaagagcttcgcgccattcgtcaggcgatgggggaggggaagaacccgctcgttgccactgatgtgccgcgctgggaagatcaggtgggtgtcagtcgcatcatcaaccgccgcgtattggagctggagccgctgcccacgcccgcgcaagtgctcgctgaactcccgctgaccgatcaggctcaggaaatcgtcgcctactcgcgtgatgagattcgcgcgtgcctgtacggccaagacgacaggttgttggtcatcgtcggcccctgttcggttcatgacccgaaggccgcgctggactacgcgcaccgattggccaagctgaaggacgagctcggtgagcagctgctcatcgtcatgcgcgtgtacttcgagaagccgcgcaccaccatcggctggaagggcctgatcaacgacccggatattgatggcagccacaatattcgcaaaggcctgttgcttgctcgcaaaaccttgcttggtgtgctgaaggaaggattggcggccgccacggaatttctggagcccaccagcccgcagttcatctcggacgcggtgagttggggcgccattggtgcgcgcaacacggaaagccagatccaccgccaattggccagcgggctttccatgccggtcggcttcaagaacgccactgacggctcggtgaaggcagcggtcaacggttgcttcgccgccgcccagcagcacacgttcttcggcattgaccatctggggcgtgcctgcgcagtcgagacccttggcaacccggactgccatgtggtgttgcgcggctcgattcacggcccgaactacgatgccgagtccgtggccaaagccatggaagacgtacgcgccgaaatgcccgccgaatccgcagcctcgcacggtctgattgttgattgctcgcacggtaactccggcaaggacgagcatcgtcaggccgaagtcgtgcgtaatattgccagcagaattgcagctggcgaacagggtattaccggcatcatgatggaaagctttattgaagggggcaatcagaaggccgcgccgcttgatcagctggtctatggcaagtcgattaccgacaagtgcatcagctgggaagaaaccgaggccttgctgcgcgagcttgcggaagccgtggccacgcggcgttggcactgagttgcgtcatcggctctctcgggggggagcaatgcaacgaaacgtctctacccctcagcctgccattcggcggccacctcccctgacatgggagtcgaaagcgttgtgaaaggaacttacatatgggtatgaaaactgtagctattattggcgcattggatgaggaagtggcgctgatcgccaaatcgctcacgcatgtgacgcacaccgccaagggcagccttgacatcgtgtccggcacggtcgactccttcggttctgacgtcatcaaggttgccgcaacggtaggcggcatgggactggtcaatgcggccgccaccacgcagctgctgattgacgagttcgccccggacgtcgtgattttcagcggcatcgccggcaacctcaacacccacctgcacatcaacgacgtggtgctcggcggcaccctgcgctacctcgacactgacatgcggctcgtaggccagtggaagcccggcactgcggacgctccggtggaggaattccactctgatgaccgtctgctggaagttgccgacgaggcgcttgccaatgcgggcattacccacatcaccggcatcatcgcctctggcaactacttcgtggacacgccccaaaaggtcgaggaggtcatccgactcaccggggctgacgccgtggagatggaaggcgccgccgtggcacaggtcgccgcccgcaatgacgtgccggcactggtgattcgtgccctttccgacaacgccgacaccgattacgaggtattcaaggagttcgacatctccgagtacgccgataccgccgcccgtctggctgtcgacatcgtcaagcgcctgtagtcggcgggctggcccatctcaccatccacgttttgggtatgatgaccacaatatgagcgttttcaaactattgcttataacctgagccatactcggtgttcggcacagcgatgtgcggggttcatcgctggggccacaagccgtaccagttcttctcccgcatgccggtcgctgtgctcaattcgttaagcgacgacaacaccgtcgcgaagcattgaatacacaatgcgcacgctgcactggggtttatctgcagcatgaggagagaaaaaatgactgcaagcgcaaccgcggctgtgaccaaaccggtgaagaaggattcggttcctgagatcatcgccgcttccatggtcggtacggccatcgaattctacgataactactgctattccattgccgctgctagctacttcggcatgatcttcttcacggacgtcgccaagtccaaccagaccctcgccacgctgatggccttcgtgaccttcgccgtttcgttcctcgcccgtccgttcggctccatgctgttcggccacttcggtgacaagctcggccgtaagaagacgctggttatcgccctgatgaccatgggtatcgccaccttcctggtcggctgcctgcccggttatgagcagattggcgcatggtccgtcgtgattctgtgcatctgccgtgcctgccagggcgtgggcctcgccggcgaatggtccggtgccgcgctggtcgccactgaaaacgctccggccgacaagcgcgccctgtacggttccttcccgaaccttggcgccccgattggcttcttctgcgcttacggcctgaacctgctactcgaatccaacctgagcaaggaacagatgattgccttcggctggcgtatcccgttcctgtgctccgccgtgctggtgatcattggcctgtacgtgcgtgcccgcatgtctgagaccccagtgttccagaaggccactgaagagaagcgcacctccaagcacccgctgcgcgacctgctgccgtactggaaggaagtcgtgctcggcaccgtagccatgggtatcacctataccctgttctacgtactcggcacttggtcgctggcctacggcgtcaagggcttgggcttccagcagggcgagtacctgctcatgcagatgtgctccgtggtgttcttcgccatcttcatcgtggtctcctgcgtgtacgccgacaaggtgggccgcaagaaggtcatgattgccgtgaccgccgccgccttggtgttcagcttcttcgtgccgatgctgctcgtgcactccgccgcccatatcatgatcttcctgtgcgtcggcttcatgatcatgggtggtttgttcggcccctgcggcgcctacctgcctgagctgttcccggtgcacgtgcgttactccggcgccggcctgagctacaacctcgccgccatcctcggtggcgcattcgctccgaccatcgcccaggccctggtcgcctccaagttcggcgttgccggtgtgggctggtacatggccatcatggccgccctcgctctgctcgctctgttcctgattaaggaaagcaaggacaaggactacgagctgtaaatagagctccccatattatgctcccgctggcgggagctgtccacgaaagcggactgagggtggccaatgggatttcggttctttgaccaccctcagtctcactgcgttcgacagctcccgccagcgggagcattttgttatgtcgtcccaccaaaaatgaacaatagacgaacttacgtagtttgggcatctcactacgccttgcacgttttactctggaaatcatggatatctggcagatcgtcgtgattgtggtgctcgccgcgctgatactggcgtgggttgccgtcatcgcctacaacaaaggccgcgtttcaggtcggctcgccgccgaacaggacctgtccggcgacgaggatacgcgttctctattcggtgatgatgcgcccgtgcgccccaccgagcgtcgcctgattgaagtcctgcccgaagccctgattgttaccgaccgcaacggcttggtccaatattcaagccccggctcagtgccattcggcctggtctccggcgaccgactcaactcgcgcgaagtcgaggacatcctcactcaggccgccgccgacggtggcgtgcgtgagcgtgaggttcagctgccggtcaatcgcaattcctatccgtcctctaatggccgaggactggaggccggccagtcacgcccgtccaacatgctgtatttgcgtgtgcgcattggcgatatcggcgatgacctgtacgccatcttcatcaacgacatgtccgagcagcgccgtttcgaggccgttcgccgtgactttgtgaccaacgtttcgcacgaactcaagactccggccggtgccatctcgctactggccgaaaccgtgaccgacgccgccgatgatccggacgccgtacggtatttttccggccgtatctccaaggaatccgcgcgcctgaccgaactggtacatcatcttatcgacttgcagaaagcccaaagcccgcaaagtgtgattgatgcgcggcgcatttccgcgctggatgtggcacgcgctgccatcgccgccaatcagacccaagccgactcccgccatgtggatattcgactgagtgtcaacggacagtcagtgcccacgaaggtcgaggagctggccgatggcgaaggttccttggaagaatcaggcagcccggccacgagcggtccgatgatcaaggccgacaaagaggccatgcaaaccgccgtcaagaacctcgtagagaacgccatccattactcgcccgaacacaccactgtggcggtcggcgtgggggagcgcgatggcaaagtcaccattcgcgtggtcgatcagggcatcggcatccccgccaaatcactggaccgcattttcgagcggttctaccgggtcgacccggcccgttcgcgcgagaccggcggttcgggactcggcttggccatcaccaagcactgcgtgcaggagaacggcggtcggatttcggtctggtcgcgtacgggggaggggtcgacgttcaccatcgagctgccggccgccccggatgaggatgacgacgaggcccggccggacgagtcgacacaagcgtagggccttggttggtgcccgatatggtgccattccattgccgcacaatcacacagtgggcgaggtgcgcacaccgtgcgtagcacaattacgcaattacgtactttcaggaaacagcaggttaacggagaacaaatggttacgatagtatcggaaaactttgcgcctatgcgcacgggaacatacccaagaaaggctactatggcacgcattcttatcgtcgaagacgaggaatcctatcgcgagccgctggtataccagctcacacgcgaggggtacgacgtgtccgccgccgccactggcgaggaaggtctggaactgttcaccaagggcggcatcgatttggtgctgcttgacttgatgctgccgggcattgacggcactgcactgtgccgtcgcattcgtgagcagagccgtgtgccgattattatgctcaccgccaagagcgccgaaatcgataaggtcgttggccttgagattggtgcggacgattatgtgaccaagccgtactctttccgtgagctgctggcccgcatccgtgccgtgatgcgtcgcaatcaggccacggcccaggcttccggcactgtggatgacgatattccgctggtgtgcggcgatatcgccatgcaggtaggccagcatcaggtcaccgtacgcggcgaaaccgtgttcttcccgctcaaggaattcgaactgctcgaatacctgatgcagaacaagggccgtgtgatgacgcgtcaccagctgatcgaccgcatctggggttcggattatgtgggcgacaccaagacgctcgacgtgcatgtcaagcgcgtgcgctccaagatcgaggaagatccggcgcaccccaagtatctgactaccgtgcgcggtctcggatacaagatcgatactcccgcggagtaaatggaaggcggccttcgggccgccttttttgttgtggattgtgggctcgccgcaggcgagtccactccaaaaactacgtagcctcaacgtagcccacaaacatccaagtgttcatcttctgtttactgatttcggttttgggcccttgaaaccaccaatacgcttgtagttgtcatgaattgaccgggcagcgctgagccgcccgcgaatagttgatagagggattaagtaataatcatgcagaagaacatcctcattcgctccattgccgctctgtccggcattgtgatgctcgcttccgtggccgcctgcggcgataacaccgccaccacgaccgacaacagctcctcctccgattccacttccaagtccaccccggtctccggcaacttctcgggcgccggcgcctcctctcagcaggccgccgttgaagcctggatcgccggcttccagggcaccaaccctgaagccaagatcgcctacaacccgtccggttccggcgctggcgtgcagaccttcctgaccggtgccaccgcttgggccggctccgataaggcccttgccgatgacgaagttgagcagtccaagtccgtgtgcactgaaggcaccgccttcgatgtcccggtctacatctccccgatcgccgtggtcttcaacctcaagggcgtttccgatgccggcaagcacatcaacatggacgctgccaccatcgccaagatcttcgacggcaagatcaccaagtggaacgatccggccatcgccgatcagaacaaggacctgaagctgcccgacaccgccatcaccgtcgtgcaccgctccgataagtccggcaccacccagaacttcgtctcctacttcaaggacgtcacccctgacaactggacctacgacctctccgagaactggccgaacgaggttggccagggcgccaagggcacttccggcgtgatctccaccgtcaagcaggccgacggcaccatcggctacgctgacttctcccaggtcggcgacctgggcaccgtggccgtcaaggtcggcgacaagtacaacgagatttccgccgaggccggctccaaggtcatcgaggactccaagcaggacgacaccgttaagggcgacaaccgcatcgtcatcaagatcaaccacgccaccgaggccgagggtgcctacccgatcgtcttggtctcctacgacatcgtctgcccggcctacaaggacaccaagcaggctgagttcgccaaggcttggctgacctacgtgacctccgacgagggccagaaggccgctcaggatgccgccggcaccgctccgctgccctcctccctgaagtctaagatcaccaagtccatcgaggccatcaagaccaagtgatgacgtcggcccgcaagggtcgtgtggactggacctgacaactgaacgatagactgtagtagtaagagcagtcgccgccaactttaagccgcagtcgtaaaccatacggctgcggcttaaagcgggtcaggacccgaacggtttggcaaagtcacagacgaaaaccgcaccacttgaatacttgataaccaccctatataaggagaatccgtgagttcgcaagacaaaacggctgtgcagccagttggaggcaagaccgccgacaaggtgtttcgcggtgtggcatacgcctgcggcatcctgatcctggttgtacttgccgctgtgttcctgttcctgtttttccgcgcctggccactcatcggtggcgatcaggccgccaacagcgacaccgtgtccagctttaccggcggcaaggccagcagcttctggggctacgtgctcccgctgttgttcggtactgtgctcgtgtctttgctggcactgctgattgccttcttcgtgtccatcggcattgcgctgttcatttcgcactatgcacctaagaagctcgccaccgcgctgagctatgtggtcgatctgctggctgccatcccgtccgttatctacggtttgtggggcggcctgattctggtgccggccatctacccgttctggaactgggttgccaaccacctgggcttcattccactgttcgagggcccggccgccaacccgtcgcgcaccgtcgccaccgtggctgtggtgctcgccgttatgattttgccgattatcacctccatgtcccgcgatatcttcatgcagaccccgcgcctgcacgaagaggccgcgctggcgctcggcgccaccaagtgggagatgattcgtctggccgtgctgcctttcggcaagtccggtattgtgtccgcctccatgctggctctcggccgcgcgcttggtgagacgatggccgtgttgatgatcctgtccccgggcctcaactactccatcaagctgctgcaggcctcgcagaaccagaccatcgccgcgaatattgccgcacagtaccctgaagccaacgatctgggcgtctccacgctgattggaaccggtctgattctgttcctgatcacgttcgtggtcaacttcatcgcccgtaagcttaccgagaaagcgactgcgtgatgactgctgctgagaacactgaaaagactccgatggacggcacgcccgaaatcgacttcgatcgtttccgcccgacccgttccgccatccagcgccgtaatatcatggaccgcttcatgtgggccctgatcgcggtggcgtttgtgatcgcctgcatcccgctgatctccctgctgtggaccactatcgtcaacggcatcaagcgcctgaacctgaacttcctgagctacaacatgaccggtgtggtcggtggtagccagaccccgtccggtggttacggcggtgtgctgcacgccatcatcggtactctcgaaatcaccgctggcgctatggttatctccattccgatcggtttgatgtgcgccgtgtacctggtcgaatactcgaaccgcggcaagctcgccaccacgatctccctgctcgtcgacgtgatgagcggcatcccgtccatcgtggccggcctgttcgccttctcgatgttcacgattctgctgggccccggtaccatcaacggtttcgaaggctccgtggctctctccctgctgatgctgcccaccgtggtcaagtccagcgaggaaatgctgaagatcgtgccgaacgatttgcgtgaggcttccttggctctgggcgttaccaagcagcgcacgattaccaagatcgtgctgcgcaccgctctgccgggcatcgtctccggtgccattctggccatcgcccgcgtgattggtgagaccgcaccgttgctgatgaccgccggctacatctccagcaccaacgtgaacctgttctccggccagatgaccaccctgccggtgttcgtctaccaggagtactcgaagctctgagcgaactgcccgcccaacgccgacgccacctgcgtgaccacgattccgatggaacgtgcgtgggctgcggctctcgtgctgatcgtcatcgtgctgctgctgaacctcattggccgaatcgtggcgaaggtcttcgccgtcaagaccgagcgctaagccagtcgctaagcctaagccttaagaacacaaggaaatataaggaaacatcatgggacaacgtattgacgtcaaccacgagaacatctattacggcgactttctggccgtggaagatgtgaacatcaacatcgagccgaacaaggtcaccgccttcatcggcccgtccg

SEQ ID NO: 3621 - DNA, 9376 bp, Unknown
  R85_18m  MAG No. k141_33731
gaggaaggctcgttctacttctatgaggaggcggtctggccggaatactcccccaagcagatcaacgtgaccgaccgcgccacgattctgaacttcatcatcggcctcaacggctacacagtgtgcaccggcatcgacaacggcgacctcaacaacgagaagatcgtcaccgtgccgctcgacaccgatgagacgatgctggtcggctggatcaccaacgagcgctccaagctctccaaggccgccgaaacctacctcaccaagctcaagtccgtagtcgccgatcacggctacaaactcattgattaggagtaagtaaaacaggcatggtcagcagtgagatatactgcgattaagccaaccccgctggggaaatggaagtaagagccggcccctgagtatctcaggggccggctcttgcgctattgagactgactggcaaaaccagtttgatggcctccggctacttggccgagattaccgacgtggcggctgtcgtggcgaagcctttgagcacttcaatcatcacgtcgcgatcttcgacatcaatgttgcgggccgcggcgagcataatcggcagtgactgtgtcaaatgcgaagtgaggtcgccgaatgtgtcgtatccgccagcctcgaagatggcaaacaggttttcgatgaacttgcggcgatgctcgtcgtcgtattttgccatccatccgttgatcgtgcgtgccaggtatcgcgcgctacttgtcagtccatcagcctgtacgaattggccatgatcgacttgccagtgcaatgcgaaatgctgcatgatgctggcaccgtcgctgctgaccaccgtatagccgtcttccacatgctcacgagtctcaaacagcatgccgatgatcgacgatcccggtaccgatttatggattttcggcgcaatgcgcgcgtacccatcctcatcgaagaacgcctcatcgaagcctggaccatcgtgcgaatacacggccgtgatacgtccctgaatttcgccgggcacattggccgccgcgtataccgccagattgccgcctttggaatggccgccgaccataatcggcccggcccagcggccggcaatatcagtcacataccgcacagcggcctcctgcgaggcgaccggacggcggaaggccatcgtgaaatcctccttccacccgacgatcgaactgtcggtgccacggaaagccacgtacagcgtgccgtcgcccagttcgaagacgcaggccgagaactgtttggtggtttcggcgtcgaattcatccacgtattcgccgacgcgcaggtcgcgccagcgcgggctctcccccatcgcacgcagcagatcgacgttcatctgcggcgaccacaccttgccgaacatggcgtcatagcattcggcgcgtagcaggtcgcggatggagaccgtgggaatcatgccgctgacgtccgccgaatcctcgtgatagcgcggcacgttatccggcatgcgcgcgtaggccagctgggacagggcgagactgtccgcctcggtgaacggcagtgcggcgaaggtgtcgaaatgttgccggatatcgtcggtgatgttccccatggcggccttccttgttcgaatgtaacgaacctacggtaattctacgccgagcgggttttcatcacaggcgagtcggtcccagagtttaaaaccctatctcgccttcaaggggctgatttggccttctggagacatctatctccgtttcaaggggctgttcatccgtcatatcccgagtatgagtggcatcacaccaacgtcattccgccattttcatgctgcttctacttgggcatcagcccctcgaaacggaagtagatctctggaaaccacgacatcagcccctcgaaacggagatagcatcaatttaggcccagattgcccgttacagcatcgggtaatacttaccgtgatcgattttggcggcgatatcacgtaattcggcagcatctcggcggtcttcttcattaccttgcgacaacttgttcgctttgctgtccagatgatgctcgatgccgaagtaactgcatatccccacgagcgcaaacagccctataccaactaaccagttcatagcacgctccttgccaaagcttctgccttaatatggtactgctgttcatggatcgtaataaaaaaagcgggctcgcaagcccgcttttggttttaggttaaagacgatcaggcgccgtattcctcaaggtaggcggcggcgcgctgctggatatcgtggctgagcaacggggtgccgtcggagttcttcatcttggcggcggcgtcgaagatctcgcgcacgttggcgatggagagcaccgggaagccgaattcggcttccacggccttcacggcggacaggtcggagtccttggtcttctccatgcggtccacggagagcacgagacccacgacctcgacgttcgcctcggccttgagcttggggatgacttcgcgcacggcggtgccggcggtcatcacgtcgtccacgagcagcaccttcatgccgtcggtcagcggggtgccgaccatccagccgccgtcgccgtggtccttcttctccttgcggtcgaaggtgtatccaacggtcatgttgtggccggcgttcagcgcgatcgcggtggacacggccagcggaatgcccttgtaggcggggccgaacacggtgtcgatgttgcggggaatcgtgttgtgcacgatggcctggctaatcttttcggcgtagaacgcgccgagcgcggcgatcttcttgccgtcgtcgaaggcgccggcgttgatgaagtacgggctcttgcggccggacttcagcgtgaagtcgccgaacttcagcgcgttggattccaacaggaattcagtgaagcgatgtgcgagtgtttctgccatgatgttccttacctccaagtctgtcctgcggccagtttagcagcgagttcgggacggctgtccagcaggtcgtcaagttcgcgggcgacgcgcagcggggccaccgggtcgaagagcgcggccgcacccacttcgacggcgttcgcgccggcgtacaggtattcgagcgccttctcaccactgtcgatgccgccgagtccgatgatcggaatctccggcagtgcggtgcgcacccgatagacggctgccaggccgaccggcagcacggccgggccggatacgccgccggtgacgttggcgatgatcggctggccggtgcgaatgttgatgcgcatgcctttgagcgtgttgatcatgctcaacgcgtcggcgccgtgttccacggccgcgcgcgccggcacggtgatgtcggtgacgttcggcgtgagtttgacgatcatcggcttgtcggtcatcgggcgcagccggtccataagattggcgagggccaccgggtcggtgcccacgctcatgccgccggcggaaacgttcgggcagctgacgttgatttccagcatgtccgcgtcggagtcggcgagcttttccacgaccgccgcgtaatcgtcatcgcaatgtccggcgacattggagatgacgaacgcgcccgcggccttgagcttgggcaggtcttcggccaagtaatggtcgatgccggggttctgcaggcccacagcgttgatgttcgcggccggcgattcggcggtgcgcggcgaggggttgccctcccacggcacgggcgaggcgcccttggtgcatacggcgccgagctggctgacgtcgtagaaccagcggacggcggcgtactggaaggtgccggaggcggtgccgaccgggttcttccattccagaccggccaccttggtgtggtgcttccacacgtggggctcgtacaggttgatgtggttgtcgctgccctgcgcggactggttgtttgcgctcatcgtcactccccccatccgagctgttcgcgagtgaacacgggtccgtcggagcagaccttgagccggccgtccacggtgtcgatggtgcacagcacgcaggtgccgtagccgcagcccatgcgctgttccatgctcagctgcgcggggatgccgcgttcggcggcccaagcggccacggccttcatcataggcagcggtccgcaggacaagatgatcggcttgcgatcgtaggccttcaggtcgtcgccttgttcgagtttgttgagcaggtcgaccacgttgccttcggcgtcgtcgatgctccacgaccagtccgcgtaccgggagacgtattcctcagcgaagtggtcgttgcggtagccgaatacggcggtggcaaaggaggcgtcgtgttcggcgagcttttgcgcggcgtagattagcgggggcacgccgagtccgccgccgacgagaatgtagttggcgtcttccttgaggttgaagccgcggccgagcgggccgagcacgtcgacggtgtcgccgtcttgcagtcctgccaactgttcggtgccgtggcccacgacggcgaagatcacgctgacttcgtcgccgtcgacttcgctgacgccgaacggacgcggcatgagcatgaagtcgtcgtgcgtgaacaggttgacgaactgggcgggcttggcgtgggaggcgatgaacgggtcgcggaatgtcagtcgcatcacgcggtcggtcagttccgtaacctgcgtgatttcgacgttgtggcgcggcgggaagaatccggccgcagtcgcctccgcaaccacatcatgggtgggggtgaaagttgtcatttcattcctattcagcatatcaagctcccccctatcaggggagctgtcaaccgcaggttgactgaggggtagttaaacacactcggctccggtttccagcccacactcacgtatagcccacagccggacaatctacctacctatatacggcaacccgcagattatcgcgcatgtcgagcgccgcctggcgcgcgctgctcgccacaaggtccagcgcctcgtcggcggtcatggattcggagtacttgccgctcttcttccatgcgccgatgatgccgcgcgacgagttgacgatggcgccgctgccctgcttgtcgaacatgcctgccacgtccgcggccgtgccgccctgcgcaccgtagcccggcacgaggaagaacgtgtgcggcatacgttcacgcaacgccttgccttcctcggggtgggtggcaccgaccaccgcgcccacgcgggagtagccgtggctgccgatggtctcggcgccccagccttccacgagatcggccacatgctcgtagaccttcgtgccgtcggccaggtcgagcatctgcagttcgctggaggacgggttggaggtgcgcacgagcacgaagatgtccttgtcggcttcggcggcggcctcgacgaacggggtgatgccgtcggtgccgagatacgggttgacggtcaccgcatcctcatgccacgggtcgaagtcgcccacgccgttcaggtggtgggcgtaggcggctgcagtggagccgatgtcgccgcgtttgatgtcgccgagcacgtagaggccctgctgggccgcgtattcgcaggtcatcgtgtagatgtccacgccggcggggccgagcgcctcgtacatggcgatctgcggtttgacggcgggcacgatgtcggcgatggcgtcgatgatcgtgcggttgtattcgaagtaggcgacggccagctgcgcggattcgatttcctccggggattcgaccgagtcacgcacctcgtcggcaaagctcgccacgacctgcggcggtaccaacgcctcggtggggtcgaggcccacgacgctggggttctgagtgttgtcaatcgcttcgatcaggcgatccatgctgctccttatgttatctacagacggctgaacatcagctgggagccgatgatcgtggcgagggggcgtccggtgacctgccagccgccgaacggggtgttacgagccctggagtggaactgttcagggtccacggtccattcctcagcggtgttgagcaccacgaggtcgacattgtcggcgtcatccacgcggctcaggtcgagcagtcggttgacgccttcacgctgcggctgagcgtcgctctcccccgcaatcacgccatccggatcatccccagtgggcgcgggttcggcgtagtcctcgaccagcgcggccacgtcggttggcacatgccccatgagttcggcgggtcccacggacatgagctcgatcagacgctcatcggaaatgaagccgccgtcgacgagcaccttgtggcacacgccgtacgcgcattccagtccgatgatgccgttgggcgcctcaaggaagccgagttccttctctgccaacgtgtgcggcgcatggtcggtggccagcagatccacggtgccgtcggcgatggccgcgatggtggctttgcggtccgcttcggagcgcagcggcggattcatcttggcgagcgtgccgtacttgagcagcgcctcgtcgctcaacgccagatagtgcggcgcggtctcgcaggtgattggcaatccttcggccttggccttgcgaatcgcctcgaacgagatggcagtgctcacatgctggaagtgtacgtggacaccagtgcggcgggccgcttctatatcgcgggccacgatcttgagctcggtgtcttccggaatgccgggcacgccaagttcgcgcgagaccgggccttcgttcacggcacctgtatcgtgatgctcgcaatgctcgattaggtacaggtcggaggccttgacgttctccagcacctggtccaggatctccggcgtcacagcggaaccgtcgtcgctaattgcggtgatggggtgcgtgagcatggccggcgtcttggcgtcgtcctcgaatccgggcacgtacctgagccagtcggcaacgtcgcttgcctcatgaccggcgcgatccttggacgcgcacacgcacagatcgtaacgaaccggcaattgaacatcgtgcacagtatcgtactgctgcaggaagtcgatgacgttgtcgaagccggcatccagaacctctttcgcaccggccgcttccaggtcagacacggtctgcccatccagtgccggcaacgtgttcggcatgatgagcacgttcgtgtatccgccggatgcggacgcgcggcagccggagaccatagattccttgtaggtctggccgggatcgcggaagtggacgtgcgggtcttcgaaaccgggggccacggtcagtccggtggcgtcgatatcggcaccgtcagccacggcggaggtgtcggcgaagtaggcggcagcggtcccgggcaccacgaggtcgatgacttcgccggtgttccagaccttgatgttgcgtagggtgatgctcacagtttggcttcctcgtcgcagtagtcgcagcggtattcgagccgttcggagtgcacgaggtggaacatctgcttgatgccgggctcggtggtggtcacgcagcgcgggttcacgcaggagatcacgccgacgatgtgctcgggcaggttcggctgcttcttttcgacgatcttgccgccgcgcaccacgtctacggtggcctggcaggccacgaagccgagtacgtcgaggtcgatgtccttgtcatcctcgattttgatgatgtccttggagccgtaacgcttggagttggcgttcatgatgagcgcaagcttggttttggccgggtcgattttcaggtattcgagaaccttcagcgaggttccggccggcacatggtcgatgatgatgccgttctgaatgctggtgacttccatcaggcctgaacctccttggggttgagcggttcgtatccgggtagttcgtcgcccaccacggtgctttcgagggccatgcgcacgagcatgccgttcttgacctgttcgaagtaggcggcacgcgggtcgtcgtccacgtccacggagatttcgttgacgcgcggcagcgggtgaagtacggccatggacggcttggcgagctgcagcttttcttcgtcgagaatgtaggtgtcgcgcaggcgcaggtagtcgtcttcgttgaagaagcgttccttctgcacgcgggtcatgtacagcacgtcgaggtcgccgatcacggaggccaggtcgcgcacttccacgtaggagcagttgtcggtggcgttgatgcggtcgatcacgtactgcggggtcttgagctcgtccgggctgataagcacgaagcgcacgttgccgaagcggcacagggtctcgatcagggagtgcacggtgcggccgaaggtcaaatcgccgcacagtcccacggtcaggtcggtgatgcggccgaagcgcgactgcagcgtggccaggtcggccagcgtctgcgtgggatgcatgtggccgccgtcgccggcgttgatcaccggcacggatgcggcgcgggaggccaccagcgcggcaccctccttcgggtgacggatggcgaccacgtccacgtagttggacacggtcttcaacgtgtcggcgatggattcgcccttggtcacggaggccagctgcgcgccggcgaatccgatgaccttgccgccgagacgcagcattgccgtctcaaagctcaggcgcgtacgggtggagggctcgtagaacagcgtggccagcactcgcccatcgcaggtatgggcaacctctttgcggtgggaatcgatgtattcggccttatgcagcaggtcgagaatctggtttgtagacaggccgtccagcgttacgacgcttttgccgaccattggcgtttcttcagacaaggctcaccttttcgctcgtggttttcaggtggccacccttgtgtgacctaatataacttacgccatttttcggacagccgcattcaccgagtgttcacctgaaaatccaacgaatatgctgtgtctgtatagctgatatctgctttggaacgccagagctcattcattaggtcgatttgacgttcattaggtcactgcaccctcgtatctgttgttggaatgccgccattccaacaaggtatgcggcggcggaccgacctaatgaacgatgaatcgacctaatgaacgtagtgaacgcaatacaagaaaggtctatcgctgcgcgcggcgtcggttccgctccagtcgcggtgcgatcacgtgcatacgcgggcgaggcgcggtttgcggctgctgcgttgcggcggaggccgtggcggtggttgccgcagtcgcctcgtcttcggcctgcccgtagaacaggcgctggcatacgtcacggcatttgcgcatcacggccagcaggtcgttctcgaaatgctggccgcggtgggcgccgtagccgaggtagacggcgatgccgcccagcgaatagatgtcatcaggcagaatatcggcctggttggcgcgcccgctccacagatagttgccgttgcgggccgcggtgcacaacgtccatgccttgcgc

SEQ ID NO: 3622 - DNA, 12678 bp, Unknown
  R85_18m  MAG No. k141_33803
cgccagtctgaaggatacccgtacatggtgcagcttgttggctactacatgtggcaatccacacaacgtcgaggttcaaatgtcattaccgcggacgacgtgtcgaccggtgtttccgatgcgctgctcgccttcgacgattcaaggacaaactcatccgcccggcaggtcatgggcagctggaatttgcggtgccgcatttggggcagtatttgcagtcgttgtagcaccaaatatagggctgggttcattcatttggtaggttgcgcgttcatttggtgggttgtcggcatggtgaggcgttggaatggcggcatttcaatggtcagtgttggagtgcagtgaccaaatgaacgcataattgacctaatgaatgaagtaagccggttgcgggctagtttcgatccagttctatgagcgccgacgcatcttggccacggcattgctgacgcaaatacgcagcacaatggtgaagacgactaccataatccccagaatgccaatgttgaaccagaactgatccgtggtgtgctcccacagatcatcctttttgaacatcggcaccttggtggggccatacagcagatcgttgagcccgatatccgaggcggcggcggagaagccccaacgtccggggaagatcatgctgaccagctcgaggctgtcgcggccggtgaccggaatcatgccgccggagaacaccaactgggccatgaccagcaccaccagcaatggcatcgtctgttctcccgacttcaccaacgccgagccgacttcgcccaacaatgcggaagtccacgcagtcagccaaatcgccaacaccagttcgggtatgccggaatcagtgaccacaccatggtccgggccgggcttgccgaggctgaccgcagtggtcagaatcgccgcctgcaacaaggtctgcaaacccatcacgatgagtttcgaggcggtgtatgacgtgggcgacaaacccaccgcgcgctcgcggccgtaaatcgctcgctcggagacgatgtctcgcacggacaaagccgatcccataaaacaggcacccagtatgacgagcacaagcagctggttcggctcggtggcggcgtctttgaaatcgggctcacccaagccatgagaaccgggcacaaccagcgacagcagtcctaggagcaatggcagcaacagcaggaagatcagcaatccggggtcggcgatgatcaaatgcagctgacgaatcaccagagtgatggtctgtttgatgcggaatggctttgccggtttctcatgctcggtgtgccgcgtgatggtggactcggcctgcatggtgcgctggcgtgaatcagtaatcgaatacacccgttccggagattcggcgacatcgttgaagatgtcggcccattccttgccgttgaacgcctggctcatctcctgcacggtgccgaagaatgccggatggccgccgggagcgagcatgagcacgttatcgcacaacttgttgatatacgacagtgaatgggtgaccacgataaccacgcggccggcatccgccagttggcgcaacatggtcatcaccgtaagatccagcgccgggtcgaggcccgaggtcggttcgtcgagaatcagcagttcgggttcggtgagtagctcgatagcggtggacacgcgcttgcgttggccgccggacagtctgtcaatgcgattcttacggcgagacgtgagttccagctcattgagcacgttgtcgatgatttcggcgcgctcggccttggttgagccgggcaggcgcagcttggcggcgtattcgagcgccgcgtccacagagagcttgcggtgcaccacgtcgtcctgcggcacgaatccgatacggctgcgcaacagttcgatgttctgatgcacgtcgtatccatcaaacagcacgcgcccgtccgtggggctgttgagcccggcgacgatggaggtgaatgttgatttgccggcgccggaaggtccgattacggcggtgagcgtgcccttggcgaatacggcgttgatgccgtcaagcagccgggtgcctttgcccacggtcagtccgatgttttcggcgataaccgcgtcgttgctgacaaacggcgtgcggtcgcacagcacgccttcatgcacgatcaggtcggtgttgccgacggtgacgacgtcgtcttcccgcagccagatcttcgcgacgcggcggccgttgacgtaagtgccgttggcggagttcaggtcagtgagcaggatgccgctgctggtggtttccagcgagcagtgtttgcgggagaccagataatcgttgatgcgaatcaggcaggcggtatcgcggccgatgacgcctgtggtgtcgtgctcggggctgaaggacccgtgcacgcggttggtggtgagttgggattcgagccttaccgcttgcgtgctgcctgccagaacggtgccggcggcattcgatggggaaggggatgcgcagggagacggagatggtgatgcgggtgataccggcactggcgatactgccgtcggtgccactgctgttgggcggggttgctgttgcaggtgcgcgagggccggggatacgcggtgcggggccagcggggctggcgttggttgcggttgtaccggttgtgccggttgcggtgctggtggtgtgggttgcactactgggcgtgcctgttgcggcgcgagttgcgtgggttgtgccggttgcgctgatggtgccggcggtagcgcaggctgggccacgtttgccgcagggcgtcgcgggggctgtgccggcgtggacggcccgctggttccgacgatgcagacgatggtggcaccttgtgccagcgtcactttggtgctgttcagcagcagtacggaagtggtgtgaatgccgttgatggacagtccgtttgcactacccgtgtcttccaagagccaaccatcgtcggtaaaggtgacgcgagcatgatggtgagatacgtacgggttgtgaatcaccagatcgcaatccggcgcacgcccgatggtcgtggcacgtgcaggattgggggtataggtggcggatccgtagtgaatagtaagggcaggtggcattggttcagacttccgtgttcttcgatctctctgcacacagatgtaccacgaccgcattacccccggtgaacggggtctgactgatggtcagaaactcagcacctcgaccttgccggtgtcgagctggtaacgggcgccgacgatcatcagctggtcggcagccaatgcctgctgaatgatgggggattgttccaccagcgtctcgatggtgtgggccacgtgtacgcgctcgatgtcttcatgcgcgtcgagctcggcttcgcgcgcctgccagacggacatgccggcctggcgcagaataatcgattcggcggcggcgatgtgctcgtcgaggtcgtccatcgcatccgcggcctccagtgagccgtcggcttcggaagtgatggtgtgcatcaggtcgtccagctcctgctcggcggcctcgattgcgccgcagtgctcgtgaccgagcacacagatcaggctgacgtgcagtttcttgaccgcgtactccagcgaggcgataaccgcgctatcgatgagttgcccggcggtgcgcacggtgaacaggtcgcccaggccctgatcaaaaatgatttccggaggtacgcgcgagtccgagcaggagagcaccgcggcatccgggttctggccatcaagcagcgtctggcgggtctcctgatcctgccatggatggtcgggcttgccctcggcaaagcgccggttgccttgcagcatgcggctccacgttgcgttcgcggtcgattcctgttcaaagtctgactgagccatgaaacctccattatcagcggactgctggtacccatagtagcgattggaagtgcggattcgcgactgcatgcataatctggctttgcccaaagcataatgagaacgctcacgatctcaatcctgtttaagggtgggccgtgatgatagtcaacacaagggctgtggctggtgtgataaggctcatatgttctgtccgcgcgagccgtggctcaccacattacgataggtggtggtaaacgcttgaagattaacaattcccgaaaggaccgatgatgactcttctgcagcatgaactgaccgatttcaaggtgaacgcattccagaacaacgagttccacgaagtgaccaaggacgatgtgctcggccactggtccctgttcttcttctacccggccgacttcaccttcgtgtgccccaccgagcttgaagacctggccaagaactacgccaagttcaaggaaatcggctgcgagatctactccgtctcctgcgacacccacttcgtgcacaaggcttggcacgacgccaacgagaagatcgccaagatcgagtacccgatgcttgccgacccgaccgccctgctggccaaggatctcgacacctacaacgaggccgatggcgtggccgagcgcggcgacttcatcgtgagccccgagggcaaggtcgtggcctacgaggtcatctcctccaacgtgggccgcaacgccgaggagctgctgcgccgcgtgcaggcctcccagttcgtctacgagcacggcgaccaggtctgccccgccaactggacccctggcgaggaaaccatcgagcccagcctcgacctcgtcggccagctgtgatcgacactgaataggcggtaaccttggctcccctctctgaggggagctgtcgctgaaagcgactggggggagtgctcgcgagagctagcctgatccgatatgcttccctcagtctcactacgacagctcccctcagagaggggagccagtgtatgtaagggagttttcatgactcagaccaacaatctctatgacgtcgtcgtcattggtggcgggccggctggcctgacggccggcctgtacctggcccgcgctcgctaccgcgtgctgattctcgaaaaggacgatttcggcggccagatcaccatcactaacgaagtcgtcaactatccgggcgtgggccgcaccacgggccgcgcactcacccagaccatgcgccagcaggctcaggacttcggtgccgaattcctctccgccgaagccaccggtctcgacgtggatggtgacatcaaaaccgtgcacacctcacgcggcgacctcaagaccttcggcatcctcatcgccaccggcgccagcccgcgcaagctgggcttcgagggcgaggccgagtacgccggccgcggcgtggcctactgcgccacctgcgacggcgagttcttcaccggcaaggaagtactggtggtcggcggcggattcgccgcagccgaggaatccgtgttcctgaccaaatacgcctccaaagtcaccgtgctcgtgcgcgaaccggacttcacctgcgatgccgcagtggccgccgaagccaagaacaacccgaagatcgacgtgcgttatcaggtcgagctgaagggcgtcaccgccggccaaggaggcctgcgagaagcctcgatcctgaaccttgccaccggccagaccgaaacgtggaagcccgccgacgccggcaccttcggcgtcttcgtgttcgccggctatgtgcccgccaccgatttggtgcgcggcgtggtggagctcgacgaccacggttacgtggtcacgcacgactacctcagaacctcggtgccgggcgtgtacgcggccggcgatctgcgcgtcaagaacctgcgccaagtggtcaccgccaccgccgacggtgcgattgccgccgtggaactggagcgttacgccaagcagatgagcgagaaaaccggcttggtgccgccgcgtcccactgcttccgcttatgaggagtccgaggccaaggccgcctccgccgcctcggccgctggcacgacgcccgccccggctcccgccaaacgcagcgccgatgccgcagccgcagccagcgccgccaagaagcccggcgaactgttctccgccgccgtcaagcagcagcttggcgtggtcttcggacgcatgacccgaccggtcacgctcgctctcgagctggacggcactccgctttcggcggaattgcagggtttcatcggcgagatggtcgcgttgtcgaatggcaagctgaactcggtcgccgttgatgccgcagggctgatcacggcagtggatggtgcttctgtgcctacttctttggtggtcggcgaaccgctgtccgtcaccttgccggacggcaccgaactgcccacttatggttcgttggacgattccggccgtgccacgttcgacgtcgccggcgtcctgccgctcgcccgtccgaccgtgcgcatctgcgtgccggctgagggcgacggcaaggccggcaaggacggcaatggttcactggtcttcaccggtctggccttccacggcgtaccttccggccacgagttcaactcgttcgtgcttggcctgtacaacgcggccggtcccggccagccgctgggcgatgacctggtcgaacgcgcgaagtccatcacggacccgctgaacatcatgatcctcgtctcgctcacctgcacgatgtgcccggaaaccgtgcttgcttcccagcgcattgcctccctgagcccggccgtgcgcgccgaagcctacgacgtctcgcacttccccgaacttaaggaccagtacggcgcgatgagcgtgccctgcatcgtcatcacccacgccgacggcacccagcaagtcgaattcggcaaaaagagcatcccccaaatgctcgaactggtcggcgcgtaagccgcacgacctcaggtactcaacagcaacaacaacgattctgccaaaatcgtgacgtacatcgattgatgcgatcgatgcgcccgactccggcagaatcgttgttttgcggcagctcagcctcggtcttcgacggccttcgtgacgtttctgtcgccgaggtacttgaccaggctgatgctgatcagggccacgacgaacaggccggtgattaccggaatcagcgcggcgtagcggtgggcctgatcaggcgcgtgggcaactacgaacgaggccaactggttgccggacagaccggcgaacgcccaggcgctcagcgtcagaccgtgcgtggtggagacggttttggtgccgaagtgctgatcaagcagcacgggcagcgtcgagaaaccgccaccatagcccgcgttgacgaggaacagcatggccagcacggcccacagcagagcgttgtcgatgctgttggtgaagatctgcagcaagcacacggcaatcgacatgatgaagattacctgatagacggtctcgcggcgcttcaggtggtcggagagtgtggagaagcccacgcggccagccgtgttgaacacggagtccacggcgagcaccagtccgatgatgccggagatggcggcggcaaacttggcggggctcaggttggcatactgcgggaaggccttgagcacatcgtgcaggatgtccttctcttggctgatgagggccaggccgcaggtgatgttgatatagaaggctatccagatgccccagaacacgggcttcttgaggattgtcttgcggctgacgtgtgaggtcgcgggatcgtacacccagccggccggacgcttgatgagcaggaagccgacgaacatcatcaccgcgtagaccgcggcgaggatgaagaacatgctgaccaggccaaccgtgccgatgagatattccatcagtgggctggcaatggccttggccaggccgaagccggcgacggcgatgccggtggcgaggcccttgttgtcggcgaaccaaagcatcaggttcttgaccggagtcagataaccgacgcccaggccgatgcccatgatcgcgccatagcagatgaacacgcccggcaggaagttcagggcgatgctcacgcccgtgccggcgaagccgaccacgaagcagaccatggagacgagtgcggatttcttgatgtttttctccaccattggcccggcaaacgcggcggacatgccgaggaagaagatggcgagtgagaagccccattccacggaggcggggctggcgtggagacggtcagcgataagctgcttgaacacgctccagcaatagacggtaccgattgggatatgaatcagcagtgcgggaataatcgcgctggtccaacgattctcggtaaaccttgccatatatggacggatcctttcgtaactggtgtacgatgacctgccgacccgaacgagagtcgcatcgcccatatccacgcacatcacgacggcatgcccccgtgaaccatccgggctgcacgaatcgaatcaaatcgaatcgcgcgaactgcgaacaattcgctaaacatccttggtgtgcatttcatcggcgctgctggctcttgtcgacgccgacaaacagaactataacgctgttatggggttgctgtggctggtttctgtggtcggaagctatgagctttctcacatcgaaaacagttatatgacggtatcggcgtgattgatacgtgacgtctgcccgtggacgcggcatatccctctcggaaaacaatgactccgtcatgtccatttcttggtttgacatgttttcgtttgcagcgtcggtgctcaccacggtgaccgcggcgttcgagtcgccgggcagggcctcgaccgagggtctcatcctcggctgagatgtgggcggtactatggattcttatcgataaggttcgtgatatgcggagatggtaacgatggtgaccttaaaggatgtcggcgaactggccggagtgaccgccaccaccgcctccgcggccctgcgaggcaaggattacgtcaagcccgaaaccacgcaacgcgtgtgtgacgccgcccgcaaactcggctacaaaatcaacctgtctggccggtccctgcgttctgggcggtccgataccatcaccttccttacctcgggcctcgagggcgactatttctcccatctggccatgtgtgtggctgaggaagtgcacaagcgcgactcgcacatgctcatcgaactgtcccggtatcttaccgacgacaacgatctgtcgtacacgttttcggacggcatcatcgccatcaatgcgccacgtgcggtcgatatcctgaagcggcacccggccgtcatgctggaaaactacgacaccagcctgcccatcgacaccgtgaacgcgccgagcgacgccggctcacgggcggcaatcgaacaccttatcgtgcgtggctgtgcgcgcatcggcatcgtcggcgacaatcacgatcccaacaatcccaacatcattcccggctcgcgtgatattcgtatgcgggccgccaaggagacgattctcgcggccggactgccgtttgacgagcgccgtgatttcatcaaatcctcgtggtcgattgacggcggtatcgaggccgggcgcggcttggccaagaaaggcaagtgcaagtacgacggtctgtactgcctgaacgacggtattgcgctcggtattctgcgtggtctggcggacgatggcgtaagtgtgccgggcgatgtgcgcgttatcggcttcgacggcctgagccagagcatgtacagcgtgccgactttgaccaccgtggccaccgatttcaagggcatggcggataccgcgctgaccttgcttatgcggcgtatcgagaacctggacgacgagttcttcccgcagaccgtgaatgtgggctataagctcatcgagcgcgaatccactgcggcgtagagtctttggccgtgttgagcttcaattgggtgattggactggcaccagcggctgatatcagatatgccgaaagcagcgatgatcggatttaagttgctggagatgacaggatggattgctctttacccctttcaccatcttgcaataattcttacatgtaagaactctctgttaacatgtaagaattattgcaagatggtgaaaggggatgctcatgttgccggccaaagaaagtttgacggttgagttcaagagtgagcagaagcgccctcaatcgcatgatgaaattgttgacaacgtagtggctctagccaataccgaaggcggcacactgtatctcggtattgaagacgatggcactgtgaccggcgtatgtgacgagcatcgcaatatcaatggacttgcggtactaattttcaataagactgttccgcagcttcccgctcgcgtggcgctcttgtatgagaacgaggtgccgatagtcagtattgaggtggagaacagtcagcaaatcgtatctaccagtcaggggaagacattgcagcgccggctgaaagcagacggctcgcctgaggtcgttccgctgtttgtttcccaattcattagccgtttatctcagcaacggttctacgatttcagcgcgcaacctgcaccagaggctcggttggacgatttgaatccagactcacggaacaagttgagaagccatattcgcagtgccaatgcgcaaaactcgttgttgtcttttactgatgaggatttcgatcgggcacttgagctggttgttgatggcccgtatggattgcagccatctgttgctggtctgctcaccattggttcggttgatgctattcatcgatcggttccagccgcatcggctgtttttcaagtgatgaaaggcatgtctccaaaggtcaatatggatccgttcgtgttgcctttggtggatatgtttgatcgtgtaggcgagctgatggagccatggaatcccagccacgaagtcatgagcggcttgattcgtgtcgatctgccagacttcgatcgaggggcattccgtgaggcaatgattaacgctttctgccatcgcgattatgcacgaatgggttcggtgaggttcctggttgatgatgatgggttgaccatagctaatcccggaggattcatagagggtgtttccgaagataacctgcttactgcacaaccgcgttcccgcaatccgcagcttgccctgattctgaaagctgccggatatgttgaacgcaccggacgaggcgtggataccatctatgccgggtcgattgcggcgggtggttctttcccggattattcacagtccagtgctgaggaagttatcttgttcttgcgccgcgtggtacctgacgaggcattcgtaaccatgattggcgacgaggaacgtcgacgtggggctccattgccggtctggtcactgattgtgctctcgctgctgcgtgagcatcgtaggcttaccgtggtccaattgtgcgatttctcccatttggagcatcgacgcatcgtgtccgctgttgagaatctggtggaagctggtttggtagagggggtcggtagcgggagctctcgttcgtatatgctgagtgcccgagtgtacaaacgttcagaggggctggcgtcttacgtgcgccagcgtgacatcgatgccacccggcgcagtggccttgttctggagttcgccgaaaaaaatgatggtgtcgtcactacggcggatgtcatggatttgtttggcctgagctatatcagtgcataccggttgttgaagaagctagaggatgcgggcaagttgcgccgcgaggggaatgggccgtcatcccgatacgtgttgggatgattggcgcgcgtgaaagtaagttctttcatcacctttcaataattctttcatgtaagaactctctgtttacatgtaagaattattgcaagatgatgaaagatgtacacaaaacggggaagctctgctcgatgtgagcggggcttccccatatgcgctggtgtgtagatcagcccgtgttctgcaggccggcagcaacgccggagacggtgcacaggatgaggtagatgaatcctgcctgctggctttgcgtgttttgcttcaatttttcttaagcagagtgagacccatcgtatcgttcgattctacgacgaacgttttgcatcaagcgcagataatgtggtgagtgcatattcaacaatggcggacggtcttgatgcacttggtttgacaaatattggaatgagcgaaagcatcctaaaaaaggctgccggtacagacaagcttcctgataagcaggaagctgaagtgagtgctcgggcgttcgctgcattcattgatcagccaagacggtagctcgcataatgcattatgtgtgggcagatgtgtcgtctgcccacacattcgctgttgtgctttcgatttggaattcctctgccagatacggggaaacttctaaaaggccgctatgccgaggaagagtcctgtaataccggtggccatcaatacgatgatggtgatgattccggcgaagatgcgtacaggaagggtttcttttccatggtttgatgggctgtccgcaactaatctcattactccagctgtaacccagcaaactgcgcccaggactagtgccaggaattctcgacaccattccgtttcaagtgcgggaatgccgacgattgatgacgggtcgcttgccagtcttggcggaatagcgcataggatacgctccaatatcaggtaaggggtatcaaaatggatcagagtcaaagcgaatgggagctgtagcgccagtcctatccaccacagcgtgcgtcggatggtcgcgagtctgtcgcccggcctagtgtccggcttgccgccttcgccctccgtcccggcaccgtccgcgggcgtgtggtccccctcgtgcgcgtccgtcgtcccgtccg

SEQ ID NO: 3623 - DNA, 5955 bp, Unknown
  R85_18m  MAG No. k141_34032
atactcgtcgttcaacgcaatatcctcaagctcggtggccacatcgaacaacgcacgctcgtcggacggcagtttctgcgtatcctcgcgctccatgatcttctcaagatacttcttggcaatcgccgcacgcggatcatacgacttgtatacacggtggccaaggccggaaatcttctggccatcctccttggcatcacgcacgaactcggccacagacttaccggaatcacgaatcgccttcaattggcgtagtacggcctcattcgcgccaccgtgcaacggtccggacaaggcattgacgccagcggccaccgccgaatacaggttagcgtgggcggaaccggcgatacgcaccaccgaggtcgagcagttctgctcgtgatcggcgtgaataatcagcaaacggcccaaagcatgcacatacaacgggtcagattcgaacggctcgtacggcacagcgaagcacatgcgcaggaagtcgtccacatagccacgcgcgtaatcggggtacagcatcggctcatcgcgacgacggcggaagatgtacgacacaatcgtgcgggccttggccatgatgatcttggcggcctcatcgagctggtcggtgtcggagatatcggtggtgtccggatagaacgtggccagcgcattgatggcggaggcaagcacgctcatcggatgagcggagcgcgggaacgaacccatgaaggtacggaagtcttcgccaaccatcgtcttgtggttgatgtccgcgcagaactgctcatactcagccctgctcggcagctcgccgtggcgcagcagccacgccacttccagaaaatcggagttctcgcacaactgctcgatggggtagccacggtagcgcaggatcgaatgcttgccgtcgatgtaggtgattttcgattcgcactgtgcggtggtgaggaatccggggtcgagcgttacccagccgtcattgcgcagcttggaaacgacgatgccatccggccctgcactagccttcaccacgggcaggttgaacttgttcgaatcgacatcaagttgtgccgttgccattcgcgcaccttcctcttcatgaaccacttaccccaaacattaacgttcacgcgttcgcgaacgctagtgttcggtactttatgtcttctgtgttaccgccggcagacaccggtcgatacacgaaagccgaagtgcgctcatgctatcaaagcaaacgcacttcggcttgttacgtctcgaattcgcgggaaaaccgcaaacatatagacggttgatgagatgccgatcgcccatcacaggccaatcaggcacccgccatacgccaaacgccaatcagaggttggtgcgatcggtgaagatgatcgggccgttctcggtgatggcgatggtgtgctcggagtgggcaccgcgcgagccgtcggaggcacgcagggtccagccgtccttcggatcctggaagatctcgtcggtggtcttgaggaaccatggttcgatggcgatgaccaggccttcgcgcagcttgtagccgtggtgggcgcggccgtcgttcggtacgtgcgggtcgccgtgcatgatgtggcccacgccgtgaccgccgaactcgaggttgatcgggtagccatattcgcgcgcgacgtcgccgatggtgttggagatatcgccgagacggttgccgggcttggccacgtcgatggcggcggcgagcgcttcctcagtgcacttgatgatgcgcaggtcttcggggtccgggtctttgccgaccacgaagctgacggcggaatcggccacccagccatccacggagatggcgagatcgagggagacgaggtcgccgtccttcaggctgtaatcgtacggcacaccgtgcagcacggcgtcgttgacggaggtgcagatgtagtgggcgaacgggccggtgccgaagtcaggagcgtagtcaacatagcaggattcggcgcccttgcggtccacgatcttcttgtggacgaactcgtcgatttcgagcagattggtgcccaccttggtggtctcctgcagttccttcagaatgccgccgacgaaacggccggcaggcttcatctcctcgatttcacgaggggtcttcaattcgatcatgaggttctttctaccttgttgagacttgttctcaactctagcccagcccggggtcaaccgccagagcatcacccgtggtctgcctagggtccgctagtagcctatcaacggccaaggccgagaaaaagcgcccggcagatacataatctgcacgggcgctttggattgattgtccggagattgattgtctggagcgcgagattacttgcgacgcttgccgaaagtgaacgcgcgaatcaccgaagtaatccccatcaccaccatggcacatccgccgaagataatcatgaatacggcggagctcagcgggctcatcagcaccacgaagccggcgataatcgagatgatggcataggcgatggcccagccggagcgcgggatgcgccatgattcgactagagccatcacgccttccataatccaaccgaaaccgaccatcagggtgatgagtaatgccaaggtctgaccggtcataccgtagtttcgtacgactacgacgcctccgaaggtcagcagaatgccgacgaacacgtccagcacacgccagccgcccggcagacccggctccacgagagcgctgacgatgcgcaccacgccggaaatcacgaaatacacgccgagcaacaatgcggccaaagccagcgtcttgttcggcaccaacaacagcgcagcgcccaaggcgatggcagccacgcccaccacgccgtaaatgatgcgaatcttggtcttggccttttccggcagccattcctcgatcaggcggaatggactgaaattgccgacataccagttggtctgctgccagccgggttgactttgatcgccccatggaccattcggctgcccgtccgcttggctattcgattggccgtccgcctgataccgccgaccgtccggaccccatgctggctggccgttcgggccatagttcggattgtaggcgtacgggccgtagtacgggttctggttcggtccgccttgtggctggccgttctgcgcctgctgattctgagtgtcttgcgctccctgcgcaccttgcggaggatattggccgccatgattgctgtcatacgcgccatactgcggttggcccggttggcccgccggattcggctggctcggctggctctggttgggctggcccgtctggccattccactgaccctcgtttggattgctcatcgtaactccttaactcaaggtccatattcaggttccacataccatgttaggcaagttacctaatttgaaccatcactacagttaggcaatccgtctagttcactgacagcgcaatacccataacgcaatatctgcatcaccaacgcttctcccccgccgcgattaggcttagggccatgaccaacgaaaccgaaacgctgacgtcgggcatcgacccggcatcgttctcctccgtcatcaagccgaccaatgacctgttccgctacgtgaatggtccatggatcgacacctaccgcctacccgacgatcgttcgcgctacggctccttcgacaagctcgccgaagacgccgaaaaccaagtgcgcgacatcctcgacgccgacgactgcccggccaccaaatcgcaggctctgtatcattcgttcctgaacaccgacgccatcgaggccgccggccttgacccgatccgcgatgagcttgacctcatcgattccgccatcgacaaggccgctctcacgcgcgtgctcggcaccatcaacccagccggcggccccgacctgttcggcttggccgtttacggcgaccccggcgacccggaccgcaatatcgcccaccttgagcaggccggcctttgcctgccggacgaagcctactatcgtgaggaccactacgtccccgtgcgcgaagcatacgtggcgatggtcgccacccagctggtgaacgccgggtacgcgcccgccgccgaatccaacggtggcgatgaactgccggccaacaccggcgatgacgagagcaatgctcccaccacggttcccagcgaagccgcgcttgatatggcccgccacttccttgccgtggaaaccaagatcgccgccaatcattgggacaatgtggccacgcgcgattcggtgaagacctacaaccccaccgattacgccgatttggccgccacgctgaagaacttcgatctcggttcctggatcgacgcctggcagaccgcctatgacgccaccgaggccgccaaggctcagccgatcgatttcaagtctgtgttcgcgcgcgtcattgtgcacgagccgagcttcctcactggtcttgatgcgttctgggccgaggctgatctggccgaccttaagctgtgggcccgtgttcacatgattctgggcttcgcctcctccctgtctcgcgacttcgacaccaccaactttgacttctacggcaaggtgctctccggtgccaagaagcagcgcgatcgttggaagcgcgcggtgagcctggtcaacggcgtctgcggtgaagatgtgggccgcgagtatgtgcgcctgcacttccccgaaagctcgaaacgccgcatggaagagctggtcgccaatctgattgacgcctaccgcgtgtccatcgccaattccgattggctgggcgaagacaccaaggccaaggctctggagaagatctccaagttcacgccaaagatcggctacaccaaccactggcgcgattactcggcactgagtgtctccgcggatgcgctgcccgccgagaacgccaaggccgcgaacctgtacgagaccggctatcagctggccaaggtcggcaagtcggtcgacaaggacgaatggctgatgaatccgcagacggtgaacgcctactacgagccgagcatgaacgtcatcgtgttcccggccgcgattctgcagcccccgttcttcgacccgaaggccgaggatgcggcgaattatggtggcatcggcgcagtgatcggacacgagatcggccatggcttcgacgatcagggttcgcagtatgacggcgacggcaagctcaacaactggtggaccgacgaggatcgcaagaacttcgaggcccgtaccggcgcattgatcgcccagtacaacagctttgtgccgctgcagctggtcgagaagtacgctgacgagcctgataaggcgccgcacgtgaacggcgcgctgaccatcggcgagaacatcggcgatttgggcggcgtgaacatcgcgctcaaggcgtatgcattcgcgctcggcaaggcggcaggtaagcccgacgccgaagaagacggctcccccgccgccatcaaggcactgctcgataccgcccccgaaatggacggattcaccggcctgcagcgcttcttcctgagctacgcctccatctggcgcaccaagaaccgcgacgagctggccgaacagtacctgcagatcgacccgcattctccggccgaattccgcaccaacggcatcgccagcaacgtggacctcttctacgatgcctttggcgtgaccgaaggcgacgccatgtggctcgcacccaaggaccgtgtacgcatctggtaatccccgttatgtaagagaaaaccgctgtgcttgcctcgattacaggcgaacacagcggtttttcatgatgtatggttggcactcagaattcggattcgccgggatcggaagattcggcgaaaccgtcgacataggtttgttgggctgcggactgtggctgattagcgccagcgtccggttgcgacatgacggcatcggccatggacgcagccgctgactcggttgatggcgacggcgattggccggaatcggaggtgaccccaaattcgacggggccagattccgacgaggtcgcatacgggtc

SEQ ID NO: 3624 - DNA, 11685 bp, Unknown
  R85_18m  MAG No. k141_34376
agctcttttgccagctcatcgtaatcggtatcggtggtcaggtacttgagctttcgggcaattttctgctgttttgctttttgacgtccgcggcccatctgaccccctgcgattactgtgctgttcgattcatcaacaatagagagtaccactaatagtggcttgttcgttgtcggctcacacttttaccataaaaagcgtttatctgagccctatttaaaggattttcgcatgaccgacgagcagcaactgacagcggcaggcaatgagatgagcgcgagcttcctcgcggccaaaaagcgttcggacgaaacgctcgccaagctggaggccaagccgtcgtccttcaccatgttgaccggcgaccgtccgaccggccggctgcacctcggccactacttcggctcgatccgtgagcgtgtcgccatgcaggagcgcggcgtcaacacgaacatcatcatcgccgactaccaggtgatcaccgaccgcgacaccaccgagcacatccaagacaacgtgctgaacctggtgctcgactacatggccgccggcatcgatccgaacaagaccatgatgttcacccactccgccgtgccggccgagaaccagctgctgctgccgttcctgtccctggtcaccgaggctgagctgcaccgcaacccgaccgtgaagtccgagatggaggcgtccggccacgcgttgaccggcctgctgctcacctacccggtgcaccaggcgtgcgacatcctcttctgcaaggccaatgtcgtgccgatcggcaaggacaacctgccgcacgtggaaatcacgcgcaccatcgcccgccgtttcaacgagcgttacgccaagaagaacccagtgttcccggagccggccgccattctgtctgaggcaccggagattccaggtctcgacggccgcaagatgagcaagtcgtacggcaactccatcatgctgggcgccaccgccgaggaaaccgccaagctcatcaagaagagcccgaccgattccgagcgccgcatcaccttcgacccggttgcccgcccgcaggtctccgccctgctgaccaccgccggtctggtgaccggccgcgacccgaaggacatcgccgaggagatcggtgattccggcgccggcgcactcaaggcatacgtcatcgaatcagtcaacgagttcctggccccgcaccgcgagcgccgcgccgagctggccaaggacatggactccattcgtgacatcctgcacgacggcaacaagcgcgccaacgccatcgccgaggagaccctcgaccaggtgcgcgaggccatgggcatgaagtactgattttcccgccgctcgtagcaagacgccgtgtcagccccaactgggcaactgacacggcgttttttgcattgcggcgtctgctgtgtcctatcttcacttcgaggggcggatttctcgttttccggaggtctatctccgcttcgaggggctgttgctcaagtaggcgaggcacaaaaacggcggaatgacgttggcgtgaatgggattttatctgagattgagcgcatgaccagccccttgaaacggagatagacctccggaaaggctcaaatccgccccttgaaacggagaatcaagcgttagtaactctcaattcaaaaaacacaacatgttttccgtgcaacgcggctatcaagacggacctctggtcacttcatgccgatggcttgcatcaatacgtacgctccccgcacagcaatgtcattacgacgtgttgcggcatagcgcgcatggcttccggagtatcggcggcgtatgggtcggcgtccaacaacaccatatcggccgggtcgccggatgcaaggcggtcacggccagtggcggtcgaggctgccagcgaggtgcgcacatcgaggcactgctcgggctggaacggctcgcggtcagagctttcggagccgaacacggcggcggaaatggccagccacgggtccagcggggccacgggcgcatccgagcccatgcgcagcgtggtaccggcgtcgtggagggccctgaacggataagggataccggccgggttggcccagaaacgggtgatgacgtcgcggtcatccatggcgtgctgcggctggatactggccgtgagccccagctcggcgaaacgcgggatatcgaagggtttgagcatctgcgcgtgctcgatcgatccatgtgcgtgcgtggcggcgactgcgttgagcgcaatggtgttcgcttcgtcgccaatagcgtggcaggcgatgtcgaagccatgctcggtggctaggcgcatatagtcttcgatttgctgcggcgtgtagctcagcgtgccatacgtcggcggctcgatgcccgaatacggcgtggagcagtaggcggagcgggtgttgagcgatccgtccgagatgagcttcatggcgcccacatggccgagcccggcgctgcccggcagtgggttgccggtatgccaacccgcgtcaatggcggcttgcaaccgctcggggtatacaccagcgtccacgcgcaaaccgttaatgccggccgcgaaacgattggtccatgtatcgatgttttcggccatttcataatcgcggatgcccaccacgcccttgcttgcggcgtcctgttcggcctcgcgcagcagacggtcagtctcttcagcagcgcccggcaccttgtcgaaggcggtgtaggcgttgaaccattcgagttcaccgaccagaccggattcgtccacatgtacgccaagcctgcgggccgcggcggagttcacccatccgcagtgcatgtccgcgctggagagggccaccggctgttcgccggtcacggcgtcaattgcagccagtgtgggctgctcgtcgtcggcccacagcgagtgacggaatcgcatgcccaccacgaaggcatctgggtcaagcgtgccggcggcgcggcgctcatccagatgacggcgcaacatgtccatcgcttcggcggcggaacgggcattgatgaggtccagtcggcccagcgtcttagcccattgcgtgaagtgcgtatggcagtcccacaggccgggaataacccacaggccgtcggcgtcgatggtggtttcgtcagcaggtgcggcggccgacgttgggattgagacgctgccagaagcaatggcattcgtcgcgtatgccaacgatgtcgtatgcgccttagtctgcatcgtgccgtccgaagccgagaccgttccagcagggccgacagacgcaacaaccccatcgcgaagcaccacatccacgcggtcctgagaccccggaacaccggcattgacaatacgcaccaagctactcatacccgccatcatgccacctttgcatgaacgccatggagattcgttcaagctgaatcgcgccgtcggcggcgattcccgctggctgcctgcaaacccctacgttccatgtaattgcgggatggcctgcaactgcgatgaacacccatagtttatccaccgacttatccacatttatccaccgaaaaattggggcggtagacagggccggtagccggaccctacactgcgaggacaaagcgaacatcacgaaggggtgatcatcatgggtagctcaacggcattgaccgagctgacaatgcagaagtatcaacgaatgcagacgtgcgcagatgttcaacgacgaagcgcatggcacccaccctatgccctgacaacagcattggagcttttgtcaattgaagtaccccgcatatcaagcaaacacagaggccttgcaactacaaccattgttgcggttccacacgccaatgacaaacggcacattgtgggggtcaaagtggttgtatggcctttcccactagacacggtcataatcgagggacaattcacatgcacttcaccagcttgcacatgggccatgttctccgcgtatctcgaacttgaagaactcatcgttctcgctgattccatgatgcgacgagatcgaaggctctgcagaacaaccatcgacgccctttctctgtatctcgatgaggccgaggcccaggtgcgagccgacaaagagaatggcaccaattcgtatttgttccgcgggtataacaaatgccgtcgcgccctgcttttggcgcgcgcgggcacagattcctccatggaaacacgaactcgtttggttctcttgaaatacggtctggattgcccgcaggtgaattatccaatattcgtaggaaacaacaccagacccatatatctcgatcttgcataccctgaattcaaggtatgcatcgaatacgaaggctctcatcatgccgggcaatggctgaatgacgcgagacgccgccagatgatcgaagacgctggctggaagtacattcaagtcaccaaattagatattggcgacgaagcgggagaagaggcccttgcccgaagagttgccgagaggatacaggaggttacgggcaaaacggtccagctcacgatgcggcaaaccacccagcaaattagcgatgtccgaaagctacgccgtattccgctgtacaaacggctgaaattcgagcctctgctgccaattattccgacgacgcaggaataataagcccggtagagtcagtccgcaccgtccgcaccgcgctacggtattcaaaacccatttcaaggggctgatttggcctccgccggaggtctacttccgtttcaaggggctgatcatccgctagatcacgtgtatcaatgcccttacgccaacgccattccgccgttttggagccgcgtctactcaggcatcagccccttgaaacggcagtagacctctccagaacgtcaaatcagcccctcgaagtccgttttggcctcaatggttcctgccgaaccacaaaaaagccactcctctgccatacgaggcgaccgcacagcaggcacgtgtcatttgccgctgcgaacctcggactccatggcttccatgggctcgtcgacgagcacggtgccggacggcagggtgccgggcagcggatcgtccatgtagtggtcgaattcgtagagcatacgctcgttcggcttggcggtcagcaacgaaaccaccacgatgaacagcagcgaaatgatgaacgccggcagcagctcatagatggcgaatacgccacccaagggcttgacgaggttgtgccagatcagcacggccgccgtgccggacagcatgccggccacggcgccggccttgttggcgcgacgccagtatagcgagcacagcatcaacgggccgaatgaggcgccaagcccggcccacgcgtaggacaccacctggaagatcgacgagttctggtcgtatgccaccagaatgccgaacaggaacatgaccaccagcgtgaccctggccacgatcatgacctgcttgtcggtggccttgcggtgcagcagcccgcggaagatgttctcgcccatggccgaagcgccgatgatcagatacgaggagctggagctcatcgaggccgcgaaaatgccggagaccaccacgccgcacatgaagctcggcagcagggtctgcgccagcacgatgaaaatggtttccgcatcggtggaggtcagcagttcggtgggcatcatcgcacgtcccaccaagccgatgcacactgcgcaacccagcgaaatcacgcaccaggaggtggcgatgattcgggacttgcgcacttcttccacgctgcggatggacaggaagcgcaccagcacctgcggcataccgaagtaacccaggccccacgccagcatggagatgatggtgatgatgccgtagtcggagggcgcgccgaacacggccttgcccgcctcgacgagctgctggccggtggccgggtccagcttgggcgcggccacctgcgtgccggacaggtagccggggatggcacgcaggaattccacggtgttgtcgatgccgcccgcgctggccacggtgccgatgaacaccaccgcgagcgcgaagaacatgagcatgccctgaatgaagtcggtcatcaccacggacaagtagccgcccaccacggtgtagacgaacacgaccaccgcgccgatgatcatcatgacgtggtagtcgaaaccgaacaacgtggcgaacagcttgcccacggtcacgaagcagctgcccacgtacacgctgaagaacaccaggatgatcacggccgcgatggtggagaccacgcccttcttgtcatggaaacgcttggcgaagaagtcaggaatggtgatggcatcgccggccactaccgagtagcggcgcagtcgccgggccacaagcttccagttgagataggtgccgagcgccaggccgatggcggtccacatcgggtcggccgcgccggtgaagtaggccaggcccggcaggcccatcagcagccagccgctcatgtcggaggcttcggcgctcagggccgtgagccacggccccacgccgcgcccgcccgcaaagtattccttggaagaggagttggagcgtttggagtagatgaatccgatggacagcatggccgcaaaatagatgaccatggccagcagaatccagaaatcgttggccaactgcgacacctccccaatcatgacgccaagcggctaccgccatggcagaactatgtgctgatatgcgtgctgatatgcgattgacgccggagcggcgtcatacagaccgtcacagccgtgaatacggccgcaacgcacttcgcctgatggtagtggatacaagggctcaagcaccttccaccgtttccatactgagacgctgttttatccgagctccccacctgaggggagccaagatgacggtcagatgtcgtagcgccaggacttgtcggtcaccacgcgggccatcgccaaaccgatcggcagacagataatcaccatgaacgcacggaacgcccagtccagcgcattcatggtctggaagctgccgaggtaccacatggcacggtacatatacagaccgggcaccatgatcacgatcgacggcacggtcaggcagatgcgcgggtagccgaggtgcggcggtagccagccacgtcgcacggatgaacgccacgccgatgccagaatgcccgccagaaacgcgccgatgaaggtagccatctcgggtgccacgttgaagtcctgcaattccaagcgcagcgtgtccgtgatcgcaccgatcagggcggcggccaggcacatgcgctgcggcgaattgaacagcacggagaagccccacacgccgacgaacgccgccacgaaccgcagcaatccgttgacccacgggtcaagccccagcggttcaaagccttccgggtgcaggtgcaccatcacggccacggcccagcctgccagcgtggccatcaggatgatgcacagcacgtacgccacgcgctggatgcccgaggggaagtcgattttcgccatgtcgagtccgccggtgatgagcgggaaaccggggatcacgaacagcatggcgccgatgtaggccgtatcgtgcgagagcgcgactgggtcgaaaatgccgatgagtcgcagggtgccggtgcaggcgagcgccgccgcggccacgcacacaaaggtgacgaagaactggttcagatggtatgcaaacagccggcgacgcatccactggccaaggcccgcgcccacgaacgcaccgatcatgtcgtatgggccgccgccgagcaggaacacgaaggccgcgcaggccagggcggaggccagaccggagaaccacggcttgtacagcggcttgcggcgctcaatcagatcgagtcgctcgtgcgcctgccgcacggtgataccgcccttggccttctcttcgtcggagcgctcgttgaagtgttcggcgtattccttgggcacgcgattcttgcgcttcgtactgcttgcagcagggctttcggcggttgcgccgttcgccgccgcgccctcagcgcccgcctcggcattcgccgcgttcgccgattcaaccgactcattggagtcaccggtaaacacttcggcatcgtcgtaggccttctcttcggccgctttgtcttcgaccggagtgacttccgcgctgtccgccaaaagtcggtgggcttcttcattgtcatcgtccaaggacttggccacggaggtcacgagtaccttggttttcgacgcaagatccagcgcctcgtccacgctgccgttggccgcctcagcctcgaccttggcacgttcgcgcaggcgcttggccagatcggccgaatactgcgaagcgtcacgttcgtccaaatgcttgaccacgccatcggacagttgcgaatcgacgtgatacatcgaccccttgccgagattcacggagaaccagtcggcgaaatgttccagcagccagatacgttcggtgttcacgccggtggtcggcaaatccacgacttcggtgatgcggttacgaccatccgtgcaggtggcctcgatatccgtcaggttcacgtcggcgcgtacgtgcacgcccagcgggtaggcgatgcggtgcatcatttcacgcacgcggaaggagccggtgccggctcccaggtccagcatgccgacccgtacaatcacgctggctttggcggcgataccggcgtccaccaccggtttttcccaatcgcgcgcaatatcttccatgtccagcggaatggagtgggtgtggaatttacgtacagccgttgcgcctttcgcttcgggcgcactttttttcttctgttcgctcacatccctcattactactccctgcctcccccgccggcaatcgtaaggcgctcaaatcttccgcgaatcggacagtgtctcatatgctgtccgatattcggtctctataggtggacaacttggcgcactatatggactccgtaacgcaaatagcgatttcgcggggatacactattgcccacacaacaaccacgttgaatatgggctgtgggctcgcaacgactggcctcaacaactgcggaggagccgcagacgaccggtagaccgagcaacctgttattcggcaaaggaggttatatggcaacacctgaagaacagatcactcccgctgacgccgccatcgtcactaccgggaccggccgaaagggcccggaggagcatgatcttcccgaaagcctgaagtacgacatggatctgtgtcttgagatcctgcgtaacgtactgggcgaatacaaccccgaactgctgtctacgttcgacaccgtgcgtcattacgcggtggaggccagcgccgagcatttcgccgagctgaaggatccgaaccccgaccaggatggcctgaaggaggccgtgaacgtcatcgacaacatgacgttgcacgacgcccagctgctggcccgcgcattcgccacgtatttccatctggcaaacctgtccgaggagaactaccgcgtttccgtgctccacgagcgcgagaacaacgtgtccgttgaccaggcggtcgacccgatcaacgagctcaccgtcgcctaccaccagctcatcaatgagactggcccggccaaggccaaggaactgctcaaccagctcgaattccaccccgtcttcacggcgcaccccactgaggcccgtcgtaaggccgtggaaggcaagatccgccgcgtttccgaattgcttgaggagtacaagcgcctcggcggctcggataagaaggaatgcctgcgccgtctctacaacgagatcgacgccctgttccgcacctctccgatcgcgctgaagaagccgaccccggttgaggaagcggacacgattctcgacatcttcgacaacacgctgttcaacaccatccccaaggtctaccgtcgcttcgatgactgggtcctgggcgataaggccggtctcgtcgagcccgcttgccccgcgttcttccacccgggcagctggatcggctccgaccgcgacggtaacccgaacgtcaccgccaaggtgagccgcgccgtggcccgcaagttctccgatcacgtaatcgccgcccttgaggaagccacccgcaccgtgggccgcaacctcacgatggaagccgagaccacgccgccgagcgccgagctcaagagcctctggagccaccagaaggaaatgagcgagcgtctgaccgacaaggccgccctgatctccaccaaggagatgcaccgcgcggtcatgctggtgatggccgaccgtctgcactacaccatcgagcgcgacgccgacctcatgtaccactcctgcgacgacttcctcgccgacctcaaggtggtccagcgttcgctggccgccgccggcgccaagcgttccgcttacggcccgctgcaggatctgatctggcagaccgagaccttcggcttccacatggtggagatggagttccgtcagcactccgtggtgcacgcccgcgcccttgcggatatccgcgagcacggtctgcacggcgagcgcggcgaactgcagccgatgacgcacgaggtgctcgacaccttccgcgctctcggtgccatccagaagcgcaacggcctcaaggccgcccgccgctacatcatctccttcaccaagagcgcccagaacatcaaggatgtctacgagctcaaccgcttggccttctcccacccggaggacgtgcccaccattgacgtgatcccgctgttcgagcagcttgaggatctgcagaactcggtggacgtgctcgaggaaatgatcaagatccccgaggttcaggctcgtctgaaggccaccggcaacaagctcgaggtcatgctcggttactccgactcctcgaaggacgccggcccgacctccgccacgctggccctgcactccgctcaggagcgcatcgccaaatgggctgagtcgcacgacatcgacctgaccctgttccatggccgcggcggtgccgtcggtcgtggtggcggccccgccaaccgcgcggtgctcgcccagccggtcggttccgtcaagtgccgcttcaagctcaccgagcagggcgaggtcatcttcgcccgttacggcaacccggtgctggccatccgccacgtcgagtccgtggctgcggcgaccttgctgcagtccgcgccgagtgtggagaagcgcaacaccgagatgaccgagaagtatgccgacatggccgctcagctcgacgaggccgcgcacaaccgcttcctcgacctgttgaacaccgacggctttgccccgtggttctcgatcgttacgccgctgaccgaaatcggcctgctgccgatcggctcccgcccggccaagcgtggcctcggcgccaagtcgctcgacgacctgcgcacgattccgtggatcttctcctgggcccaggcccgcatcaacctggccgcttggtacggtctcggcactgcatgcgagaagttcggcgatctggagaccatgcgtcaggcttacgaggaatggccgctgttctccaccttcatcgacaacatcgagatgtccatcgccaagacggacgagcgcatcgccaggatgtacctcgccctcggcgaccgcgaggacctcaatgagaaggtgctcaacgagatggagctcacccgcaagtgggttctggccatcgtgggcgacaagtggccgttgcagcaccgccacgtgctcggccaggccatccgcatccgctccccatacgtggacgcgctgtccgtcacccaggtgctggcgctcaagtcgctgcgcaagaaggtggacaaggaagagctctcgcaaagccaacaggcaggattcatcta

SEQ ID NO: 3625 - DNA, 3408 bp, Unknown
  R85_18m  MAG No. k141_34514
ctgcgagcccctctgacgaggggagctgtcggcgaagccgactgggggagagaccgcggcacagccgcaaaaaacggcatcggccacaggccgatttcaaggtgcctccggtgggactcgaacccacaagccgaagcgatcgattttaagtcgactgcgtataccatttcgccacggaggccaacttttctattataagctatctcctgccctgagcattgcttgcgggttgctgcgcttcgtgcagccgtcgcggcatagccgctcccttcgcctacaaacagcccagtgggctgtttgtagcagccggtagcgatagcgtcgccggcgtcgcatataacgcaaacagcccaccgggctgtttgcttaacggctcagcccgctggaggcacttaccacttacgctattgagccagcaaccggcgaccataatcgagcacaatgccgtccagcagcccgtgttcgctggcgacgaacgaatcgatggcttcaccatgatcggccttggcggcttcgctgacacgcgccagcacacggctccagaccacagcgccgccgccgaccacatcgatacggccggggtggatggtcttgtattcgcggcgctcggcgcgcgtcatcctaaggaacttgtcgtccacggcataggcgtcttcaaggctcaaccgatgcccgtcgaccacggtgtgatcgtattctttcaatcccatagccaaggcggtcatcgtggtcaccgtgccggacacaccgatgatggtacgggccttgcctgcgtccacggtgcggaaggcctcatcgatatgctcgtcgatgtccgcaacggcctcatcgatctgcgcctgggtcggcggatcgttggtcagatgacgttcggtcatgcgcacggaaccgatgttcatggagaatgcgccctgaacctgggtggtgggcgcactgacgccgtcgccaccgatgaccagctcggtggacccgccgccgaggtcaaccaccagatagggggcgggcagatcgtcgcgattgaccacggaagtggcgccgaggaagctcaggtcggcttcttcagtgccgggaatgacttcggggcgcacgccgaggatacgttcgatctcatcctcgaactcctcacggttttccgcgtcacgagtggcggaggtggcaacgaaacgcaggccgtcgatgggatgctcggcaatcacaccggcgaattcccgagcagccgcataggcgcgttccaacgcttcgtcggcaaaacgatgggtcttgtccacatcctgaccaaggcggatcacacgcaggatgcgcggcaccacctcatgcatgccatcggcatcgacacgtgcgatcttcagtcgaatggagttcgtgccgcaatcaatgccggcgacggttacggattccttgctcattgccttctcctcgtatcccttagtgcgtatgaatgggctgttcgcggtggctcatctgttgatcaatcatccagcgtgcagcggcagacggtcggatcgaattcgtctttgacgcgttccagcaccaaatcgccaatggggttgacgcccggccccataaccaaggactgggccagcagggcatgcaggcacttgacgcgcaccggcatgccaccggccgaagtgccttcaatatgctcctcactgtcgccaagacggcctgccagttcgtgacggaatgccagatacaggttatgggcctgctcatatgcggccttgagctcctcgtccgaggccaacatgtcgttgtattgctgcatcacgccggcggcctcgacatgggaggcggccttgacggcttccggaccggtcagatagcacgtggtggggaaagggattccgccgggcaacaccggacgggtgattacggcaagtggcctaccgcagacgcatcgcgcccccacggcgaccatgccgcgcgggtatcggccgagctgacgctgcacctggtcgatgtcatggtcgttggcgggctcggcaagcatggtgtcgacaagggccttggccttggcggcgatatcgatggtcactgttgggttccctcccctgtgttttgctgggtgttctgatcggattgggtgttctggtctgacttatcggactgcttggatgagtcgttggatgacgagtcagaggaaccggaagtatcggatttgccggactcgctatcggtcacaggctcatcggcctttttgagcgagtaagacagttcgctgtaccatggcaggacttttttgttgctggtattggaatcttccgttttctgggattcgcgatcggagccggtcacggcttcgggatgcagcacacgcacggcctgttcgccggggaatacgaagccgaggcgttcacgggcctgggcggtgatgtaggccttgtcatcccaacgcttgatatcgttctccaactcctgcttttgggcgatcagcgaggcttcctcacgcttgaggccattgagctcggccaggttcagggcataagtgtggaaggtggagaccagctggatggtgccgagtgcgatgatgaacagggagacgaagaacgctatgggccccgccgacccttttttcctgacttgtgctttgccggttttgccaggtttgccggtacgggacgacttgctcatgtcacatgaaaatacccgccgcattcgacttgacgaacacgacgggtatcgagcttcagtggaaactcacgcctttacgggcgtttcagctcacttggccaagtacttcttgcaggccttgaaggcgctgtagccggcgtactgagcggtggagccgagctcctcctcgatctcgagcaggcggttgtacttggcaacgcgctcgccacgggccggggcaccggtcttgatctggcgggtgttcttagcaacagccaggtcggaaatggtggtgtccggggtctcgccggagcggtgggaaaccatggaagtgtagccgttggcggtggccagctcgatggcgtcgagggtctcggtgacggaaccgatctggttcagcttgaccagcagggagttggcggcgccgaggtcgatggccttctgcagacgagccgggttggtgaccagcaggtcgtcgccgacgaactgcagacgatcgccgaggcgagcggtaatggcagcccagtcttcccagccttcctcgttgaacgggtcctcgatggagacgatcgggtactcgttgatgaggttctcgtagtagtcgagcatgtaggcggagtcgcgctcttcaccgtcgaagcggtacttgccggtctccttgttgtagaactcggaggaggcgacatccaggcagatgccgatctgcttgccgggctcgtagccggcggcggagatggcgtccatgatgtacttgagggagtcctcgttggacttcatcttcggggcgaagccgccttc

SEQ ID NO: 3626 - DNA, 11424 bp, Unknown
  R85_18m  MAG No. k141_34718
acgcccggtcccattccgaacccggaagctaaggcctggcacggcgatggtactgcacccgacagggtgtgggagagtagcacgccgccgcaccacacgtacaggaagccccgatacccctcaaaggtaccggggcttcccgcatatcaggacacttgcgcgtgggggggggtatctcgcgtccttgggccccggcaggagtatcccgtcggggcccagtgcgttttgggcggcaacccgctgaatacccggtaagatgtctgaggtatcaacaaacaggtcaggaggtgacgcgcatggtggcgccaagccgtgatgaccgtagcgtagatgcattggtgaaatccaaggcagtacttgatgtattggcggaactgggaccaagcaccgcaaaaaccataagcgaacgtactggtgaacccgtaagctcaacgtatcgtttgctggataatctcgtcgcagtcggttgggtggaacggggcatcaatcgtggcgagtatcggcttggcatcgattgcgtacgtatcggcggccaaatcgaaagcagactggacattcagcagatcgctcgccgtaccttccgcgcccatcacggccagttcggcatctggggtctgttcgttcggaggcgattgcgcacggtgtgcatcgagacacgcacccgtgagacattgcaaagctatgcacagctggtgggcaatagcttgcctctgagcatgagcgctccctctcatgtactgacggcctggcttcccccggctcgctacgagcagctgttggaacactatgcctataccaacgagctcggcggcacattctccacgatgcgtgccacagcaatgggacaggctcgtcatatacgcgaatgcggcttcacctatgacgtcggccagaccatggccggctccgtgactatcagcgtaccggtattcaatcacgccggagagattcaagcggcaatcgccctgagtggcctttcccgctccttggaacctgagctggcctgtctggtagatgggcaaccggcaacggcatcggttcaagacatggtgcgattggtgcagactgccggccgtgaggtgtcgcgaggccttggatacagtggtgatcatcttggcctgaacagttgaatatgatgagtcagggataagtcaggggaaggaacgtcgacgatggcggaagacaaacgtgaaccgacccgcgctttagacaaggcgagtcgcgtgatggacgcattggcggcggagaatggcctgtcgccggcagatatcgccgacgcctgtgatatcccgcgatcctccgtataccgcgtgctggatggactggtcgatgtggggtgggccgtaacggatacggatggtaactactcattatcactggactggctgcgattggctgatgccgctcgcacgtctcgtaccgaatggcagcctgcgattgcggtcatgcatgccatcaccgcgcaaaccggcatgacctcattcctcagtgtggtctccggcactgaattggtatgcgtggaatgtgcgcaaggtcatgccatcgattcgctgatcctgcgcccgggccgcgtgctgcctctgcatgctggcgcggccggccgcgtggccttggcgtatttcgaggatgccgatgtcgaacgctatcttgcaggagtgccgtttccggcatataacgagaacacgctggtcagtgtggaacagttgcgcgaggatattcgcttgactcgcgaacgtggatatgcactgtcggatgaggatgtgacgttgggtgtcggtgccgtcggtgtaccgattgtggacaacgagtccggtcgcgtgatcgccagcctgtccgccggtggattcgtggacgaagtgttagccactcaagaatccttggccgcgttactgcgcgatggcgtacgcgaaattcaggcagcctgattcggcccgctaggctgtcgggctggacggttatgtccggtcagctatggcctttgccggctacggttctgctggttatgcttctgcccgactacgctgcggtccgttacgcttcggccacacgacccaacgcgatggcggtgatcagcacgtacgcctcgcgcgggtcggtggcatcccagccggtggattcggcggcgcgcttcaaacggtagcggatcgtattgggatgtacgttgagctccttggccgtggtctcgagcgaaccgccgaacttcaggaatgtggagacggtgagcagcgtcggatcatccgggcctgctgctgtcaggcttccgtagaccacgcggaccagttcgtcacgggcgtccgcgtcgccgatcaacgcacgttcgggcagggcgtcgtcggtgcgtaacgggcgcggcaatggctgcacggtggcggccagggccggcgcggcctgaagacagtagagcgtggcctgaatcgaacgcatcgcgccatcggcaccggtgcgctgtggacccaaggcgattggccgatcggcggcgaacgacggggcgatggtattgcagatgatttccggcgtggccgcaccgaccggacgaatcaacgccactacggcggtgctgttgccgatcgggcgcttggcggtcagacacacaccgccgaaatcggccacgattttctcgatttccttggccgtacgtgcggcggaccgggcagggtatccggcgatggtgtaacaatcgaagtcatgctcgaaaccgaggatggtgaacagggactccactcgttcgtcggccagatgattgaacaggcactcgaacagcacggtgcgtacgcggttggtcgcggtgatgccgggtgcggccgaatcggatgaatcgggcgcacccggcataccggatgcaccggacgaatcgacaacgtcggcagcaagaagttcgagaaaatctgacatagtcactagtgtagcgtcgctgattggcgttgcctttcagccaaagactctcgccaatacgtcagcaccacgaatccgaatacaaacgcaaccggcaacatgtgccgctcgaaattattggccggcgcggtaatcatcacgcccatcagcagtagcagcggaatatgggtcatgagggtgagccaacgtcggcgaatcacctcggccgcgccgatcagcaatgtcatcaccacgtagaaattgccgtgcgtaggccagccgagcacgggaatactgccccatacgcgagtgaagccggcgatgtgctcacgccagtcatggttgtaatccttgatccatgtggagtttttctgcacgtaatcgctggccacgtaataatccatcgatacgtacggctgatcgttcacattgaagtatccgaagcatttggccagcaacgcatccagcgcgatgatcggattgtccttgacgatttcgaaccatgccttgttgaaattggtcatatcctcgggcgtcaccgtgcgccacttgtagctgaccttcttggcctgaataccggaggatttcaccgggtcggcatcctgctgggagtaagcgtcggccatctgatcgagattgaagacgggcgcgaggttctttttggcttcgtctgaaataccgtccggattgcgctgagccacgcgggcgatcatttgcagctgtacgccgcggctttcgattggatcgccgccgatgatcgcaccagaggagatggcgaaggagatgccgccgtgaatcagtacggtggggatgagcagcgccacgacgtaagtcgcccagcgtttgcggtcggcgatcagagccagcacgatttgtagggcgatgatgtaccacgcatatttcgcggaaatcagcatcaccgacgtggccaggatgaaggcgatgaagctgtggcacggcaagtggacgggcgtggcgatggcaggggtctgaggatgtttgcgggtgccggcggggtgccaggtctggacgagttcataccagacgctgaaccaccagacgaacgagaacgcgaacagcggcgatttggtgatggagatagtggaaaacacggccagcgggcagaccatgaagaacagcagaatcaggaatctggccaatcctccggcctgtgggggaacggcggaatccgttgccgtttttcctatccaaggtcggttcaggaatcgattggcggcggcagcgcagcagaacacggcgaacagcgtctgcagggcagccaacgtcacgatgccggcatcgtttgagccggtcagatgcctcgcaaacgtgactatcgcgccatagaacacagtgagtaccacattgtgctggtcggtcagatacgtgggatcggacggccacatgtagtgcgcggtggggtagatgtccatcggcacgaaggagaagaagccgatatagggctgtttcaggccggtccactggttccaagcccagctgaattcgcggatctgtgagcggaggtccgcgccgaatgcggccagcagagtggtcggcacccagagccagccgacaaaaaacaccagcataagcttccagaaccggttcgtgccgcgtgtgatccagcggtccagaacagtgacggtggacgtgacgatagcgcgaacggtacgacgggtcttggctggttggctggcctgctgatcggcggcgggccgtgatgtttcgctattctgctgatggtggcgtaggcgctcgccgatggtcttcggcagtatgcgctggcctgctgcgaatcgcgccatcagcgtgatgattccgagatatatcaggaacgacacgacgaatattgcgatattggcccagttccaatgggcgagggtgccgttctcctcgtcccggtacagcgggccgaccgccgagcacagtgcaagccacaggcaggccagcacggccagtgtccagcgcgcggcagcgcccacgcgcgcaagatgcgggtgggactggcggctggatacggcggcaagcttcgcggtggctggtgacgtcatgacaatatatggtagccgcacaggtcaacggttgatattcgatgtctgccgggcatcgccattgttcgcaagccaatacgacggccgggtgcatgcgtgggctcggcgaatgcggaatttccgaagttgtgaacgctaacacgggctgtccggcccaaaatggttgattttgtgcgcttttccgtggaatatcgcgggcaaaaaacggcgcaaccgaggtaacgtagtgtccatgatgattgcattgaaagctgcaacgccgcagctacccagaactacagccgtcgcggatcatgtggtcgccgtggacgaaaccgattcgaccaacgcgctggccgcgcagatgatcggcgacgggtcgttgacgctgcccgaccaccaggatggcgaactggcggtggccgtggtggccgccgaccggcagaccgccggccgtggccgcaatggtcacaagtggatcagtcagcccggccgttgctcgacgatgtcctatgccgtgcgcattccgcgcgcgatcgccaccgacgaatccgtcaatggctggctgcagatgatcgccggactggtcacgctggacgccctgaacggcatgatcgaggaatacggtgccgcgccgaaccagccggactgcttgctggaactcaaatggccgaacgacgtgttctgccacgggctcaagctgggcgggctgctctcggaactggtgattccgccgtcgtccggtactgatgctgatgccgatgacgacgtcgtcatcgtgttcggcgtaggcctgaatctggcgctgggtgcctgttggctgcccacgccgcagtcgacttcgctgcagctgcatgtcacgggcttgccgtcgtttggcgagatgcgcgatgcggtggccgaacgtcaggtcgagggcttccgtgaacgactggcgaagttcatcgccgacccgaagggccaggccgagtcgttgcgcgaggaaatgaaggcggtgtgctgggcgcgcggccgtcaggtcgaggcgcatttcacggacggcaccacgctgaccggcgaagccatcggcctcaacgaagacgcctcactgatcctgagaacacaagacggcacggaccatacggtccgcaccgccgatgtgggagtgctgtaatagccggccagtagctagctagtagctcaggtcagcgaccgagcttggacaggccggcggcggccagagaggccaccacggccttgatggcgtcgccgacgacgaagcccatggaggccagggccacggcggcgagcggcgcaccggtcaacgcggactggatgacgaagccgaaggcgtacaccaccacgacgccgccgaccagcgcggccagcaggtagcggcccgcggtgcgcgcggcggccgcgaaggacgaagtgtcggacttgccgcgcagcagggcgatgaccaccacacccggcaggaagccgaagaggaagccggcgctcgggccgaccagggccagcgtggaggtgccgccggcgaacaccggcagaccgaccgcaccggccgccagataggtggcgacggcggcaccggcctgacgccacggcagcatgagaccggcgagcatcaccacgaacgtctgcagcgtgatcggcaccggcgtgcccggaatcggaatctcgccggcggccgcggacagccacatcagcacggcgaacagcaccggcttccaggatgcggcgacgatacgacgggcgagcggcgtggtggccgctgcggatgcggtggtgtgtgaagtctgcatatcaataacccctatgttgtgtgatatcgccgtgaacggcgggcggtatgcgatggatgaggggaggttccggcgggccgtgcggtatccccgacagcccgaaccgtccatatggtggacggtcccaaatgaatccggccctgtgcgggcgaatcgtgcggcgatggaccgatgccggtccggtcgccttccgttcgcccgcagatgagccttcccccgaacttacggttgccatcgtagaggtgttcgatttcgtgcggtttcgtaccaacttacaaaattgtcgatttcgatttgtcataagttgacgaacgcaaccgtaacgtcaacttcttgaaccggcgcgcaaggatgtgcaatcggcggatttgcaacgtttttgatagccggcgccaacggttacgttgccggaacctacgcgcgcgtttgttcgtagcctacaaaagggcgtgaaagcttttgtgcgaacgcggcttgccctctcctctatatggagagcacaatttgacactatggctcatactgtcaaaaaactgctgattgcgaaccgaggtgagatcgctctgcgcgtggtgcgcacggccaaggagatgggtatctccaccgtggccgtctactccgaacaagaccgcaatagccgctatgtggacatggccgacgaggcatacctgctctccggcgacacctacaaggacacgtacctcaacgaggatctgctgatcgacatcctgcacaaaaccggtgcggacgccgtgcaccccggctacggattcctttccgaagtgccgagcttcgcgcagaaggtcgaggatgccggtgccatctgggtgggtccgcaccacaccgcgctggtggatttgggcgacaagatcaccgcccgccgagtggccttgcgcgccaaagtgccgccggtgcctggcctgtccgaaccggtgaccgacgtgcgaacgctgctcgacttcgcacacacccacggctacccgatcatgatgaagcgcactgatggcggtggcggccacggcatcaccgtggtgcatgacgacgaggagctgcgccgcttctacatgaaccacgacgcgctgcaaggcggcgatctgaaggaatacttcatcgagaagttcgtggacaaggcacgccacgtcgagacccagtccgggcgcgactcgcacggcaacttcaccgtgtactccacccgtgactgctcgctgcagcgccgcaaccagaaactcgtggaagaggcgcccgcgcccttcctgtccgaggaaatcgtcagcacgctggaggaatactcccgccgcctgttcaccacggtcggctacgtgggcctgggcacctgcgaattcatggtgaccccgaacggcaaagtgtacttcctggaagtcaacccgcgtctgcaggtggagcacaccgtctccgaagaggtcagcggcctcgacctggtgcgcgaacagctcaatatcgccgccggtggcgagctcacccgcgcccccgaaccgcgcggccacagcttcgaactgcgcatcaccagcgaagacccggccaccaacctgacccccggctccggcaccttggagaagatccagtggccggccggccccggcgtgcgcatcgataccggtgtggaacagggcgacaccatctccccgaagttcgattcgatgatgggcaaggtcatcgtcaccgcccagaaccgtctcgatgccgtggcccgtgtgcgccgcgtgctcgacgagctcgtgatcgaaggcgtgcccacgccgattccgctgttcaaggagatcttccgcaacgacgacttcaccgccgagcatggccatccgttcgccgtgtccaccaagtggctggagcgcacgtacctgaaccgcacaccggcttccgccgcctccggccagccggcctccttggccaccgccccgggtgccgctgccccggccgcgcccgacaagtccaagtcggagacgttcgtcatcgagatgaacaaccgccgcgtcaagctcaccgtgccactcgacatcgtggagaacatcaccggctcggcccgcgcccgcggtgccaagcgccccacccagccgttgcgcggcgcaggcttgcacaacgtggcctccggtgccgccacggccaacgacggtgccaaatccggcgtcatcgcctccccgatgcaggccgtggtcacgcgcatcaacgtgtccgaaggccagcaagtggccaagggcgaccttctggtggtgctcgaatccatgaagatggagaactacgtgtacgcgccggccgccggcgaagtgaagaagattttcgttggcccggccgatggcgtggaggccggcgacacgctggtcacgctggacgtgaacgccggcaaggccaaggccgccgacgccaagaaggagggcggcaatgactgacatcatggattcgccggccgtgaaggccgcggctgcggcctcggccgccaacgccgcccagccctcggcccaccagccgctgcgcaccgccgtggtcaaggccgccgaactggcccgcgccgccgaagagcgcgcccgcgacaagcagcacgctaaaggcaagaaaaccgcgcgcgaacgcctcgacctgctcttcgacaccggcacgttcgaggagatcggccgcttccagggcggcaacatcgccggcggcaacgccggtgcagctgtcatcaccggcttcggccaggtctacggccgcaaagtggccgtctacgcccaggacttctccgtcaagggcggcaccctcggcaccgccgaaggcgagaagatctgccgactgatggacatggccatcgacctcaaagtgccgatcgtggccatcgtggactccggcggcgcccgcatacaggagggcgtggccgctctgacccagtacggccgcatcttccgcaagacttgcgaggccagcggcttcgtgccccagctgagcctgattctcggcccctgcgccggcggtgccgtctactgcccggccctgacggacctcatcatcatgacccgtgagaactcgaacatgttcgtcaccgggccggacgtggtcaaggcctcgaccggcgagaccatctccatggccgaccttgggggcggcgaagtgcataaccgggtgtccggcgtggcccactacctcggcgaggacgaatccgacgccatcgactatgcgcgcaccgtgctcgcctacctgccgtccaacagcgaaagcaagccgccggtctacgcctacgccgtcacccgcgccgaacgcgagaccgccaagcgactcgccaccatcgtgcccgccaacgaacgtcagccctacgacatgctcgaagtgattcgttgcatcgtcgattacggcgaattcgtgcaggtgcaggaactgttcggcgcctccgcgctcgtcggcttcgcctgcatcgacggcaagccggtcggcatcgtggcgaaccagccgaacgtgctcgccggcatcctggacgtcgactcgtccgagaaggtcgcccgattcgtacgcctgtgcgacgcgttcaacctgcccgtggtcaccctcgtggatgtgcccggctacaagcccggctccgaccaggaacacgccggcatcatccgccgcggcgccaaggtgatctacgcctacgccaacgcgcaagtgccgatggtgaccgtggtgttgcgcaaggcgttcggcggcgcgtacatcgtgatgggctccaaagccatcggcgcggacctgaacttcgcgtggccctcctcccagatcgcggtgctcggcgcggccggcgcggtgaacatcatccaccgccacgacctggccaaggccaaagcctccgggcaggacgtcgatgcgctgcgggccaagtacatcaaggagtacgagaccagcaccgtcaacgcgaacctgtcgctggaaatcgggcagatcgacggcatgatcgaccccgaacagacccgtgaggtgatcgtcgaatcgctggccacgctcgccaccaagcggcgcgtcaagcgcaccaccaaacaccacggcaaccagcccctctgatttctgaagacatcaaccaaacacaagtaaggaaagcaatgaccaccttcttcctcaatcgcctggccaccgagccccatgcgctcgccttcgccggccagtccaccccgtggccggtagccctggcagaccagaccaccgatcccagccttgacgaggccctgcgcggccacatcgccgcagccaaccgactgctcaccccggtcgccgccgacctgctgaccaccaccggacgtccggtcgacctgttcggcttcactccgaacccggcccgcctcggcgccgcagccgacgccaccgcgtccgtggaaggcgtgacactgacccagctcggcgccctgctcgacctcgaacacctcggctacagcgtggcccagaccaagccgctcgccgtgctcggccactcccagggcgtgctcgccgtgcacatggcccgcgccatcgaggccgccggctccatcgaggccgccggcaagaccctcgacgagattctggccgtcgccgccctgatcggtgcagccggcactcgccgcgtgcgcgaactgggcctgaaccccaagtatggcgaagccagtccgatgctctccgtcaagggcgccacccgcgaacaggttgaggctctggtcaagcgcgtgaacaacgcccgaggcccgatctccatcgccgtcaccaactccgacaaccaccacgtgctttccggctacccggaagacctggcagca

SEQ ID NO: 3627 - DNA, 8446 bp, Unknown
  R85_18m  MAG No. k141_34790
acaaggaaatataaggaaacatcatgggacaacgtattgacgtcaaccacgagaacatctattacggcgactttctggccgtggaagatgtgaacatcaacatcgagccgaacaaggtcaccgccttcatcggcccgtccggctgcggcaagtccaccgtgctgcgcaccttggaccgtatgcacgagatcatccccggcgctcacgtcgagggcgaggtgctgctcgaaggcaagaacctgtacgacaaggacgtggatccggtggccgtgcgccgcgacgtcggcatggtcttccagcgcccgaacccgttcccgaccatgtccatccgtgagaacgtgctggccggtgtgcgcctgaacaaccaccacctggccaagtccgacgccgacgatctggtcgagtgggctctgcgcggtgccaacctctgggaagaggtcaaggaccgtcttgacaaccctggcatcggcttgtccggtggccagcagcagcgtctgtgcatcgcccgcgccgtggccgtccacccgcaggtgctgctcatggatgagccctgctccgccttggacccgatttcgaccttggctgtcgaggatctgatcaacgagctcaagagcgactacaccatcgtgatcgtgacccacaacatgcagcaggccgcccgtatcgccgactacaccgccttcttcaacctgaaggcagtgggccagcccggtcacctcgagtacttcgcggacaccatcacgatgttcaacaacccgcaaaacgaagaagccgagcgctacatctccggtcgcttcggctgatcgtttcctgcgcgcagcgtaatgatttgtgcgtaggagaaacggcaaagcccgccgcaaggcgggctttcgcatattcaacgcgagtattgccgagtattatcgttctcgcaacggagcgagctggaatactttgtcggactgggcggcgacttcccgcttcggtcgatcgacgggagaacggcgggtaaagcggtacaagacaagtccgcacgatgaatactctgtgatgaatcttctgtttacggtgcgagtgtggaagaatggtcacagcaaggtccagcaaaggagcataggtgagtactggtctgatcgtcggcattgtcgttgtcgttattatcgttgtcttgattggttggggcgtcagcgcctataacaacctggtgacgctgaagaaccgtgtgaagaacggttgggcgcaaatcgacgtgcagttgaagcagcgcgccgacctcatcccgaacctggtgaataccgtcaaggggtacgcatcccacgagtctgaagtcttcactcaggtgaccgccgcccgcgccggcgtagtggctgtggccagcaacccgagcacgaccactgctcagcgcgccgccgccgaaaaccagctgtcccgcgccctgttcaacctgcaagccacggctgaggcatatccgcagctgcaagccaaccagaacttcatggatctgcagaaccagctcaaggaactggagaacaagatcgcctacgcccgtcagttctacaacgacgtggtcctgaagctcaacaccgccatcgaaaccgtgccgacgaacatcatcgccggtctgttccactttgagcaggcgcaatacttcgaggccgatgacgcttcccgtcaggtgccacaggtccagttctgacccgcttcaggcccgtccggtaagccgccggccgggcccgtattgtcttaagagagggaagatatgcggatacgattcattcgcgccggaatcatcagcattgttgccacggtggtgttggcagttatcaccttggcgataatcgggacttccgcgttcggcgattcggccgacctcagctaccgcacgctggactatgacgtgaccgccaccgcgaacggtgatttgaaggtcacgcagcatatcgacgtcaagatgcgtgagcgtaccgacagtgacgacaacaccaagccgtggaagcagctgttccagcaatacacgctgaactccggcaccttgactgatatcagcgatatcagcgtgcgcaacgtcaccgacggcatcgactacgcacaacagagcgagcccaagctgcccagtgacgtctcttccgacaaggaatggaacagcgactacgccaaccattggtatgtcgccgatgtgagcgatggcagcgaccatccaaaggcatacacgcccggtaccgatggcctcaagcccagcgcctccgccaccgaagatgacacaaccgtggagatcggctggaatattccggtcaccaccgaggccgacagcatgaagttcgatgtaagcttcaccatgcacgatgtggccaccaaatggaaagacgtggcctccttccaatgggagccgttcggcaagaagaaccaagtgcctatcggcacggtcaccggcaccgtccatttccccaacggcatcaccggcaaaacctcatggacatggctgcacaccgagcgcacctcggaaaccaagcgcaacagcgacggcagctacacgttcacggcctacaacatccacaatggcgactacctcgatgtggtcgcggcgttcgatgccgccaaagccaagggcatcgcccgcaagggaaccggcaatcatctcaaggacctgaaacaggacgaatataagcaacagcagcgctggctcgacaagcaacgattcgctgccagagctcgtctcgtgttctggattgtcagcatcgtgctcggcatcgcgttgtgcgcgtggggtatctgggctgtgatctccagcaaccggcgtgcgcaatacagtggcagcgtcgaatactggcgcgaccagcccggcatcagtccggcttccgcagcccgtctgattcgcgtggtcgatccgtcgacgcgccaatccgatgaagaccgccagctgaccgccaccatgctgtcgctcgccgtcaagaaggccatcgccatttatccggggccgtcggacatgtatcgcggcatcgacatgagccaggccacgccggtgggcttgagccaaatgattgccgccgaccaaggcaagcagtatgcggcaggcatcaccagcaccatcgtgattctgccgctcgccattgatgaggcacccaacgcgcaacagttgggattgagcgaatcggaagatgcgctgctgaacctgctcatcgtcatttctcagcgcgtgggcagcccggtattcgacctgaaccagatgaaggcgacctgccagaactggcaagacggctatattgagctcggcaaattcaccggtgcatgcagcatggaataccagcggctgggtgccacgcgctctgtgggctggcaatggatcctacccggcgtattggccgccgtgctgggatttggttcgctgctggccaacagctttatcggatacccggtggctggtcttatcgggctgccgatattcctggtcggactgttctgctcgatggccggcgcgatgaccgtgctcactgatcaagggcaggatatcgccggccggactctgggccttaagcgttatatggaagacttctccaacttcaccgaccggggtaccgccgatttggccttgtgggattggtatatggtctacgccgccgcgtttggcatttccgatcgcgtgatgcgtgaactggccaaagcatatcctcaggtcaacgacccggcttggctggatgccaacgcctccaactcgttgttctactggaactaccgcccgtatggctggtacagccaccgtcataatggtccattcgaccacgatgctgccgggcagatggacctaggcgttggcggcccagctccggcttacggaggcacgtcgtttgccggcggattctccgacctcggctcgcagctgaactccggtctggcggacatcagctcgaccatcagcgcggcagcaccatccgccgattccggtggcgatttctccagcttcggttcgggcggcggctccggtttcggcggctcgttcggtggctcaggtggcggctcgttcggcgggcggtagcgcatgcctatgtcgaaacgcattgttcgtgccctgggcttaagccttgtcggtgcgctgattcttgccgcactctgtgccggtgccttgattctcggcacagatggtgccgacctgagctaccgcacgcttgattacgatgtgaccgccaccgccgacggcgatcttaaagcacggagcatatcgatatcaagttgcgcaaacgcaaggatgacgatggcaagaccaaaccgtggagatcggctggaatattcccaccaccgtaaaaaccaacagcatcaagttcacggtgagcttcaccatgcatgacgtggccaccaagtggaaggacgtggcgaccttccaatgggagccattcggtgagaacaatcaggtgccgattggtacggtcaccggcacggtgcatttccccaaaggtgtgaccgcgagcaactcgtggacttggctgcacactgaacaaacctcggaaaccggccgaaccaaggatggcagcttcaccttcaccgtaaatgatgtgaaaagcggcgagtacctagacgtggtggccgctttcgacgcggccaaggcgggagatatggctcgtgtcgagaccgacgatcatctgcaggagttgaaggaagacgaagccgacgacgaacggttctggcgcaatctggaacgccaacgcgccacaaggcgcctgaacaactggatgaccaccatatcggccggcctgatattcgggattattggtgttgttgcagccttacgctcctccggacgttcacgttaccgtggctccatcgaatattggcgcgatcgccccgagctgagccccgcatcggcggccaaactcatcgatatcgtgacttccggcgacaaacccgacatttccgagcgccaactcgtcgcgaccttgctttctctggccgtgaagaaagtcattgctgtgttccccggttcggcggacctgtatatcggcgtggatctgaaacaagtttctccggtggagctcagtcagcgaatcgggtccgatccatacaagcgcaataatgcgcgtaccaatagcacgattgtgatgctgtggcagtccgattacggcgtatctgagggatttgatgaatcagtattcgtcgaatccgtatttgatggatctggatctggcggatctggatctgccgcatctagcgtgtccgatgcacaccagcccgatctcagtgcttctgagcgggcattgctctatctgctcaccgtgatttccgagcgcgtaggtcgtacggcatttgacatggatgacatcaaagacgcctgcaaggattggaaagacggctacaaggaactcgaaaagttcaccaatgcgtgcaagaccgaattcgcggcggcggatatcgcgccgaaaaccgagaacggatggctcattcccggggcaatcaccgtgctgatcggtggcgccagcatattcatcaacggtttggccggatatctggtggccggggccctcatcggcattcccctgatgacggtcggcatattctgcttcctgatggggaattcctacgtgctgaccgatcatggtcagcagatggccgggcaatgcttgggtctcaaacgatatatgcaaggcttctcgaacttcaagtaccgtggagtcgcggatttgacgctgtgggattggtatatggtctacgctgccgcatttggcatatccgaccgggtgatgcgggagctggccatggcctatccgcaagtatccgatccggaatggcttgatgccaatgcctccgacacggtgttctattggaattatcgtccgtacgactggtatgggttgcgtttctacaatggctcggcgttcgcggattccgtggctgacagcggattggccggagcggtgccagcgttcgggggcacgtcgttcgcggctgggttctctgacctcggcacgcaattgtcgtacggatttgcggatatcaccgcgacaatcaatgcggcctcgccatccggtggctcaggcggctttggcggtagcagcggcggttccggcggcggttcgttcggtgggcggtaagcgatgtgcttctgaaagtccctatagctttgaaagtaaaaggcccggtgtcataagacatcgggcctttctctcaaaatcgaggtgaggagacctcaacagtcaggtccaacggggcgaaagtctgtggcgccgccgagaagattgcctcgaagctagcgtgacctttctgctacaacacagcatatcagcctccaccgaagctcaccagtacactggactgaccaaaccaaggtctactagcgtgccactttggcgcggtgtcgttgtgtcaaccggcataatgacgtctcaaaattcaagaggaggttctcatggtaggcaacgaccatgacaaccgtccgagacaagaccggcaataccgggaaggtctgatgaccggcctgttgatcgccctggccaatcaagttggacagtggtggtcgacggccatcatcattgccgcactggtattgctgggaatgagtctcagacgaggtcactgatttatcagcggaacagccggaatccatggggttccggctcctcgttttcgctgaactgggtatgagtaagttgcgttttctattccgtgaagttgcggaaatttcatagattgattgtgcgggcaggccgagagtgtgaaatccaacgggatgcttaggcttgatcgtggatatcgagtttccataagtttcacgaagggaatcaccatggcattgttccgtaacctcgggccgttctccaccaccgccatcggccacggcgaaatgccgctgaccatcgaaaacaaccgcggccacgaggtcggcatcgaaaccctgcatgcctcgctggacgccggctgccgccacatcgacaccgcttgggcctactactgctccggcggcgaggagcagaccggtgaaaagctggtgcgcgaggcccttgagacctggaaggggccgaaggacgaggtgctggtggccaccaaggtgggccacttccgcaacttcaccgacggccgccccacgtgggatgtggacggtcgcccggagaacctgattcggcgcggcaaggagagcgcactggcgctcggcgtggacaccatcgacctgctgtacttccaccgcccggacccgaaggtgccgtacaacgagtccgtcgaagccatcaagcagctggtggacgagggcgtggcgcaggaggccggtatctccaacgcctccatcgagcaaatcgacattgcgcgcggcattctgggcgacaagctcgtggccgtgcagaaccagtactcgccgattcacctggagacccaggacacgctcgactactgcgccaaggtcggtctggccttcgtgtgctggagcccgctcggcggctaccgtcacccctatgatgagaccaagttcgacccgttccgcgaggtcgcggcggcccacggcgtgagctaccagcaggtcgtgctggcatgggagctcgccaagggcgaccacatgttcgtgattcccggcgcccaccaccccgagaccatccttgactccctcaaggccgaccagctcgaactcacccccgaagagctcgccaagctcggctgattgcccattccccatcctcccgaatttgtgacgttggcttaacgtcacaaattcgggaggattgattcgtcttgaaggaaccgccatgcgcaaaaaactcatcctcgacctcgataccggcatcgatgacgcgctcgccatcgcatatgccctaggcagtgccgacgagatcgatctgatcggtatcacggccacctacggcaatgtcgcggtgccgctggccgcgcgcaacgcgctggcggtggtgcacttgttcggccgtgacgacgttccggtctatcccggagtcgaccatcccatcgccccggcaacattgccgaaaatgcgtggcaccacaccagacgagcggacccaggcctacgcgcgctggcagaacggcggcgcggacggctggcaaacggacgcttcgtgggcaccaactcccggctcggtggcggtccaccatcccaacggcatcggcggcgcaatcatccccgactccccgcgcgctccggaagcaccaggctcggcggtcgatttcatcatcgccgccgcgcgcgaatacggcccggacctgaccatcgtacctacgggcgcgatgaccaccatggccaccgtattccgcaacgctccggacctgaaggattccggcgtgaacgtgacgttgatgggcggtgcgttgacgctgcccggcaatgtaagcccggccgccgaagcgaacatctcccaagacccagagtcagcagactatctgttcaagtgtggcgcacgcaccaccatgatcggcctcgacgtgacccaccagaccgcgctcacccgtgagaaagcccatgaatgggcgtctctggggac

SEQ ID NO: 3628 - DNA, 3339 bp, Unknown
  R85_18m  MAG No. k141_35049
ggcaagctcacctgcgaactgcgcgacgagctgctcggcatccagctcggcgaagtcgaggacccgcacaactggatgtggaaggtgtgctgaactagcaccttttgtttccgactaagaccccttagaatgtcaacaattccaaggggtcttggcgtattggaaatgttcctggctagagaggtacagatggatttagcaacatttcgcaacaaataatatgatttaggtcttctgcacgttgcgggggttggttatggttcatccagatgagaacaggagcaaacctatgagcaagatgagtgacatgacggaatactatgcttcagcctaccgtttgccgtcaggcttcgagcattgctcgaaactgaagccggtggcagaggcagcgacggcgttgcgtcggtggtgagacaagacatgagcttctggcgacgctgggggatgttcaatgtcagtaatggttcaaggtttggactgctgacgtcgctgagacaccttagcgtcgttaacgggtcaagttctggcgatcaaacgacggtaaaaaggggcttagcgtcgttagctgtacataagttggcacggcaacgacactggagcgcgtgatcgtcggtgccgtgccaaactttggccaacctccgacaaatgagaaggactaacgtcggtggctgctcaaagtttggcgcgctggcgacgctgtaagaaaaaagtgtggagtcgaaccggcaatagcatttattcggtttgttctctagtccaattgcgtcaggcaaggcctgttgtaggctcgggtacgacgggctgtagcgccgaataaggatgaacgggaacagaacgaagacggactgagacgaaccgaagcggtaccagaggggagcggctcatgcaggtggtgttggagaacaacatcgtttttgtggtcatcgagtatttagcaatcctgtgttggggattgtcgggcggacttgccgccattcgcaagggctacgacatcttcaccatcatgctgtgcggatggcttaccgcactcggcggcggtcttgtgcgcgacgtgatgctcggtgccctgccgccggtcggcatcaccgacaaaggctatgtgctcaccacgctgttttccggcattatcgtggtggtggcccacccggagatcaccaaactcaaatggacgatgactgtcatcgatgctctgggcctcggactattcgcagtcagcggcaccgcaaaggctctggcctacggttcctcaggcatgacagccgtattccttggcatgttcacagcactggccggcggcctcattcgtgacatcttcatcggcgatgtgccaatgattattcgagacaaacacctctatgccgtgccctcgttcatcggttgcattctgaccgtgcttgtatggcgtggtgtgcactacggttggttcgacatgtgctcggaaatgctgctcgacgtgctgatcgtcatcatcgtggtggcgctgcgcctgctctcggtcggcttcaacgtcaccttgcccggagccgtcgagcgtcatcgcgtctacctgcccagcgaaagccgatatctcaagcgcccggtcatccatccgcacgccgataccgtcgatcccggcgataccaccaaggacgaagaagacaagcctcaggatgattcaagaccgcctcagggctaactgccttcaaagaggtacatttggccttctgcaaaatgacaactgctttcaaagaggtacctgaagcacgaaacgtcgagtataagcgttgcaatgacggcgtttatacttgggctttctcggattcggtacctttctgaacggagatgtcatttcgcaagaccgccaatgtacctctttgaacggagatataaaaagtcccgcaagccagatgacttgcgggacttgctaaaaccttaagaggcttatgctcacagagcgttgatcgcaacagcgaggccggacttgcggttggcggcctggttcttgtggatcacgccagcgccagcagccttgtcgagcttctgggcggcaaccttgtaggcggcctcggcggcagccttgtcaccggcggcgatggcttcgcgggtggcgcggatggcggtcttcaggccggacttcacagccacgttgcgaaggtgcgccttctcattggtgagcacgcgcttcttctgcgacttaatgtttgccacgtttactccaaacgatgtgtgttataaggacatacaaataaaagaggatagcatgtgccccggaaaaacccgtgcaatgccacgccgaatacagtccctcggctacactaggtgaagtttgagtatatgccaagaggaggaatgcgttggtcgtccaacacaatcagccgggttccacggatcagtcggtgattcgcaacttctgtatcatcgcgcacatcgaccacggcaagtcgaccgtggccgaccgcatcctgcagttaagcggcattgtgcccgagcgcgagatgcgcgatcgcttcctcgaccgtatggatatcgagcaggagcgcggcatcaccatcaaatcccaggccgtgcgcgtgccatggacctttgacggcaccgaatacacgctcggtatgatcgacacccccggccacgtggacttcacctatgaggtgtcccgcgcactggccgcctgcgaaggcgcggtgctgctcgtcgacgctacccagggcatcgaggcgcagaccctgtctaacctgtacatggccatcgaccatgatctggccatcattcccgtgctcaacaagatcgacctgccgtccgccgagccggacaagcatgccgaggagatcgcaggtctgatcggctgcgagccgagcgacgtgctgcgcgtttccggcaagaccggcgaaggcgtggccgatttacttgaccagatcgtcatggatgtgcctgctccgcacggcgatcccgaagcgcccgcccgcgcgcttatctttgattccgtctacgactcctaccgtggcatcgtcacctatattcgtatggaagacggcgaactgcgcgaccgtgaaaaagtgcacatgatgggcatcggcatgacccacgatccgatcgaaatcggcgtgatcagccccgacatgacccgtaccaaggcacttggcgccggcgaagtcggctacatcattactggcgcaaaggatgtgagccagtccaaggtgggcgacaccctgacctcggccgtccgcccggccgccgagccgctgcccggctaccgcgaccccaagccgatggtctatgccggcttgttcccgatcgacaacgcgcaattccccgaactgcgtgatgcactcgacaagctcaagctcaacgacgccgccctga

SEQ ID NO: 3629 - DNA, 8474 bp, Unknown
  R85_18m  MAG No. k141_35082
cccgcacctcgtcacagcttgtataatcacgattatactaatcgtgatacaataaatcgtgatgcgatagaaatacgccggcgtatggcataaaggaggcgggcagcatggcattcatcggacgagacgatgacctcaagcaactgcaggaatgtttcactgagcgtagggcacagctcgtgttcgtctacggccgcaggcgcgtgggaaaaacagagacgcttattcaactcgcaaaagacaaggaaaccttattcttcgcggcgcagaatgccactaaagatgaacagctggcatcgttctcccgtctcatgttcgaggcgggtgccccgggcaaggattatctgagtcaatatccttcttgggaaagggcgttaaccgagttaacccggctgccagagccgagcgatggcggccgcaggcttgtgatattcgatgagtttccttatctggtcaaatctgatccgtcattgccgtcagtgctacagaatctttgggaccacacgttgcgtcatgcaaatctgatgattgtgatttgcggcagtgccatgagcttcatcgaaaaggagctgttgggagaaaaatcgccgctatatggtcgtgcgaccggcatcctgaagatgctgccgatgccatattgggatgcagcgcaattcttccccaactatagtagcgaggataaggcgctggcctacgcaatactgggcggtatcccgcgttacctagaggaatttgacccagatgagaccatagacgcaaatgtcaagcggcatattctgagacgcattgctccgctatacagcgaggttgaatttttgttgcacgaagaactgcgggaaactgcgaaatataacagcgtgatacgggcgatcgcgctcggcgcaacttcgctgaatgagatcgcgacacacacgatgatggcaaacgcaacagtatcgtcgtatctcgccaatcttatggaactggggattgtggaacgtgagttcccagtcacggcgaagcctaaggagcgggcgaaaggttcgcgtgggctgtatcagctgagcgacaatttcttccgattctggtattcgtttgtctttccgtatcgttcggaattggagcggggcgatgtggaaggcgtatacgagcgtcatatcaagccggtattacatgattttgccggcaaaccgttcgagggtctgtgccgtgaatggatgtggcgtgagagtgctgctggacggttgcccttccgtgcgcgtgcggttggccgttggtgggatcgtcaggatgagatagacgtgatggccgttgacaatgcgtctgatgctgccattgtgggcgagtgcaaattccgcaatgcgccggtggaccgttccgtgctgaatctactgcgagaccgtgctgcgcgaaccggtatcggccagcgaacatacctgctgttttcgctcggcggtttcgatcaatcactggtcgacgatgctgcggcgtctcaatccgacgttcagctcgtcggcatcgatgagctgtttcatgaataaatcccatttgcgaatagctctcactgagtgctcatcagtgagagctattcgcaaatggagccttacttcttcgcctgagtgagctggtaggcggcgaagaggatggccagccagatcacgccggcgatgacggcgatgcggtagctggtggagaagcacatcagcaccacgaccagcgccaggaacgccagcaccacccacggggtcaccttggcaaacggcagtttgaagtgaatcgcgtccagtgcctcctggccgctcagaccggccagctcggaatcctcgggagcgccgcccgcggcgaccaccttacggaacttcatttcggtgagcatgatcatcgtccagttgatgatgccggcaatggtggcaatcgacatcaggtagttgaacgcgaactcaggccacacgaacaccacgaccacggcgatggcggtgatcgcggcggacgtcagcacgccggccactggcacgccgcgcgagttgagcttgcccaagtaagcgggcgcattgccctgcttggccagcgagtacaacatgcgggagttggcgtacaggccggagttgtagacgctcatcacagcggtcaggcacacgaagttcaaaataccggcagccgcgtgaatgcccacggaatcgaagatctgcacgaacgggctggacttgccatcgatggtgttccacggcactacggccatgatcacacccagagcgccgatgtagaacacgaggattcgccaaataatatcattggtggcgcgcggaatcgtggtcttcggatcctcggtttcgccggcggtgatgccgatgagctcggtgccgccgaagctgaacatcaccacaaccagtgccatcagcaggccggtccaggaaccgtcggaattctgccccatcaggccgttcgggaagaagccgttacccacggtgaaccagttcgcgaagcttgcgcgcacgccggatgcggtgggcaggacaaagatgatgacggccaggccgccgataatcatggcgatcacggccacaatcttgatgatggcgaaccagaactcgaactcaccgaatttagagacgcccagcaggttggcggcgcagatgatcaccaagaacacggccgccgatacccatgtcggaatcgccgggaaccagtagttcacaaacgaacccaccactgatagctccaccatcgagacgaggatgtagttgaaccagtagttccagccggaaataaagccggcgcgcttggaccagtagcgggtggcatagtagctgaacgcgcccgccttcggatcctcaacggacatttcagacagtgcacgcacaatcgcgaaaatcgcgaggccgccaaccaagtaggcgagcagaatcgagggtccggccagcgcgatggattcactggaaccatagaacaggccggttccgatggcgccgcccagcgcaatcagctggatgtggcggtttttcaatgacttgcgcagcgtggccggcaccggcacgtcgtcggtttcgcgcggcttcttaggcgcatcagtagtactcattgtgctcttctctcacatttcttgggtttggcgcacgcggggcttgccgtgatgcgcaacgttcgttattctatgccgccgtatcgtctcagaaatggtcaatcgtctatttgtgcgctattgcaagcgcgggcgtgggcgcggccggtgagcaggcgaagctatagcgagcgatgcttatgaaaccgcacgcttcactgagttcactgagttcactgaattcactgtgctcactgcgtggcaggcatacacatggtgaagatggtgtgggacaccgattcgggagaggccgcgagatcggtggcgagccaatattgcaaaagcccaatgctgccggacacggcgaatcgcatacgcatctgcgcctcggctgggtaacccgccgaagattgcaactgttcgcctacaccgcgctggctgtaaatcaatcccagcagctgctgctggaaaccgatatctgctttcgggctcatcagcacttggagatgattgcgattgtcggcaatgtactggcagatgcgctcaataacatgctcgatgccggcaggatctggctgggcgagtagctgttcgagtgcggtggtgacccaggccatggtttcgtcttcaatgtcgtgcagcagttcctcgatgctcgcataatgcgcgtaaaacgtggaacgattcacatcggcccgctcgcacaacgctttaacggtgatggagccgagcggctgatcgcgcagcaactcgataagcgcgtcctgcatggcacgtctcgtgtagcgggtgcggcggctttccgtcaattctttggccatggccttctccccaagttccgacaacccacaatccaactgttggttgcagaaccgacacagtgttgttttacttgagtatagcaggaagttctggcggggcctatggggctaggtggctgccacgagcgcgttggaggtgtgcgatggcgtatatcgaattcgaccatgtggtcaaggaatatccttctggcagcagtgtgattcgcgcgctcgacgaggccagcttcaccgccgaacaaggcgaattaagcgtgattctggggcagtccggtgccggcaaaaccacggcattgaacattctgggcggcatggataccgccacaaccggccgcgtagtggtcggcggacgcgatattacgggtctgcggaaaaaggaactggtgacctaccggcgcaacgatatcggcttcgtcttccagttctacaatctggtgcctaaccttaccgcgctcgaaaacgtggagctcgcctcgcaaatctgccctgaccatttcgatccagaggaaacgctgcgcaaagtcggactgggggagaggatggacaacttccccgcgcaactgtccggcggcgaacaacagcgtgtatccatcgcccgcgcgattgccaaaaagccgaagctgttgttgtgcgatgagccgaccggtgcgctcgattacgagaccggcaaggaagtgctgcagttgctgcaggatatttgccaaacacaaggcatgaccgtaatgatcatcacgcataattccgcgcttgcaccgatggctcacaaagtgattcgcttccgctccggcaaggtgaccagcgaggaggtcaacgcaacgccgcggcccatcgccgatatcgaatggtaggtgattggcgatgctcactgcaagacactctgtgaaacgccccgtgaaacaagcgaggcgattcgtgaaacaacctgtgaaacattctgtgaaacggcggaacctcgacgatagcggcggtcgaggagcgggcgtttctgcggtatttgccaaagatacgttgcgttgctggctgcgcagctggaagaggttcgtctcgatcgccgtcatcacgctgcttggcgtggccgtgctgaccggcatctacgccggatgccgcgatgcttttctggcggccggtcgtttttacgatcagcagggactgcatgacctgcaggtgctatccacatacggcctgaccgatgatgatgcaacggcactgcgccgaatcgacggtgtgcaaaccgtgcagcccgaacgttctcagacggtgaccacgttggtggacggcaccaagaaaaccgtgaccatgcaggaaatcggtaccgaagggcttgatcagccgtacatacggcagggcaaactgccgaacaaggccggcgaagtggcggttacgcagcaattcctgaacgatagcggactcaagattggcggcaccattactgtgacgccacaagacacctcttcatccgtcatatcggtagcggccacggagactgacgattccaataatgccgatacggtaggtgtcgccgccaatgcctcggcatccgatgcgaagtccgacgccaatacggacgccgacgccgagcaatccccgcagttccccacgaaactcaccatcaccggcgtcgtactcgacccgcgcgacctcaacaatccagacggctattcgggcatgacctccttccggtccacctcatccgaggactatacgttctttgcacccggcgacggcgtgaccggcaatatatacactgcgatatcggttgccgtcactggtgcgtccgattttgacacgttttccgatgcctacgatgaagccatcaaaaccgtggccgaccgtatcgaacatcagatacaggccacacgccagaaagcccgtcgtcaacagatcgtctccagcgcgcagcgcaaactggatgatgccaaagacgaggccaacgagcagctggacgaagcccagaagcagatcgacgacaactgggccgagctggaagccaacaaaacgacattgcaagatagccgtaccgaattggagaacaacaggacaaccattaccgatggcgaacggcagctcgccgatggacgtgcgcagattgcatcggcccgtcaacagatcgcgcaaggtcgccagcagatagccgaagcgcgcacccagctcgaatcgggcaaagcgcagctcacctcggctcgcaaacagctcgatgcggcgcaaacggaactgactgccaatcgcacgaaaatcgaacagggcattacccaaatcgaccaaggcgtggcacaaattgatcagatgctgtccatgattcaacaggccgacaatctactggcgcaacttgacccgaatatcgacttcaactcacccacatggcaggccatcaagcaactgctcgcgcgccttggcattaccctgcctgaagtgccgtcaatcagtgagctgcggcaacagctggccgccaagcaaacggaactgcaaacgcagcgagacagtctgacccagcagaaagccgatttgcagcgcacattaaacgaaaccattgcccccgcacaatccaccttggaccagcagaacgcgcaactgaccgccaaggaacaggaagcggctgcaggagaggcacagctcaataccaaatccgcggaactcgaagcgaatgccgcaaccctcgaaacccagtcggcgcaacttgaagcgcaggccgcccaactggccagcggcaagcagcagctcgaagaaggcgagcggcagctggaagaaggcgaacaacagctcgcggacggcaaggcgaaactggatgatgcgcagtctgaactcgatgcgaagcgaagcgaagcggaaagcgaattcgccaagcagcaacggcgcatcgacgatgtggccaacgcacgttggtatgtgcagacgcgcgcttcgatcgacggattcagctcgctcaaatcagacgtcagttccatcgaatccatcggccgcgcattcccgattgtgttcctgctggtcgccgtgctcatgagcctgaccaccatgacccgcatggtcgaggaagaccgcggacttatcggcacctaccttggactcggctatggcggactcgccgtgtccagccggtatctgctgttcgcgttgctcgcctgcctggtcggcggcggcatcggtctgctggtcggattccttggcatcccggcattcctgctggtggtgattgagggactgtatatattgcccggtgtgcgactcgaatacgactggctgtacggttcggccggcatcgtgctgttcgtggtcggcgtgggcgtggccaccgcgctcgcctgtcgcgaggagatacggcacacgcccgccgcgctgatgcggccgaaggcaccgaaagcgggcgctcgcatattgctggagcggattcgcccggtatggagccggctgaacttcctcggcaaagtcaccgcgcgcaatatcttccgattcaagtcgcgcttgattatgaccgtgggcggcgtggccggttgcacagcgttgattatctgcggatttgcgattaatgacaccgtcgacacgattggcgtcaaacaatacgagcagatctaccagtacgacctgatggtcgtggccaatgacgatgacgccaccgcgatgcgcaagcaggtggcacaagatggccaaaccaccgaaacgctgaatctgcgcgtggatagtggcgagatgagcaacgcggcgcaggaaagcgaaaccgtgcagctgatgaccgtgcccaacgattcgctgaatatcttgaacgatatggtcacgctggaacaagctggcgatgatggatggtttgggctgcccaatatcttcggcaaagcgggtggcggcactgtagcgctggacgatagtggcgtgattgtatcgcagtccgccgccaactcgctgaatattcatgccggcgacaccgtcacgctgggcaatggcggcagcagccgggccaaggtgcaggtcacggccgtgacgcgcaatcttattggctctgatgtgtacatcagtgagcgactgtacgaccagaagtttgcggccggcggtgtgacgtcttcggcttcgggagatggcactgcctcgaccttgacgtggaacgcgatgctcgccaagctgaaaggttccgagaccgaacaggccgaatatgcggatcggttgggcgaggaatcgtcggtgctcaaggccgtgagctgtgcgcatctggccgccacgtttaagttcgatttgatgggtgccgtggtggcgctgattgtggggctcgccggcggcctggcgctggtggtgctgtttacgttggccaatacgaacgtgtccgaacgcatccgcgagatggccacactgaaggtgctgggcttctatgaccgcgaggtgcacaactacgtgaaccgcgagatgatgatattgaccggtatgggtgtggtggttggtctgccgcttggcaggtggataggcggattactgactgctgcgttgaatatgccgtcgctgtatttcgaagtggaagtgcactggtacagctatgcgattgccgtggtggcgacgctggcgttcgcgctgctggtgcagctgttcaccaacccagtgctcgatcgcgtagacccggtcagctcgctcaagtccgtggaata

SEQ ID NO: 3630 - DNA, 4008 bp, Unknown
  R85_18m  MAG No. k141_35239
accatgtgcaaagttccccgcatatcgatgtgtaccatctgtatgcggggaactcgcatattatctcgaccactatcatgcgtacggtgctaatatgacggcgatatggcaggtgatattcgcatgaaagaacctcgcacgcagcgcacggaacaggtgaacaccgcgcaacaggaccattcggcgaactatctgtttctgattatcggcacgccgctggtggcgttcctgattgcggcttccgcgatgctcgagtcgcgtgggtttccggttccgctggtgcgtatcggcaccggtgccgcggggcttatcctgcaggcgattccgttcatgctgctgggcgcgatgatgtcggccgcggtcagcacgttcgtcagcgccgattttctggcccgccacataccgaaatcgttggccggcggactggccgcggcattggcggccggcctgtgcctaccggtgtgcgattgcatggtggtgcccacgttcgcgaatctgatgcgcaaacgcctgccgctgccgtgtgcggtgacgtttctgtgcgcggtgccggtgatgaacccgatggcgatatggtccacatggttcgcattcaccgacaaaccatggatggtggcggcccgcatggggttgggcatggtagtggcgatagtcgcgggggtgtcgttcgcggtgtggccgctccgctcccctgcggtgcgtgagaggccgctgacgattgggcggtcgttggtttgcgaggattgtgcaggggcgacgggtgattcgcctgagagccacccccagtcggctttgccgacagcccccgccggcgggggcacggggcgcggattggagcggttcacgcatttcattcggcatacgcatgacgactttatgcggatgatgccgattctgctgttcggcacgatcattgcctccatcatgcgcaccgcattgtcgtcgttgaccaacggttcaagcacgctcgatgacgctggtgccatcgtactgattctggcggcgatgggactggcgttcctgtgttcgctgtgctctacttccgatgcggtgatcgccgccagcatgattggcgcgctgccggtctccgccatgcttgtcttcctggtcttcggcccgatgctcgacctcaagaacacgctgatgctggccacggaatgccggccacggttcatcatccggttcatcgcgaccgtggcggcggcctgcttcctcgccgcgattgccgcccatctggtgatgggagcgtagccatgaagcgcaaagtcacactccccgaccgcgtggaggcgctgtgtttcgcggcgctgggcgcggccatcgcctatgcggcggtgggcggatcatacaccacgctgaccacgccgcgctcgctgccgtatctcatcatcggtgcggtactgctgttcgtgctggcgaccgcagcatggctcggactgttccacgccacggagcgttcggttttacggttcctgatcgccttgattattccggcgctgctgatcgccgtgccgttccagcccagcagcggcagcggcggcttcgacgagtacgccggcggccgcgctatcgccattccccgcagctcgcacaagcctgatggcacctcgcagctgcacggactcgacacggcgaacaagaccctgaccatcagcgacgacgaattcggctcatggttcgagcagatcgaccataatccgcagcgttacgtcggttaccatgtgcaggtcaccgggtttgtgagcaagtcgcgtacgttcggcgcggacgagttcgagctgtcccgccagttcatgtcctgctgcattctcgacatgaccccattcgggttcatagccagctccggcaaggccggcaccccgcacaatcacgactgggtcaccgtcgacgccgtcatcaagcagggcgtctacggctccgccggccacgagcgccaaggcctgatactgcaggtccggtcggccagcaaagccgcagccgccccgaccggctacttctactggcagtaaatgacgcgtctcccgaaatggaaagcactgcgctgcgccatgactcgccccatatcggcagaaatcccgcgttacaacgaaaggtacgcgggggctctgcctttatagggctcaaaactggcagaaatcccgcgcaggcctcgttgaaacgcgggatttctgccagttgattcaaatcatgtgacaacatgccgggcatctgatttgctttaataacgataatgaatatcatttgttaacggaaaggggcataacgtcatgagcatcgagcaaaccgcgaccactcggcgcgtgacgcgaccccgactcctcatcacccaggtcctggcggaactatcccgattcgccacggcccaggaaatcaccgacatcctgcgcgagcgcggcacgcgcatcggcacggccaccgcctaccgcaatgtgcagatgatggcctcccaaggcgagctcgacgtaatccacgtcaacggcgaggccctctaccgcgagtgctcggaccagcatcaccaccatcacatcgtatgccacgaatgcgggcggaccatcgaaatcgagattcccggacttgagcagtggatcgacaaagccaccaagcagttgaagtaccagaccatcgcccacgaactggagattttcgacctgtgccccaagtgtgcggcgaagcatgccatcgaaccgcctctcagcgtcggcacctcaccaaaggatggaccactgacgacgccagacgatactggccgtcggcgctcgaacaaataatggcgcagtcccgacgctactggccttcagcatcggtgcccttccaatccttggcgcaatagcgacgatataagctccactcgcatcgttagattgccaacgcttggcgcagcaccgacgccagacacgctcatcgtcgtcgttccaccaatatttggattggtaccgccaccacctataccaggcgtcgacactcggccaacaatcggcccgttaccgacacaaaactgcatgaggtctcattgctcttaatagcagcaatgggcctgataatcactttcaccaactttcgccgctgccgtctgccgccctacagtcgcagacgaacaaacgctgaaaggaacaacaatgactatcaagaccatcgatgagcatgcttacgagatcgttaccgaagagggcaccttcgccgtctgcaaggacacgctggccaagttcgacgccaccaagcacgagcacggcgtggccgcctgtggccgctgcggctgctgcttcaccggcgactgctgcgacgacaccggctgcgagcacaaccacaccgaagagtgcgggggcaaggcttgcctgcacgcttgccacgagaaccgcgaaggccacgagtgcgccttctgccaccttgccttcgacaccaacgagaagtgccacgatgagatcctggccgacctcaaggaactcaaggccgagctggctgtctgagttttaggtttccgatttctcctgcggattgactcctctcagggaggggagccagattccgacacgaaccaccgcgcttaccgtatgatgtctacgggcgcggtggttttgtttttctcgatgatggcgcagatttgctcgggcgcctccttgcagccgcgccggacccatagccagataatcgatgagacggcggagaccagaatttccagcgcataggcgcgcggaatgccgccgtagctcagctcggcacccacacgggccgcctgcccaagcagcatctgcttcaacacatccttgacccggtcatacatctgcatatcgttgcccgaacgggacagtgcgtcgaagaacgcatactcacgcttgacgtagcgcagtgcctcggcttcgtgttccagtcctacaatctggtggccaacctcacggccaaggagaacgtggagctcgcctccgaaatcatgaaagacgcgcaggaaccgacccaagcgcttatcgacgtggggcttcaggaccgtatcaacaacttccccgcgcagctttc

SEQ ID NO: 3631 - DNA, 3420 bp, Unknown
  R85_18m  MAG No. k141_35505
gtggaagacaaggtgatgctaaagcgccaccgtgtgtcccgtattttctggaaccgtcacttcttcgactacccgatttccctgagccccaacacgctgaaggctatgggcttcaagctcaccatggtggccggcttcagctacttgaaatccatgttccacaagttgcccgaagacaatctggagaacttctacatcaaccgctttggccgcaagctgtactcgatgttcttcgagggctacacggagaagctgtggggacgtcacccctcccagatttccgctgactggggtgcccagcgcgtcaagggtctgagcatcatgggtgtgctcaagaacgccttccagaagctactgcccaagcagcgctccaacgccgaggtcgagacctcgcttatcgaggaattctggtacccgaagtatggccccggccagctgtgggagactgtggaatccaactgtgagaacgccggcgtcaaggtgctgaccgacgccacggtggtcgaactgcgtcagaacaacggctccatctcctcggtggtgtatgaggactccgaaggtaaccgcaccgagcttgccgccgatcagttcatctcgtcgatgccggtcaaggacttggtcaacgccatcgatgcagccggttccgatccggaaagccccgaatccaagggcgctcctgccgacatgaccaaggtggccaacggcctgccgtaccgcgacttcgtgaccgtgggtcttctggtcaaacacctgaagctcaagaacaccacgaacattcccaccctcggcaacccgccgattgtgccggactgctggatttatgttcaggatccgggctacaaggtcggccgtctccagatcttcaacaactggagcccgtacctggtcaaggacgtgaacgacaccgtgtgggttggtctggagtacttctgcgaagagggtgattccttctggaacatgagtgaggaagacgccaccaagttcgccatttccgagctcacccgcatgcgcgtgatcaatggcccggatgaggtcctcgactcccaccgtgaacgcgtgaagaaggcctaccctgcatacttcgatacctacgagcacatggacgagctcatcgaatacctcgatggcttcggcaacctgtactgcgtggggcgtaatggtcagcaccgttacaacaacatggaccactccatggccaccgccattgaggccgtcggcaacatcaagaccggcaagacgtccaagaagaatgtgtggtcggtcaacaccgacaagtcctaccacgaagaaaagtaatcagcggagcgtatgccgcctttctgcaccctcgacgcacctcagtgcgccttcggggtcagacggcggcctccgcacgcgctgattatttttcttccctcgcagattttgcattctcggctcccctctctgaggggagctggctcgcgaagcgagattgaggggagccaaccccagcaattacatacggcctgccgatactcggcgggccgttttgcattggtcgtgctcgcgttgtagagtgaacaacgttcgcgagaacatcagagacgtagcgaacattcatgagcggtacagccgcaaaatcactcttaaccccgtaacaggcatgggcctgttcggtatggaaagggcaaccagtggcaaatagccagaatcttgaggatatgaagctgcctgagctcaaggagctcgccaagcaaatgggtctgcgaggcacatctaccatgcgcaagcccgaactgctcgccaccttgcaggccgcccgcagtggcggtgagccgccggctggcgtcactgtgcgcactcccaaggccgacaaggccgtcaccaaggcagccaaggctgagccggtcgtcgaagagaccgctgctctggcggaaccgcagcttgatttatccgcacttgccgaagagcccaaggccgaggaaccccgtcgtgtgcgccgtaaggccgccgatgaggccactgaagaaccgcgcgatgcccgtcatcgccgcgatgatgaacgaaccggccgcaagccgcgccagcaggccgatgaggccggcgatctgctcgcctccctcgatttgggcgagacaaccgctcccgagcgccgccgcaaccgtcgtgatgacaccgaagctccgctcattcgccgtgtgcatgatgaggatcagccgcgtcgccgtcgccgtcctgcggacagcagcgacgagaccgtgcgcgatttggatgacattctggccacgctgcccacgcagaagcacgacgaaccttccgacgatggtgaacagagcgaagaccgcgagttcagccgtcgcagccgtaaccgtgaccgagatcgcgacaaccgcaatgatcgcaatgaccgccgcaaccgccgtatgcgtggtcgtgaccgtggcgaaaacgccggcgaggacgatcgtcgtttcgatgatcgcgagaaccgcaatgaccgccgcgaggagccgcaggaagacctggtaccggtggccggcatcgtcgatgtgctcgattcctatgcgttcgtgcgtacgtccggctatctgcccggcccgaacgacgtgtacgtctccatgggtcaggtcaagaagtatggcctgcgcaagggcgatgccgtgcacggttccattcgagccccgcgcgagaacgatcgccgcaaccagcgtcagaagttcgtgccgctgcagtccattgactcgattaacggccagagcgtcgaggacgcactgaaccgtccgcagttctccaaactcaccccgctctacccgcaggagcgcctcaagcaggagaccgcgccgaacaagctcactggccgcatcatggatatcgtttccccaatcggcaagggccagcgtggtctgatcgtctccccgcctaaggccggtaaaaccatcaccctgcagaacatcgccaatgccattgccgccaacaaccccgaggttcacttgatggtggtgctcgtggacgagcgacctgaagaggtcaccgatatggagcgcacggttcagggtgaggtcatctcctccaccttcgatcgtcctgcttccgatcacaccaccgttgctgagctggccatcgagcgcgccaagcgtcttgtggagctcggccaggatgtcgtagtgctgctcgattccatgactcgtctggcccgtgcctacaacattgcggctccggcttccggtcgtatcctgtccggtggtgtagatgcccaggcactctacccgccgaagaagttctttggcgcggctcgcaacatcgaagacggcggctccctgaccatcatctcctcggcgctggtggaaaccggctccaagatggacgaggtgatcttcgaggagttcaagggcaccggcaacatggaactgcgtctttcccgcgagctggcggacaagcgcctgttcccggccatcgaca

SEQ ID NO: 3632 - DNA, 13614 bp, Unknown
  R85_18m  MAG No. k141_35826
gccatctgctcgacgacgatgctgcgggtgccgtcaccaatgaaccagtgcagcagggactcctgctggccgggcacgacctgcgaaacgagcgtcacgttcttcaacgcttcttcgacttcgtcgacactgtcgaaattgcgcgccacccacagcgggaattcgaaggtagcgacgttttcggttccttcgaccggctcgtgcgcaaaggaggcgtatccggggaagttcagtccggcaatggccaggccatgctcgttggcgcagtcgaaatacatggggcggtcggccatgaccacgcccacgccgatcaccgcattcggttcgctcttgcctttggccccatacacatagtcgtactggtagcctcgcggagtgaccagaatggtctcgccgtaggagaagctccagtcgagattacggccgaaatacgtgtttccctcatcatcggagaaacgaacaccagtgcacatatggactcccttccatgatttgccgtgtttttcttgcttgcgtgttcatggtaaacgccgtttgctgggaaaatcttaagttttgcccgtggaagaacctagtctggatatctacgcattctacaatgaccgtgatccgctggatcctcgcaaccggtagcagagtctccgtcaaacgcgcgaattcgaggtctcctgcatgcgtgttagagaatagcccgcctcccgagtccacaaaacacccacccgctggaacaatccgtacgccaactgccttctgggcgggaaggttccccagtgggtggaagattcaggacgttacaagccggccaatgccagaaactttttgtcggactggatgccttgggtgaggaactggccacccatagacagggcctataggaacttttgtggtgcttatgatcgaggtctggccttgtacgagtaggcgtgtcggcatgtctttttccccgcgtggaaaatgatgcgctcccggtggtgggctggatggtgtgagaacgccatccaacaaagcgaagaaatgcccggtatgcgggcgtgcgatgaagaagaacggacggaccggcaagggcacgcaacggtggagatgccgggcctgccggctgagctcgacgatgccgcagcgcggccgcagacgctggaggagttcctctcatggccgccggggccgtcgtcccggacggcgtcgggatccacgggcgacgcgcgcgccctgcgcaagcggatcgcatggtgctggtcaatccggccgcgcatcgccccgccggacgcgaagcgccatacggtcatggccgacggcacgtacatgggccacgactggtgcctgatcatcgccatcgacggcgagagcggagaagtcctcgccttccagtggtgcgcgcacgagtccaaggccgcctacctggccctgttctccgggatccccacgcccgacgtgctgatcaccgacgggctgcgcggcgcggaggcggcgtgcctggaggcgtggcccggcacccggatccatcgccgtctggtgcatgtgcaacgcaacacccgcaccgacctgacctccagacccagactccaggccggcagggaattgaaaaaactgtccggcccgccggccggcgtggaaaccgccgaggaggccgtcggatggggcgaggcgctgaacgcctggcacgaacgctggaaaggattcatcgccgaacgcaccttcgcgagggacgaccccgccaaccccaaggcgtccggacgtgtgtggtggtggacgcacggggagctgcgccgctgccggcggttggagaaactgttccgcgaggggaagctcttcgcctttctcgagccagcgcttgccgcgggtgggccggtggcccgcaccacgaaccggctggagggggcgtcaactcggttgtcaagaacgtgttgcgcaaccaccgcggactgcccgaggagcacatgctccgcgcgtgcgaatgggtgtgctacatgaagaccgcgcacccgcggccggaatcgttcatttccgacgatccgctggaggacgggaaagcgacgtcgcccgaaccggaaggcgacgtctcgcccgcatgcgggatcggtgtcgactggaacgaattccacaccggcacgcgatatcccaacggcaccgactgacgccgagaaccagacctaaagcaccacaaaagttcctataggccaccccgtggtcggctaccggatcacgtggcatagcacggatgggtggatggaacggttcaacgccttcgagctcggcgacgacatgcgattgaaacgactgcgcgacgactgggcggacgatgccagaagccgcggcctcgccgtccaggaatggcgcgccgcgatggagaaccgcccgcccttcctcgatgacggacgagaaagacacccggagaatctgtccacgcacgacatggaacgcctcgtatccgaagcgttcgccatcgccgccaacctcaacagcgcggcggacgacgacgaataccgggcagcgatgcgcgagggcctgcacacgttcgacatgctgcgcgaacgctacgggcttacgcaggacggcctgtggataacggccacggacatgaacgaaagccctataccagcgcacgtaggaaaaatttgacagcagcctcgaatccctacctccgtcgcatgtcggtgcaaactcagaaggaatgtcctcccgagagtacacatccgctctcattcattgaggtatcgcgcgtaacgagttttcattgtaaatgccacggtatggtgacggattttggaggacgataatgacaatacaatatacagcgcagccggctgatccggcgtcgagtgcggtgctgacgcgcgggctggtgaagcggtatggggattttctcgcggtgaacgggttgaatctgaacgtgccggcgcatggcgtgtatggtttgctggggccgaatggtgcgggcaagtccacgacgatgaagctgttgcttgggttggcctcggccacgagcggcgatatgtggatgttgggggagaaggtgggtggccggcacaggttgcaggcgggccgggtcggttcgatgatcgaggggccgagcttctacccggggttgagcggtctggataattgccgtatggtggccgattacctgaatctgccgggttcggccgcgcccgcgattttgcggcaggtcggtctggccggccatgagggcaagaaggcgagggactactcgctggggatgaagcagcggctgggcatcgcgatggcgttgatctcgcagccggagctcctgttgctggacgagccgacgaacgggctggacgcggaggccgtggtcgaggtgcgcgagatgatcatgggtctgagccgcgaacggggcatcacggtgatcatcagctcgcatatcctttccgagatcgagaagatggcgccggtcgtgggcgtcatcgcggccggccgcctgttgtatcagggttcgctcgacagtctgcgcgaggaggggcacatcgatttgcgtgtctccgacccgaagctcgcggcggcgatgctgggctcggaccggatcgactaccggtggctgccgggcagggatggcggcgtgctgcgcctgccggaactgccggaccagcggatcggcaccctgatcacgcagctcgtcggccagggcgtcgcggtctatcgcgtcgcctccgagcgcaagacgctggagcaggcgttcctcgaactgatcgaaagcccgcagagccgcgagcccacgcctcatcaggcgcaaaatgccatggattccgacgccgcgcacgcatccgcgcacgcatccccgcgtcgtccgttgccgatccggcaggctgcgggtcgggcggcgttcgcggcggcggacggaggcgcacgatgagcggcgcggcagtgttcgcggcgacgggccgccgtccgccgcgcccccgcgcgaagaccggcagcccgttcacgctggcgcgtctggagttgttgaaggtgcggggctcgtcgttctggtggatgctgctgggcatgatgctgctggtttcggcgtgggcgggcatggcgttcatgaaacgcgccggcagtcccgtcccggcgttgaggtcggccgcgttggccgatggcgaggtctatcaggtcgtgagcctgctggccccgattctggcggccctgttgaccagccgcatcgccgtgctggagacctcggagcgcatgaacctcacatggctgtcgttcggccagtcggacgcggcccggttcgtgggcaagctcatcgtcgccggcaccggcgtggggctttgcttcctgatcccgttgctgtgggtgccgatcgcggcgaaggcccttggcttcacggtgaccggctcgttcgccgcgctggtgtgggtgccggccctgaccggcttcctgtccgcgacggccacgagcgcggtccagctgatgttctcgatgatgatcgacaagcaggccatcggcctgggtctgggcgtcatcgccggcgtgctgggctccggcctgggtgcgatgaacagacccgcgcttggctggctgttcccggccggcctgagttcggccgcgagcccgttcgtcagatccgtggatgcgggcggcaacgccacgatgctgctcgccgcgcgcccgtggatggccgtggcctccgcggccatggcgttcctcggctggacgctggtcagcatggtcgtggtcaaggtgaaggagtcaagacgatgacacacgcaaacgcagtgaacccggcaaccaatccggcaatcaacccggccgccaatccagctgccggcccgagccatgccgcgatgccccgcgcgcatgcggcgggacgccgcaggccgtccgtgtgggcggcgttccgctgggagacgcgcaaggccggcaacctgtggtactggatcgtgaccgtcttgttcgacgcgatcggcatgttcaacgggtggagccagtacaccggctaccagacggagttcgccaggcagggcgtgacctgggccgcgatctggggtcaggcgatcctcctgccgagcatggtgttcatgccggtgcttgtggccgcgttcgccgcgcaggtcgaagccaacgagcatcgaggccgcaactggcagcggctgaacgccgccggcaccgtgaacgcggcgatcgccggcaagatgctgcacgggctcgcggcttcggcgctgaccgtcctcgtgttcgaggcagagttcatcctcgtcggacgcttcgccgccggattcgacctcgcgcagctcggcccgttcctgctgcgcggtatcccgctgaccctgtcggtatgggcgatcatgacgctcacgcaggccgtgagcgctaaggccgaatcgttcgcgggcacgatgagcgtgatgatggtcctgaccatcggcggatgcgcgctgagcctggccgccccggccatcgccgggccgtatccgctcgccctgatcaccagcgcctccgccgcccgcgacctcgcaaacatcgccagcccggcatccatgctcgcctccacgaccgccgccgccatctggaccgccatcagcgccctgatcttccaccggctcgccaaacaagccgtctgagcaaccgtccacgggctcccctcacctgcgggagcccgccacccaacaccatggaaaggcttcatcatgcacaccatcagccaacacaacgaacgacacgacgaacaacacaacgcgccacacaacagcgaacagtccatacgcctgccgcgccgcgtcatcgccgtgctgatcgccgccctcgccgcgatcatcctcaccggctgctcgaccggcatcggcgtggccggagacaggaacctccaaggcatacgcacccaagacggcgactcctacacgggcggctacaaggccgactacagcaagttcaccggcgaggaggccgtattcggcggcaccggcaagaaggccagcatccatctgaacggcaccatcacaggcacatccggcaccggcagaatcctcgtgaccaacggcagcgacacgaaacgacccgtgcccgccacgaacggcaaaatcgaccagacctacaacgtcacaggcaccagcttctacatctacgtcaccggcgaccaattcaccggcaccgtgaacctcacatccaaggagcaatgaccatggcaaacacatcccaatacccaaaccagcaaccggcatatacgccggcaccgccggacggcgggcggacatggggcggctgcgccagcctcgcattggccgtccttccccttctgtgcacgctcgtgccccagctgctcggcatccacctctacacgacgggctgggtcaggaacatcctcgtcatcatcgacttcgtatgcctcatcgcttcgctcgtcatcgcgatcgtcacctatcccgaacaggcgggaggacacagaatcgtcagtacaatcgcgatactcctatccgcaggcctgactgccgccggcggcatgctcatcttcctcatgttcatcaaccagtaggaatccgactgacaacggaaaacttctttggaagttcatctaaccgcatacacgccatacagcacaggccacatgcgatacgcttcaacacggatggggcagcacccagggaaggagaatcgcatgaccgcaaaaaccggaaacgacaagcgccacgcggttaccggcctgatcggccacgtggccgcgttctggcggtccagcccggtcgcgcgcatggtcgcgccgatactgtgcctatgctacgacgtgatgatgctcaccagaatcgtattcacccatggcgggggcgattcggcagccatgaaactgttggagcatcaatggggaatccccgtactcgccatcctatgtgtcttatctgttgtggcgctgttgttccgtatcagaatgccgttcgctattttgtgtgccatatgcggattgtatctatgcgcttgcttgattcaagcggagccatatctgatgttgcctctcttgtttgccgtctacacgtctacagccttggccgcgaccgctgaacgtgccattgcgggaatggttttgtcgggattgtcaatcgtttgcggcctctggattgcgaccttccccgccttgcagactgatatacttctgcccgagtccctccttgcgtcgatgaccgctattttagctctttggtcgcgcaacatcagtcagcggaggaagggagcggccttggtggaagctcaacagcaacgaagcctggaattggaacaggaacgcgatgaagaacgtcggcgggcggacgtcgcagccgaactgcatgacagcgtgggccataatctcaccgctatcattgcacttactgaaggcttggagggattgacacaggagccggtggaaggcgctataaagagtatcaataacttagctcggcaaagtctaggtgatacacgcgaggcggtacggaaactttcatctccggtgacgttacggaaaacaaaaacaggaacggtggaactgtgcagctggaatgatataaacccgattcttcaacatgctcgtgatattggaatcgccgccattctgaccgagacaggaaggcggccagacgatctagcccaagctgatttatgcttccgagtgagtcgtgaggctgtcacaaacacaatgcgccatgggaaaaatataacgcgaattgtggtttcatgggatcatctggataatggggaactccatataacagtgcgtgatgatggtaagccaacgctgaacaaagataaccgcgctaaggggaccggtttcgggcttgctggcctagtgactgaagttacgcggatcggcgggcaccttcactatggctcatcatcagggcaggggtggactgtttcagccattattccacagcaaaaacgtccatatattcctgcgcaggagggaaacgatgattaacgtaatgatcgtggacgatcagcagccgaccagaatgggtttttcgctcatggtcatgaaagatcctgcgcttcgcatgacgttgcaggcggggaatggacaggatgcccttgatattcttgcggcactgcaattacatgggcagagcctccctgacgtcattcttatggatgttcgcatgcctgttatggatgggctcgatgccacggcaagaatcaaacagttatatccttcaatacgtatcctgattttaaccacatacgatcaggatagctatgcgtttgggggattgagcgccggagcttcgggattcttgcttaaggacgttaagactaaggacctgtgtcgggccattcactcggtgtacgatggagacgccatactcacaccacggattacaaaggaagtgattcgccgaggagttcccaacgtcagcatcaatgctgacactctggccatcagaagtaaattcgattcattgggacctcgcgaattcgaagtctcagcactggtcagcgaaggaatgactaacgctgaaattgctcagcgtctcggaatgcaactggaggcagtcaaaaaggcggttagtaggtctcttgccaagctcgatgtcaaagaacgtgttggtatcgcggtgctctggtataaggccggaatgccgaatctgcagaagtgacagattccgtagaataatgtagggtttctgaatcgtgaagggctcgtagcgggcgaacccgtgacggtccatgaccgtcctcgtttgaatggcgatcggcgcgcatcgtggtaccgccgaccggtattttctcacgtgaatatagtgccgcttgtctcacctgacagatgcggcctagcattcaatgctttctgaggtctgatgcgaaggggctgtatctcaacgactcaaaggcattactcattggtctctgattagcgcggtcaatgttgcccagagcctcgatacaagtattgaaaaactacttgatgacagtgccatgaagatggaaatcgaacgccaagcggtcgcactgcgcgttcaactggatcaaataaatcagatgacgggaaacaagaatgccaccggcgacacaccggtggcttcaggtgagctcctgcggctgggcttgaaccagcgaccgtccgattaacagtcggatgctctgccaactgagctacgcaggaatgcgctgtgcacaagacgaagatactacaccaaaacctgcggatttcaaatcttcagcgtgtcacatgtgtgtttcggcttgcaaaacgtttccatacaatgctttcggcctaatctcacatggagatcttcgtcaacggcatggctgaatcgatggcgaaatctgggtttgacggagccactcccgcttcgaccagattgacgcccagcatggccaccatggcgccgttgtcggtgcacagtttaagctgcggcacgcgtacctcgacaccatattccgctccaacctccaacagtttggcgcgaagctgcgaattcgcggagaagccgcctcccacaatcaacgtcttcgaatcgtactgctcacagccgcgcatcgccttcttggcgagcacggtcgccacggaatccgccaacgacgcgcacacgtcatccacgggaatctcattgccttgcgcctgctgttcctcgatccaacgcgcgacggccgtcttcacgccggagaagctgaaatcgtacggatgctgctggcccgctttgccttgggtgagtccttgcggcaccttgatggcgtgcgggtcacccaattgcgcatgacggtcgatatgaggaccgcccggatatgggaagcccagcaggcgggcgaccttgtcgaaacattcgccggccgcatcatcaagcgttgtaccgaccacgtcgatatggcgtgcgacatcctcgacatgcagcagagacgtgtgcccgccggaaacgatcaacgcaagcgtgtctttggggaacggaccgaactgcagttgcgtgaccgcgatatgcccaatcacatggttgatgccgtaaatcggcttgttcgccgcccaggcaagcgatttcgcaccggacacgccaacggcgaggcagccagcaagtccaggacccgcggacacggcgatcgcatcgacgtcagacaatgtcatgttcgcgtcagccaacgccttggaaacgcatggcacgaacgcttcggcgtgggcgcgtgacgcgatttcaggaatcacacctccgtaacgtgcgtgttcatccatggaggacgcgacgacgttggagatcagggtgcgcccctgcactaccgcggccgcggtctcgtcgcaggtggattcgatgccgagtacgattggttcgctcattgctactccgtttgctgctttgcttgctgttccgtttggttgttctgcttattgttccgctgctgcgaagccgacgatcctcggctcaagatcaaggctcatggtgtatgcgtcgatgccttcgggctggtagtagcgtttgcgcaagcccattctggcaaaaccgaaccgttcatacagtgccaaggcaggaatattgtcgatgcgcacttcaagcaacatgcgttgcgccccctgctcgcgcgcccgcgcaatcaacgcttccatcaatgaagccgcgattccacgccgctggaactgcttgccgacgccgatcgtcatgatttccgcatcatcaccgtcataccagaaaccggcatagccgcgcacgacgggctgcttcgcagcgaaaccatctgcacccggcctatctgcggccgcgcaatccacaataccgaaatcatcaatatcgaacagatacgtgcgtgccggcgcgtggaattcctgacggattgactgctcgctccacgctcccctgccgaacaggtcagcttccaaagcggccatctgtggcacaacgatttcctcgtcgatgttcgtatggtcaacgatcatgccgtaccgtcactccgtacgttctgcaccggcatggttgagcacatgcttcaacgggttcggcaccgacacgtccggcctgcgcagatacaatggttcgatcggctccggattcgccaaagactgttgcgaagtggcgaaggccgcgaaacgctccagcccggacgctccctcgtcaagcagcgcatggtcgctcaccatgccgccttcgggaaggcttgcccacgattgcgcgtatttcgccgctccatggccgatgacatcgaccacatattccacgttcgcatctgactgacgaagctgttccagcacttcgttaacacggttcacgatcgattcgggatagtcgatatccatgtcaatcagggttttcacacagctgttttcaacgtttgcatcatggtcttcgcctgcgctgccaccgacctcatagccgctgccatctaacaatgtgaaatacagctgcttgcgtcgcgcatcgttcacggcgagcgtcagatgatggcggccatcatgctccgcgttgcgtacaagcacctgcggggaaagcacattctgcccgataagctgcgcaccggtggcgaaggcgagcgctttggctgcgacgattcctgcgcgtagtccggtgaagggtgcaggtccgatacctacgatgatgcggtcgatgttttccggtttgaggccggcttgttccacggttgtggcgatgttcacctgtagtttttcgacgtgggtgcgtgagtcggtttcaacgatggggtcgtgtccgaccatgccgacggttgagccgtatgaagtgtcgatcaccagtgtctgcattttgtggaaactccttgtgccaagctgggaactactgtacaaccgatgctggaatcgtgcttgctactggtgttttagcggttgttgcgtgtgatgtcgaaggtttgccaggattcgccgacgggaatgaaggttacggtgcgggtgccgttgctggtgagctcgttgtctgctctgcttgtttcgtctgcgctaacggtgttgagtggccggtcgatgtggatttcgaggcgttccggtgcgagcgcggctgccatctgttctccccattccatgaggatgatggtgttgtcgctgggatcttcgagttcttcgtcgagtccgagggattcgagttcgtcgagtagtcgttcgatggcattttggcctggggcgtaggcgttgccgccgagtcggtaggcgtcgacgtgtatgaggtgggcggagttgccgctgaggaattggcctttaagctcgcgtgcgatggtgaaggttggcgagacgatgggttcgctgatgttgagccctgcgccgaagccttgtgcgaaggtggtttttcctgctccgagtggccctgagaggagtatgacgtctccgccgtgggtgaggtgtgcgacttgtttgccgagttcgcgcatggcttcgccggttgtcgcttcgacggtgacggttttggcggtgccgctggctgcgttgttgctggtgttggtctcgctcatgttagttggttcgtcctttgttgctgatcagttcgatggatcgttccagcgcgtagacagggtccgatccgttggttttgctttgttcgtcggcccatgcgagcatttggatgcatcgtctcatgccgtcggaggtccatccggagagctgtctggtggcgtttttcagtacccatgaattggttttcgcttccgcttcgctgatggtgccggagcgtacggctgaggctttggccatggtgcgtagtttcatggcgagcgctccgatgagtgcgattggtgcggtgccttgttcgactgaggcgcgcatggcgatgatggcgtcggctgagcgtccggagagtgcgaggtcggccacgcggaagccgtctacttgggggttggcggtgagatattggttgacgcgttccaatgttatgggattgtcgtcgaagtcgaagcagagttgacctgccatggctgcgagttcgccggttttgtcgccgagtacggctacgagttgctgtgcggccatgggttcgatgcgtcggttgcgtcgttcgaagcattgtatggtgaagttgagttttgcgtcggcttttttgaggtcggccacagcttctttgacggctccggctttggtgagttggtcgatgagtcgtttgcctttgatgccgccttcatgttggcagatgacgatgctggcttcggttggattgttgacggcttgcttgcagtaggcgaccatggtttcgccgagtttgtcgtcggcgttttgcaggttggatacgatgacgattgatcgttcggataggagtgatgggcttaccgcttcatcgaaagcgtaatgatcggcgttggttgcgtcgagttcgatggtttccgcgtcggggtgtttgcgttgcgcttggtggcgcaggtcgcgtacggtttgctcgttgaggtacgggtcgcctccatagatgaggtggaaggttgctgcggatggtttcggcatagtattcaatctcgctgtatcggtggacaagattcattcgttccatttcatggttttgagcgcgttgtgggttcgttcgccccatgctttcgcccgttcgacgggattgcgcatgagacgtcggcccggcaggtttggttccggtgttgtgatgcgggtgaagagtgtgccagcaagtcgtgcggtcatatatccgacgatttcgacgatgatgattagcagtgcgccgccctcgcctccggtccatggaatggtggcgtgttttcccgatccgaggttgagagccatgagttccataa

SEQ ID NO: 3633 - DNA, 3083 bp, Unknown
  R85_18m  MAG No. k141_35922
cggaacagacgctgcagcttgcgctccaccggagcgttgcccttctgcacttcggcgccgtcgagttcgagcgattccacgttatgcgccttggacgaaccggtggcgccaccgatgccgtcacggccggtgcggccgcccagcaggatgatcttgtcgccgggggccggggtttcgcggcgcacatggtcggccggagtggcggccacgaccgcacccacctccatgcgtttggccacgtagccggggtggtagatctcgtcgacctgaccggtggccagaccgatctggttgccgtaggagctgtagccggcggcggcggtggtcacgagcttgcgctgggggagcttgccttccagcgtctcggagaccggcacggtcgggtccgcggcgccagtgacgcgcatcgcctgatacacgtaggaacggccggacagaggatcgcggatgcagccgccgatgcaggtggccgcgccaccaaacggttcgatttcggtggggtggttgtgggtctcgttcttgaacaggaacagccagtcctcgtcgtggccgttcacgtcaaccttgaccttgacggtgcaggcgttgatttcctcggactcgtcaaggccggtcaggacaccgttcttcttgagccacttggcgccgatagtgcccatgtccataaggcagacgggcttggcgtcgcggccgagctcgtggcgcatcgccagataacgctcgaaggcggccttgacggtggcgtcatcgatggtcacttcgtccagctcggtgccgaacgtggtgtgacggcagtggtcggaccagtaggtgtcgatcaccttgatttcggtgatggtgggctcgcggccctcctcgctgaagtacttctgacagaattcgaggtcggccagatccatggccagaccgcgctcgtcgatgaacttctggccggcttcggcgtccatctcgttgaaaccggcgatggtctcgaccttgccgggcaccggcacctgggtcttcagggtttccttggtctccaggctggcctcgcgggcctcgaccgggttgatcacgtaatgcttgatggtgtccacgtcggcgtcggtcagttcgccttccaacgcgtacagcttggcggaacggaccgtcgggcgctcgccctgggagatgagctggatgcattcggcggcggagtcggcgcgctggtcgaactggccgggcaggaactcggtggcgaagaccttggcaccggcgaagtcgggcaggtcgtaggccacattgtccacctgaggctcgctgaacacggtgggcacggtctggccgaacagctcttgggagatgccttcgacgtcatagcggttcacgatgcgcagggccttgaggccgttcagtccgaggatcgtgcgcagttcgcccgcaagctgctgggcttcgacatcaaagccgggcttcttttccacgtacacgcgaaaaaccatggaaatcctttcttgaaattattgaaaaattgaagaagtgcggtaaaagaacttggctcccctctctgaggggagctgtcagcggagctgactgaggggagttgtcatggcggtgaacgtcttgacctcccctcagtcgcctatcggcgacagctcccctcggagagaggagccagctgtatgttctgctacctgcacctaaacgacttattcggcgacttcgatgccttcggacttggcgagttcggcgaggcgctcctcgatctcttcgtaggccgggatgatgctgccgagaccacggcggaacaggtccttgtcaaggtgctcgaccttgccggagtggtccttctggtcccacagacggcaggaatccggggtgatctcgtcggccaacagcagcgtgccgtcggtggcgcggcccatttcgatcttgaagtcgaccagcttgacgtcgatcttggcgaagatctcgatcagggcctcgttgatcttgcgggccagcggggcgatctcggcgagatcctcgcgagtgcatacgtcgagggccaccaggtcatcgtcgttgacgaacggatcgtgcagatcgtcgttcttcaggaagtactcaagcaccggctccttgagcggcagtccttcctccacgcccagacgggagcagaagtggccggcggccacgttgcgcagcacgatctccaacgggaacatgttcaccttgcgtaccagctggccggtgtcgttcactcgcttgatgagatggctgtcgatgccgcgcttcttgagcaggtcgaagatgatggtggtgatgaggttgttcaggcggcccttgccggtgaagtcttccttcttttcaccatcgccagcggtggcggtgttcttgtattcgacccacagaacctctggatcgtcggttgcgtacagttgcttggccttgccctcgtagagcttttccagcttctccatgactcacctttcaggagtggaatttctgggtgaactaacggtaaaagggtaccaatcgagggctacaacaacactcggcatgacgctacgatgcggccagcgcatcatacgtcgctgcatcgaacgaccatacgctgttgggatggcggaggcggacggtattggtccgacaatcgactcattgccggtcgcatagtcgttcggagtaacagtatctacgcaagcacgcggacactcagatgttcgtcaatagacaaaacgtgagtgtacggccgcgcacgcacgataatgggagtgacgaaatggtgcaaggaggttcgtcatgatcgatcatattggtttgtttgtttccgacgccgcacagtacgcggatttctacgagaagctgctggccccgctgggctacgtcaagaaagtggcgtacccgaccgccgtgtgctttgccaatgacgaggatggcgacagcgtttggctggagtctccgaaggacggcaacccggtggtgccgtcccatgtggcgttccgcgccaaggatgaggacgccgtcaaggcgttccatgaggccggtctcgcctctggcggtaccgacaacggcgctccgggcccgcgcccgaactatggccccacgtattacgccgcgttcatccacgacccggacggcaa

SEQ ID NO: 3634 - DNA, 6954 bp, Unknown
  R85_18m  MAG No. k141_36154
gcgcacatcgagcaccgcgttggccaacgcctcgtcatccgagagcctatcgacatttggcatcagacgctttaccgtggccagctgcaggtcctcgaccagatccttggtggacttgtacggagcggaagccagcatcagcgcctcggtacccagccagcgcgacgaaatgcgttcggccggcagcctcagcgcgtccaaggcgccacgccagagcatcgtggcccgggactcggtggtggcgcccgccttgtgcaacaggttcgcctgactgaccagcttgccttgttctccagcctgatcggcctgcttcttgaccatttgacgggccgaagcctccgcctgcgcggcgaacttgcgttgcagcgccttcagatccttggacacacccagcaccttgacggggccgcgcgcatgccggcgtccacgagggtgcttgccggccggcagttgctgctccaccgagaacgtgaccctgagatacggggaaagacgctcgaccagttccggccccaacacttcgggatgaatctgcgcacccttggtggcgatggccgccttggtgaacacatgtgccaaatcaggccagccaacggtcgtgccatcctcatccaccggcggcagattcggcttctgctgcgagcccgagcccggcagatccgggtaatgctcgtcgatccagtcacgaatcgcacgcgcggcatccggggccggcacgaactggacgcgcagctgcttgggcagcgccttgatcatcgacagaatcagctcatccaacaggcccggcacattccatgtgaactggtcgggcgtgatacgcgagagcgccttcaacggcacatgcacggtgacgccgtcggccgggtcggccggatcgtatacgtagctcaaacgcaggtcgatgggttggccgtccgatccggtcgtatgccaatggtcggggtaatcgtccagactcaccgaatcgctggatgccagacgctccaccttggccgggtcgaaatcaagcagattcggctgacggtcatgctcggacttccaccatttcgccagatcggccacgctggtcacatcgttgggaatgaccgcgttgtagaagtcgaacagatcctcgtcggacacggtgtccgccagctggcgggtgcggctcgcgtcatcggcggcatcctcgagaatgtcacggtttttgcccacaaagtcgtcgtaactgaagcgctgctgaatatcgccctcgaccagaccctggcgaatcaggaagtcgcgcgcctcaagcggattgatgcgtccccactgcacggcacggtcctgtacgatcggcagaccatacagcagcacgcgcgcggtggccacagccgagccacgcgaacccgaccagtgcggctccgcatacgtggtgcgggtcaattggccggccaacggttcggcccacgccgggtcgatggccgccgaatagcgggcccacaggcgagaggtctccaccagttcggtgctcatcacccatgacggggtcttcttggccacggcggaggcggggaacagggcgaaacgggtgccgcgcgcgccctgataatcgttcttcgactgcttctgggcgcgtttcatcgcacgggcgcgcgccgcaccggtcagccccgcgaaatcggaggccttgggctcacgcaccacctgcatgcccatcatcgacagcaatccggcgagcatcgacttgtggatgccatccgcatcccacgagcagcacagcgaatgcgcggcctgctgattcaacggcagctggcgaatctccaagcctgggcgggaggcgggcaacgggtcgccgaccttgaacttcagctccttgcacatctggcgtagctgggagacgagatctttccactggcgtatcctcagccagctgagatactcggttttgcagatacggcgcagcgcgttgttgctcgggtcgccgtccgcttggaacacgcgatcccagatgttcagggccgtcaggaaatcggaagtctcatccgcatatcggttgtggatacggtcggcatcctcacgcttgtcgtccgggcgttcacgtgggtcctgcaagctcaggaacgccacgaccacgagcacctgggccagaagattcggcgaaccggttttcgcggcctcgataaccatacgtcccagacgcacgtcgatggggatgcgcgccagctgacggccggtatgggtgagcgtcacctcgccgcgctttcggccgatggccttgagctcggtgagctcattgaaaccgtccgacacggccttcatatccggcggatcgatgaacccgaagttcgtgacgtcctcggccgtgcgggccacgcccaccgacagcatgtgaagcaccacggcacccagcgaggtacgcaggatttccggctcggtgaagcgcggtcgggtctcgtaatcctcacgcgaatacaggcggatcgcgatgccgtcggccacgcggccgcatcggccggacctctggtcggcactggcctggctgatcggctcgatcggcagacgctggacctttgcggtcttcgaataccgggagatacgggcggaaccggggtccaccacgtagcggataccgggcacggtcagcgaggtctcagccacattggtggcgatgacgatgcgctgatgcaaatgcgattcgaacaccttgtgctggtcggcggcggacaatcgcgcgaacagcggcatgatctcgatggcgtccggtcggcgcatgtcgtcggcgcgcggaccgtaatgatgccgcagtgcggcctcgaactcgtggatgtcgcgctcgccggaagcgaagaccagaatatcgcggggaccgcgctcatgggaggagtggatcaccagttcggcgcaggctcgagccacggccgtgggcatatcggtgatgccgtcatcggcataggagtcgccggaccggccgcggggccggtcggaatcggattccgcgatggcgctggccagctcgtcgtaatcggcgtcgccggggcgggcgcccaccgcgaatcccggcacttcgcgcatcaacgcgggcgcggtgccaagcggctcatagaccacctgcacggggaaggtgcggccggaaacctcgattaccggcaccttctcatgcaaggcgtgctcgaaatgctcctggaacttgaccgaatcgatggtcgcggaggtgatgatgagcttcagatcgcggcgctgaggcagcagtgccgtcagatagccgagcagaaagtcgatgttaagactgcgctcatgcgcctcgtcgatgatgatcgtatcgtattgggtgagtttcggatcgcgctggatctgggcgagcagaataccgtcggtcacgactctcaatcgcgtgctgggcgagctttcgtcggtgaaacgcacctgatagccgacctcgtcaccgagcttcacgcccatctccgaggcgatacgttcggccaccgtgcgcgcggcgatacggcgaggctgggtgtgcacgatctgcttgccgtgcgtgccacggccaagctcaagcaggattttcggcagctgtgtggttttgcccgaaccggtctggccggacacaataacgacttgggaacgtttgaccgcgctggctatctcatcacgcgcggcagatacgggaagttctgcaggatactcatatttcatgacgaacttcaatgatacggaagcccttggagctcgcgtatttgctcgcagtgaacccctcgccgagcgcatcgtccagccaggggatcagcgaatcggagccgagattcttctgcactacgagataggcggcgccgcccaccttgagcttcggcagccaagccataagcaatgtatgcagcgcttccttgccgacacggatcggtggattcgaccaaatcgcatcaaacgtgaggtcgcccggcaccgtctcgcagaacgccggctggttctcggcgggcaggggagtgctggactcgtccacctgagccgcatgaatgttcgtgcggccgttcgcctgtgcgttggcatgggtcaggtccagcgcgcgctcgttgacatccaccgcccacacgttcgcttcgggcgactcaaacgccaatgtcagggcgatagggccccagccgcagcccaaatccaggaaatcgccggtaagcggcggctcgggcgcatgcttcagcaataccgatgtaccgaggtccacgcgcgagccggagaacacgccgttcgacacctgagcggtcgcctcatggccgcgcaacgttacgttcaatgtgcggcgcacgtccttcgacgcgggttccgcagagaaatactgttctgccatggtcgctccatttctgcgggattcgccgctctcgtatgccgacctgtatcagccggcctatgccggtacgtgccgatctatgccagcatgtcacctcatgtgatgataataaaggaccatagaagaatcgtgaaccattccaaccaaacgaggcgcacttgaccgacaacacccagtacaccgacatcgaccgcggcaacaacgacgttacccctgaaggtgtgctggccgggcagtccgaagtgctgctcgacgacagccagcgcgcgaccggctggcacgaggacgccaaccaggaatgggaggagcgcgaggcccgcaacgagctcaagcatgtcgctggtctcggcgagctgcaggacgtcaccgaagtcgaataccgcaaggtgcgtctggaacgtgtggtgctcgtcggcgtctggtcgtccgccgtcaccacgcaagccaaggccgaggaatcgttgagggagttggcggcgctcgccgaaaccgccggtgcggtggtatgcgatggtttgctgcagcatcgctccaagccggatgcagccacgtacgttggttccggcaaagccaaggagattgccgacatcgtggcgcgtgaggaagccgatacgattatcgtggacgacgacctgccgccgtcacagcgccgtgcattggaggacgcagccaaagtcaaggtggtggatcgcaccgcggtgattctggacatcttcgcccagcacgccacctcgcgtgaaggtaaggcgcaggtggagttggcgcagctcgaatacatgctgccccgactgcgtggttggggtggttcgctgtcccgtcaggccggcggtcgcgcggcaggcgcggatgcgggcatcggatcgcgaggcccgggcgagaccaaactcgaaatggaccgtcgtgtaattcgcacgcgtatcgccagactgcgccgtcagattcgtgagatggctccggcacgtgaggtcaagcgcggttcacgccgtcgcttcggcctgcccacagtggccgtggtcggctacacgaacgccggcaaatcctcgttgaccaaccgtctgaccggttcggccgaactggtggaaaacgcgctgttcgccacattggacacggccgtgcgccgcgccaaaacccgcgacggacgcgcttacgcctacgtggacacggtcggcttcgtgcgccgcctgcccacccagctgatcgaggcgttcaaatccaccctggaagaggtggccgaggccgacgtgatcctgcacgtggtcgatggctcccaccctgacccgttctctcaggtcgacgcggtcaatgacgtgttggcggacatcgaaggcacggcctcgattccgcgtattctcgtattcaacaaggccgatcaggcggacgaggcgacacgtgaacgactcgccgcactgcagccggatgcgttcatcgtctccgcctataccggtgagggattggacgagctgcgtaccgcggtcgaaagtctgctgccggtcccgcatgtgcatgtcaacgctctgctgccgtataccgctggctccctgatctctcgtgtacgcgaatacggcaaggtggacaaggtggagtaccgcgatgatggcatacagcttgaagcggacgttgacgcccatcttgccgctcaggtggtcgaacagtccattgactaacgtgataaacatcacagtttgtttgtgagcgctaacaaccgttggaaacattaccataccgttatcagacagggtggtgtgctggtagcaaaacgtcttagcgggtttatagagtgaaaaccgttagttacaaggcctgccattcatcagcagaccgcctttgaagagaggttcatccatcatggcggaaactaccgttaagcccacgaagcttgctgttattggtgccggtgccgttggctccaccctcgccttcgccgctgcccagcgtggcgtcgctcgcgagatcgtgcttgaagacatcgccaaggagcgcgtggaagccgaagtgctcgacatgcagcacggctccagcttctacccgaccgtgtccatcgacggttccgacgatcctgagatctgccgcgacgccgacatggtcgtcatcaccgctggtccgcgtcagaagccgggtcagtctcgtcttgagctcgttggcgctaccgtcaacatcctcaaggccatcatgccgaacttggtcaaggtggctccgaacgccatctacatgctcatcaccaacccggtcgacatcgctacccacgtggctcagaagctcaccggtctgcccgagaaccaggtcttcggttccggcaccaacctggactccgctcgtctgcgcttcctgattgcccagcagaccggcgtcaacgtcaagaacgtccacgcctacatcgccggcgagcacggcgactccgaagtcccgctgtgggagtccgccaccatcggtggtgtccccatgtgcgactggaccccgctgcccggccacgatccgctcgacgccgccaagcgcgaggagatccaccaggaagtcaagaacgccgcttacaagatcatcaacggtaagggtgccaccaactacgccatcggcatgtccggcgtcgacatcatcgaagccgtcctgcacgacaccaaccgcatcctgcccgtgagctccatgctcaaggacttcca

SEQ ID NO: 3635 - DNA, 8744 bp, Unknown
  R85_18m  MAG No. k141_36477
atcgaacgggaatggctgcgggatatgcgggtaaggtcacaggaaggcggccagacatgtcggctccgtcaaccaatacgtcggctacggcctgcggcccatattggccggcatatccggcccagatcgtcacggcggagcgttccagcacatcggtcagtacatgcgcgcgaccgcacaccgccaccgaaacaactggagcggtggtcaatgccacgacttcgtccagcatttcatcctggtgccaaggcagacggatgtcagacaagtccacgccttcgccgcaggtggcaccgtattcggttacggccttcgccgcgccattgtcgtcgaattcactgtcatagctgcgttcgctggtgctgccgcatacgaataccacggtcgacgcacgcgcccattgatcggccggcgcatcgctcggcttggcggccaagagaacccggtcctccccgagacgtgccaccaattgccggtagacgcttgactgttcatcggcgggcagaggggcggtgtaatcgcccaggaagcagccgaaatcgtcggcgaacgggccggcgacaatcacagggccggcttgagcatcagctatgacgctgcggatatcgtcgagcgtggcggcagactggccatcattgatcagcgttatcgcctcgcgggccatgcgcttggcctgctcacgcccatccgcagtggcctgcgcgatggcgtcggcgctcggcatggcaattgcggcggtatcggcaccgtcttcgggcaagagaccgaacatggctttgagttccagcacccggcgcaaggccgtgtcgacagcggccactacctgttcgtcatccgcatattcttcgaggcgggtgaatccttcatcccacagggagacgtccacgccggcgagcagtgcggcacgccctgccgcgggaatggagccggccatgtcttcgagccgatccacggccaggccatcggccatcacgatgccgtcgaaaccgagctggtcgcgcagataatccttgagcagccacgggttggcgcagcaaggtacagaatcgatatcgttgtaggctgccataaagcccaaggcaccggcgcgcacaccggcggccaccggcggcagatgaatttcatgaagatcgtgcgggcccagtacggcggactgtccgttgcggccgcccacggcctcgccttgcgccgccagatgcttgagcaccacggccactcccccgtggccgaccttgctgcgatgctcaccctgcatgccggtaacgatggcctcgcacatgcgggcagccatcagcggatcctcgccgaagcattcctcgcaacggccccagcgtgggtcacgggcgatgtccaaaccggataccaatgcgatatgaatgccgctggcggccagttctgcggcaaccgcagcttccgcttcctgcaccccctgcgggtcaaacgtagcgcccaaacccagattggtgggcagcaccgtgccgcccagcgcctgatgcccgtgaggcgcctcttcgctgagtaatacgccgatgccgtgcgcgccacgttccagcacagtttgctgcaccacggcaatcgcctcagtccgctcctcagggcgtatgccgttaccccaatgttgaccagaccatgggtcggctcgcaatagaccgtacagggtgccgagtccaccccatcggtcaatctcctgcttgagctcgtccgaggccaccagccgtcccgcagcattgcgttccacggacttccaaccgagcagacgctggttcaactggccaactttctgcgtgaagctcatcgaatcaatgagtcggtccactgcggcgcagttgatgctcattgagcgctcccccttctcgtatattgtcttctcgttcttctcgctcttcggcgagtaccgggtcttatgttttgccctgcgcactgcaattgtgcgcactgcaattgaaaatatccggctgtggaacaaggagtagatgattccacaaccggatatcggtttaatcagccgtttcgaacgatgggtccgaaaccgcagtgtagtaacgggcggcataggggtgttcgtcagcgtgcaattccagaatgccacgctgcgcgagcgcctcttgattggccgccacctgcgaggtgatgatggtcgggcgctggcccgccacctgcagcttcatccacaggtcgcacaccgagcctcccgggccgagcgcactgcggttcaccgggtttccggcctcatccacatcaatcaccacggcgacggtcttcggctgagccggcaatgcggaacggtactgtgcggcgagttccccgaacgtacggccgatcggcttcagctggccttgctcgtcgaacaagcccagagagtgctcgaagaacgggaagtcttccatgctggcgggcacatcgtgcgagcaccaccacgtcacaccccacaggttccggcaatccatggcacgttcaacggtcttgcggcagaattccggcgtgtagtcggtttccagcacattctccggcgcaccgacttcctggagccacaccgggcgctcggaatccttgccgaacgccttggccagctcggccaggtacagtgcgtacgacgagcactcctcactggtggcgccgtatccttgcgcgatgccgttgaacacccaggagtgaatcactgtcatatcacccttggtggcggactgcaccggagtgaacgggtgcccatcgatgaaccaggtgccatcgttgacgctgtacagcgcgttgtgcccttcaccggcggcggtcggaagcagcgcgtccagccatgcgtcgatctgccggtccgtggcgctcatcttcgtgggatgcggcctgtcagacagctgattgacctcgttgcccaaggtcagacccttgaacgcgggttccttggacagctcatcggtcatggtcttgaccagttcacgctcggccgcaacggcgtccgcatcggtgaacatgttgcccgcatgccaggtgaccagccatgaaggcaggaagtcgaagctggacagatgcccttggaacacgtccacataggcatccaaaccgtgctcgccggcgatgtgcaccatgcggcgcacatccgccacgcccttcttgttgatccaggtgcgattaggttgcagatacggccagatcgggaagatgcgcacatggtccatacccagttcgctgatctgcttgagatcattgtcgatgccgtcccagtccgggtcgagccatgcgtggaaccagccatgcgacggcgtgtagttgactccgaatttcattggagtacctcctttttccagtccgctcagcccttgagtccaccctgttccaggccacggaagaagtagcgctggaagcagcagaagaagacgatgatcgggataagcgagacgagcgcaccggcggcgatcagtcgcggatcttggatgaacatgcccttgagtcggttcatgccgagggtcaaggtgtacttgctttcatcggagatcgcgatcaacggccacaggaagtcgttccaggcaccgacgaatgcgaagatgccgacaacggtcatcgtgcctttgacctgcggtacacagatgtggaagaaccgctgccataggttggcaccgtccaccatggccgcctcttcgagttccattggaatggatttgaaggcgttggtcatgagcaggatgttgatggcgccgcacaggccaggcagtgcgactgccagcagtgtgttctgcaggtggatggagcgaatgatcaggaactgggagatcatcacgccttcgatcgggatgaccatggtgcccatgaacatggtgaacaccagtccgcggccacgccacttcaggcgtcccagtgcgtagccggccatcgtggagaagaccacgttgccgaagatggagatcaggcagaccaccagcgtgttgagcatgtagtggaataccgggacctgcttgaacacggaaatgtagttgtccagcgtcggggtcttcggcatcaggtagggaggcacggcgtagacgttgtcgcccttgcccttgaacgacagggacagttcccagacgaacgggccgacgagcagcaggaacatcagaatcagaatcagatactggacgactttgccgacggtgaccttatgcgtgttggtattcatcagtcctcacctcgcttttgtacgatctgctgcacgatgagcatgacgccgacgatgacgagcacgacgatggagatggcgctcgcgtaaccagtgcgggcctggataccggtgccttcgcgcttgataagcatcgacatcgtcatatccatgccgccggggcctgcggagccgttggtcaacacgtagatttcgttgaagactcggaatgcggcgatggtggacagcatcatgatgagcatcatcgtggagcgcacgccgggcattgtcacgtagatgaactggcggacagggccagcgccgtcgagggaggcggcttcgtaaagggattcatcgatgttggcgagggcggtcaggtagatgaccatgtagtagccgaggcccagccagattgtcacgaacatcgagctgaagagcacgccccatcgatcggtgaggaatggaaccggcttggagatgatcttcaatgccttgagcacggagttgaccagaccggcggaatccagcaggttggtccagatcatacccaccacaacggcggacataaccaccggcatgtagaaggcggtgcggaagaagcccatgatgcgggagttgcccttgaccagataggccaggatcaacgggaggatcaccatgaacggcactacgcagatcacgtagagtgtggagttcagcagtgccgtgaggaagtactcgtcatggaacagtttgatgaagttttcgagtccgacgaaggttcccggacggagcagtgtggagttggtgaaagcaagcctgaaagtgttgagtgccgcaaggacgatgaatacaaacacaatcgcgaacgctggcagaacaaacaggtagggggcaatgatggtgccgaagctacgattctgcttcttgccgtggttgaggttcatcggttcaggccggtcggaggccgtgcgggcctccgacctgtcagcggcgagtgccgcgttgctcactgtgcgagcttctcgtttgcgaactcgacggacttgtcaagggcttccttggcggtctgcttgccctgcatggcgagggcgatctgctgctggaagttcttggagccgttgttgtcggtgaactcggacggacgagagccgtagccgtccttgacctggtcgagcgtgatcttcagagccttgccctcaagggtgctttcgtcgatgctcttgtagtagtcgtcatccagaccccccttggcggacgggaacacggaggccttcttgtcgaactcgatctggttcttctcgttggtcacgaatcgggcgaagtcaatggcaacgtcggggtgcttcgagttggcgctgatgccgagcatctcgtaggccacggaagcggacttgccgtcgttgctgatacgcgggccgactgcgaggttcttgtaaaggtccggagcgttctgcttgaagccgtcagcggagtaggcggagccggccatggagaccaggttgccacgctggaagagatcggcggcctggctccaggaggagtcgagggcctccggcgggatgccgcccttcttgtacagctcaacgaagcggctgatctgcttgacaccggcctcatcattgaaggtgtacttgctgtggtcatcgttcatgaaggacttgacgcctgcggtcatcagatcttcggtgttgtaacccatcgtggtgcccaggtagacatccttgcagttctgcacgatggtgtcgccggcggcgaagtactcatcccatgtggtcggaatcttgttcggatcaaggccgcacttctgcatcagctcggtgttccagtaggtcgggccatcgttgacataccacggcaggccgtaggcacccttctcgatgccattgccctgcatggtcacggacttccatgcgccttcgtagtagtccttttccgcatccggagcctgcttggagacatcgagcagcgcgccggccttggcaagaccgtacaggatggagttgccgccgtcgacgatgtccggcagttcgccggccgcagcctggctggacagcttgtcttcgtaaccatcggacggggcgtcaagccacttgacggtgacatccgggtgatccttctcataggccttgatcagcgcctcgaaatacggggtgtacttgtcgttcttgaggttccaggtctggaaggagatctccttcttgccgccgtcatcccccgcagttccgctaccacaggcagccaccgatacgagcatcgcaccggcaccggcgatggcgaggatcttcttcatagaaaacatgatgttttcctttccttttgattcctttttcatcccgccctgctgtggacggagaaacctaatcgttgtgctccagcacagtcacccgtcgcggtgattgacgtggtatcacaacctttattcagttctcatcgctgagactaaaccgctttagcttccggccagtcgcgaacctgttaactaaatcggtttagtaaaaacataacacaatcgaaacatgcacgcaacgaattcatcgtcgcgtgtcgcattgatatttgcccaacgggatcgctctccctcttctcatacaataatgggccgcgcccaaccgtatggcagagccggtctgttccggttccgttacggttgggcgcgacccaaaatatcgagcctaggcccaatatcccttatcggcgaatacgcagcgtggcgagctggaatggcgccaacgaaacgaccgcaccgtcggcaggcattggttcgtcaccggcgagcgcgcgcggcagttcggcatccagctccggctcctccatgagattcacctcctgcacgctggccttggcatcggagagagcggcgtcaaggcgcagtgtggccgtggcattgccgccggcggcctcgtacaggcgcacgatcagatcgctggaaccgtcatcggcgagcttgatccagtccaatacgatgacgccggtggcgtcggcgagcgagaccagcggcgccatatcaggcaactcccctattacggggctgttaagtcgcgccgcttcgtccagcaccgcattcatatcggcgtcagcgaccagagaccacgcgaaggagtgtgcgccttggtcggtgcgtgggtcggggtacaacggtgcggacagcagcgagagccgcaccatggtgccgcggccggtgccatgtgccgcatcggcgtggatggggctgacgtcggagccgtaggtggaggcgttgaccacagcggcggcatagtcggcgtcggcgatacgcacgaagcggtgcgtgcagctttcgaatttggcatcatcgctgcgcgtgttcttgttgatggggcgttcgaccagaccgtattggcattcgtattgcgcgttcaccgcttgcacggtgaccggcatatccactttgaggaactgttcgacggcatgccagtccacatcggcggtgaagtccagtgtggcggagcccggccttaaggcaatgcccgtacgaatttcaacgcccttcgcgcgagtgacagcatgcacgacggccccaccgttggcggtttcgtccacgcttgcaatcgatgcctcgctgagcgcgttggcggtgaggaacgcatcgcgttgaatatcccaggcatcccagtggaagggttcgtctttgagcatttcgtagcggcccagtcgggtgccggcgggcaccagttcacgattggttcgctgatcgacgattgacgaaacggtgccgtcggcttcaatgcgcacgtgcagtcggccgttgtcgagcacaatcgtatcgccgtcatgggtaacggcgacccgagccatggatgcggttcccgcttcggctcggctcgaagccgggcgtaccacccacgtctcacaggcttggcgggaatatggggcgattacggcgtcggttatggttgcgtcattgggttccacgactgcgatcgcgcgcccggcttcaagggcgatctcgttcagccgagcgatgtcacgcgcgtattcggtccgcgcctgacggtgtacccatgcgatggccgaaccgggcagaatgtcgtggaactggttcaggagcagcgtcttccaaatacggtccagctcttcgcgcggatagacatagtccgggttcttgatgcgggccgcggcgcacaggtattcggtgacgcgcagcatcgactcctcctggcggcagccgcgcttcatgtcctgctgggcggtgagggtagcgcggtgcagttcaaggtacagttcgcccttgaacaccggggtctccccttgcgcatcgtcgacgatatccttacgcacacggtcgaacagttggtcgggagtaccgaattcgatcttcggcgcgccggcgagatcatggtcgcggcggatgcgcgcggtcatctcacgggtggggccgccaccgccatcgccgaagccgtacagcagaatcgcgttacgggagaggtccttgtccaggaagttgcgctgcgaatacatcagctcgtgcatgctcatccacgagcagtaggtatccgagggcgggaagtgcgtgagaatacgcgtgccatcgatgccctcccacatgaaggagtggtgcgggaacttggtggtgtcgttccacgagatcttctgcgtgaggaaccagtcgaatcctgcacgg

SEQ ID NO: 3636 - DNA, 8637 bp, Unknown
  R85_18m  MAG No. k141_36596
agagcggccttgattcgaccgtcatcggtgatggtggtgccgtccagcggaacattgaaatcagcgcgaaccagaacgcgcttgcccttgagatctccaaggtccttgagtgtcttcatgaatatcctttccttgacgaatcgcacgtcaaagtggccaattttgccactttgcatattacaggcattccggaacaaaacaccgcattcgcctaatgactgaatgcggtgtttcgttacgtcgttgtcgggttacttgccttcggctgcgcgagccttctccgttttctcggcaagctgaagcagtcggcgaattcggccggcaatcgcatccttggtgatttgcggttcggcgatcttgccaagctcctcgaggctcttgtccacgtgatcgatgcgcagctggccggcctgacggaggttgtccggaatgttatcgccgagcacttcgaaggcatgctgcactttttcgctggcttcggcggcagccttggcggaacggcgcatattggcgtcatcgaagttggccagacggttggccttgccgcgggcctcgccgtcggagcgcttgccggtccattcgcgggccgaacgggtggcgcccatgagcttgagcatgcgttcgatggcgtcgggatccttgagggtcacgcgctcggagctgcgcagcgtgcgatgcttggcctggatgccgagacgacgggccacgccacacagggccatggcggcctcttccgtggggcaagcgatttccaggaagctggccttaccgggatcggataggaagccacgggccatgaaggcgccgcgccatgctgctttgatttgggcgatggatccgttgaccacttcagacggcagtccacggacctgctgcttgcggcggtcgaccagtccggtctgcaaagccaaggccactacgttgcgggtgacgagcaccacgtaggtctcgacagggccgttcggggtctgacgggtgaggtggttgacctcggcttcatgcccgaacgtgttcctcaacgtgttcttcagccattctgcaacgtcaagcgaggtgaatacggcttggataacgtatgtattctgtaccggtcgaagaccgccgccaaaacggatcatggccgcagcttgggccttgatcgcggctggcgaatcgccttcaaaggccgccaactcgcttttgacatcgtccagaagagccaagatctacctcctacagtcccgttcttctcaatgcttcaggcgcttcgtgccgttatctgctgtcatacggtcggaagccatcggctttctgtgatacctaatctggtggacaagcgaacccgtttgatacgtattatgggctttgctttctcgcagtgtggtcaccgaacgcttgcccgatgaccgctcgacgcctgcttacgatgagtgacgcttatgctgttctctcgcggaaacggttacgttgagcccatgtgcgcgtaagcggcgagccagctcttcgctcatcgccaccgaccggtgctgaccaccggtgcagccgacggcgatggttacatagtgcttgtcttcctgggcgtatccttccaacgcaatctcgatagctttctcataagcgtcgagaaattccttggctcccttgctggaaagcacgtagtcggcgaccggcttgtcgtgcccggtaagctcgcgcaggttgggaacccagaacgggttgggcagaaaacgcacatcggccacgaaatcggcgtcgatgggcatgccgtatttgaagccgaagctgaagatgtgtaccgccacggtggtggggccggaaccgagcatcgtctcgtagagtttggtggacagctggtggatgctcagggagctggtgtcaatgacccagtcggctcgctccttgaggtcttccagcaggtgacgttcctcaaggatgccgtcgatcagtcggttgccgtgctgcagcgggtgcgggcggcgcacggattcatagcgcttgatgagcacttcgttgctggcgtcgaggaacagaatatgggttttgacgccgagatcatccagatggccgagcacggcggccagctcgtcgaaatagctggagcgcacgtcgatgacggcggcaagcttgtggacgcccgaccccgatccggaaccggaggtggtcatcatgtcgacaagcgggataagcagtttgggaggcaggttgtcgaccacataccatcccatgtcttccacgcagtcagcggcatgagagcggcctgcgccggacataccggtgatgagcagcacctcgaaggcatcaagcggggtcggctggttgtccggagtcgatgtggatgtcgcggaattcgccggcgcattcgtggcggccgcctcgccggtatcgcggattgttgtctgttgactcattacaacgcctcctcaagagctttgcgcatcgcgatctccagctggtcgtcttcggtggtggtgtcctgcagacgctggtcggcatcgctgggcgggtcgtcatcccagataccggtcatcagcaatacctgtacgagagcttggtacagcagcatttcttcgccgccgatggcgtgaccgccatgagcgcgccaggcttccatgagcttggtggggcgtggatcgtagaccacgtccagcagcagtccggagaatggctcggttccggcattggtgagggcatccgcgacgttgtcggccgcatgtccgggaatcgtgttgatgacataggtggcgttgcgggctgcctcgagcagggcctgatcgtcgcctaattcgatttcgctgtacgggttatgcacgttgacgaacttttcggccactggtttaagcccggtgtttttcccagggtggcgggcggcgacgatgatatggccgatttcgggcatcatgcagcatgcggccaacgccgaagtggcggtgttgccattgccgaggatcagcgcggcgccgcttctcgatgcggtgtggtgttcgccgagttcgcgattggcgtggtcgaaggcgagttggatgccgatgacatcggtgttgtacagcttgatgcccggcttgccgttcggccaagcgggatcatcggtagccacactccagtcgaataccgcggtattcgccaccttcagttccttggcccacagattttccggaacaccgtacggttggatggtcttcttcaacggcatggtcaggctcaggccagcccacgtcgagccaaggcctttgaggaaagcgtcgaggtcgtcttcccccacctcgtgcttgtcgtacagccaatcgtcgagtttcagcgaacgataagccgcgttgtggagcacgggtgacaatgagtgcgcgacgggtttgccgagtacagcgcaacgatgattggccatatcccctccttgatgtctgtttccatgctagccgacactttgcttcgaatatgtcaaccacaggccccgcaaccgaaaattcactctgggctgctggaccgggccggctcactgctcgtgcagcgcgttgtacagcgctttggctttggcgtggccgatgcctttgaccttctcgaagtcctcgacactggcttcgcgcatggctttgaccgagccgaagtggttgagcagccgcttctggtagctttcgccgatgccgggaatctcgtcgagcgcgctgcgcagggcgcctttgcgccgctgttggcggtggtaggtgatggcgaagcggtgggattcgtcgcgtacacgctgcagcagatacatgccttcggactggcgtttgaggatgatcggatagtcgtcgtccggcacccacacctcttccaagcgtttggccagtccgcagacggccacgtcgatcacgccacagtcctcaagcgccttggcggcggccatgacctgtggcttaccgccgtcgaccaccaccaggttcggcgtgtaggcaaagtgatgccggtttgtgttctgctggacgatgtcgggcgaggactcccgtgcatcgttctgcactccgaccggcaccgcgtgccccttgccactgatgtcggaaccgccctcaccattgtcgttaccgttcgcaacgattgtctccgccgccacggcagtggtcatcttgccggcggccgaggccgcgcgctgttccgcgtcgatgctttcgccggagtcgccggcgatgttgccgtgcctgaagcggcgggtgagcgtctcgtaaagcgcggacagatcatccaccgcgcctttgccgtccttgcctcggacggcgaagcgtcggtattcggatttcttggcgatcgcgtcttcgaacaccaccatggaggccacttggaaggcaccgcccacagtgttcgaaatgtcgtagcattcgatgcgcagcggggcttgcgcgagtcccaatgccttggccacatcgttcatggcctgggtgcgtgcgcccatgtcggagatgcggctcatcttgctgcgttgcagtgcttggctggcgttctcgttggcgcggtccataagctgcttcttgtcgcctcgcgaggccacgcggatggtcaccgcgcccccgcgcagattggtcagccagccttcgagttcctcgcggcgggccggttcgacgggcacgatgatttcgcgcggtaccggtgcgatgggtgccagcaggtccgcgcgtccggtggtctcctgacgggtgttgcgttctcgggtggcctgggcgcgtgccacagcgtccgtggccgtgatggtctgtgtggagccgatggcctcgcgattggtggagatggtcgcggccgactgggggtgattgtccccggcggcgtccgaatacacctgcaccagaaggtcggccatcaagtcggcgtcatcgatgtcctcaactcgttcgacgctccagttgcgttcgccgcgaatagagccggcgcgcacataaaaggcgtgcaccgaggcttcgagctcgtcgctggcgaagccgaacacgtccgcgtccacatcctggtcgaagacgacggcgttctgttgcaccacggtttccagcatttggatctggtcgcgcagtcgggcggctttctcgaattcgagttcggcgctggcctctttcatgtcgcgggtcaactgggcgatgtatggccgtccgaggcgtccggtcatcacgccgaccagctgttcgcacagccgccggtgttcgtccgcttcgatacggttcacgcagggtgcggagcatttgccgatggaggcgaacaggcatggccgtccggtcagttgcgccttgtggaatacgttggtggtgcaggtgcgtaccgggaacgtgcgcagcaaccggtcaagactgtgccgcaattcccacactttggcataggggccgaaataccgggtatcccgccgtttgcgcgaccgcgtgacccacacgcgcggaattcgctcccccgtgctgaccgcgagatacggataggtcttgtcgtcgcggaactgcacgttgaaccgtgggtcgaattccttgatccacgtgtattccaacgtcagtgattccagttcggtggcgacgaccgtccactccagactgcgtgcggtcagcaccatggtctgcgtgcgcggatgcagcagatacagcggctggaaataattggtgagcctgttgcgcaggttcttcgccttgcccacataaatgacgcgcccttccccgtcgcgccatttgtacacaccgggtttggcgggaatatccgaggtcttgggtcggaacaggtcgcgagaatcccccagcaaaggtgccccattcgcattcaccttcgccgtcgtttccccggcgcccacagctacgctttccggcattaacgccgccgcagtcttccgccactcatccggactatgccgctcaatatcgttcgtcataatcctcctcgctattaagcaaaaccaatcatcagggattgggcgggttggtatgtgctgctggaccgtaaagacttggcctgagcggcccggagcgtgtccagcaacataccaccccaacccacccgaggtcagctgcaatggaaggctaaagcatggatttcaggaacttgccggtccatgaggattcgcattcggcaacctgttcgggcgtgccctgcgtgacgatggtgccgcctccgtcgccaccctccggaccgagatcgatcagccagtcggcctccttgatcacatccagattatgttcgatgacgatgaccgtattgcccttgtccaccagggactgcagcaccttgagcagcttgttcacgtcttcgaagtgcaggccagtggtcggctcgtcgaggatgtacacggttttgccgtcggatcggcgctgcagctcggtggcaagcttgacgcgctgcgattcgccgccggacagggtgggtgcgggctggccgagtcggatgtagccgaggccgacgtccacgagggtcttcaggtatcgggagatgccggtgtacgccttgaagaagtcggcggcctcctcgatgggcatgttgaggatgtcggccacggtcttgccgttgtacgtgacttcaagggtctcgcggttgtatcgtttgccgtggcagacctcgcagtccacgtagacgtcgggcaggaagttcatttcgatcttcagcgtgccgtcgccgtggcaggcctcgcatcggccgcctttgacgttgaaactgaagcggccggggccgtagccgcgcacctgggcttcgggagtcttggcgaaaagggtgcggatcttgtcccacacaccggtgtaggtggcggggttggatcgcggcgtgcggccgatcgggttctggtcgacgtggatcaccttgcgcacctggtccacgccttccacgcgcctgtggcggccgggtacgatgcgtgcaccgttgagcttgtcggcgagcaccgggtagaggatcgtgttgaccagcgaggatttgccggagccggagacgccggtgaccacggtgagcacgccgagcgggaagctcacgtcgatgttcttgaggttgttctcgcgggcacccacgactttgagcacctgggtcttgtggatcttgcggcgcttggagggtacggcgatctctcgccggtgggcgatgtagtcgccggtgatggagcgcttggcttcgatgaggtgcttggcggggccggagtagatgacttcgccgccgtgttcgccggcgccggggccgatgtcgaccacccagtcggcgcggcgtatcgtgtcctcgtcgtgttcgacgacgatcagcgtgttgccgagatcgcgcaggtggtgcagggtttcgatgaggcgttcgttgtcgcgctggtgcaggccgatggacggctcgtcgagcacgtacatgacgccgaccaggccggagccgatctgcgtggcgagtcggatgcgctgcgcttctccgccggacagggtggcggccgcgcgcgagagggtcaggtagtcgaggccgacgtcgttcaggaagccgagtcgggccttgatctccttgagcacttcgccggcgatcagctgtgccgagccttcgagtttcaggccgttgatccaggcgagttcgcgtacgacgggcatgtcacatacgtcgaagatggatttgccgtccacggtgacagagagcacctcgggcttcagacgacgtccgtggcagacctggcagggcacttcgcgcatgtacgactcgtagtattcgcgcatggactgcgaatcggtttcgtcgtggcgtcgcatgagcgtgcggatcacgccttcgaagccggtggagtattcacgcaggcgtccccagcgattgcggtaggagacgttgaccttgaagtcgtggccgtagaggatgtcgtgcttgacgtcgtccggcaggtccttccaaggggtcttcatggagaagcccatttccttggccaagccttcgaggatgtggccgtagtactgggaggtcatcttggtgccgctccacggttcgatgacgccgtcggccagtgacttgtccgggtcggagatgatgaggtccgggtcgatttccagtttgaagccgagaccggtgcaggcggggcaggcaccgtagggggcgttgaaggagaaggtgcgcggctcgacctcatcgagttcgagcgtgtgcccgttcgggcagctgcggtgttcggagaacggctggcggcgggccgggctgccttcctcctcgtccacgaagtcgatgacgatgctgccgttggcgagcttgagggcggtttccaccgaatcagtcaaacgttggcggataccgtccttgaccacgagtcggtcgaccacgacctcgatggtgtgcttcttctgcttggtgagtttgatgtcgtcggacagctgtgtcatctcgccgtcgatgagcgcgcgggcgtagccgtcggagcgcagcagctcgatcatgtccacgaactcgcccttgcggcccttgaccacgggcgagagaatctggaatcgagtgcgctccgggtagccgagcagcgtgtcgacgatctgctgcggggtctgggaggcgacgggctcgccgcattcggggcagtgcgggatgccggtgcgggcgaagaggagtcgcaggtaatcgtagatttcggtgatggtgccgacggtcgaacgcgggttgcggttggtggtcttctgatcgatggagacggccgggctcaggccctcgatgaagtcaacatcgggcttgtccatctgacccaggaactggcgg

SEQ ID NO: 3637 - DNA, 11626 bp, Unknown
  R85_18m  MAG No. k141_36799
cgataaggtgttcgatactgatgtatttgccgaccatatagccattgcggtacagcatcaggagcgtgagtagccgactcatgcggccgttgccgtcattgaacggatgtatgcaggtgaaatcgagaatgaacatggcgagggcaagcaatggatcggtatgtccatctcggattgcttgcgtgtaggcggaacacgcgcgttcgatcagttccggtgtgacaagtgcggacggtggggcgaatcgtacggtgctggtcccgtgtgcatctcgttcgatgatgacgttgtcactgtccttgaaatgccccgcaaaggtcagtggtgtgtgtcggaagaggtcgcggtgcagttgaagaatgacgttcggggtaaccggaatatagtcgtggctttcgtgaatagccgatagcacgtcacggtagccggcaatctcttcttcattgcgattgcgcggtgtggctttctccgagacgagatcgttgagcctgctatcgctggtagaaataccttcgatgcggtttgaggcatctgtgctttggatgcgcgcgacggcaaccagcgtctccaatatatccggtctgatcgttgtctgtatgctttggcgcccttttgcctcgtgaatcgcggcaagcaaactcgtggtgtgcggggtgagcaacgtcttacctgattcgatgtagtcgaatgatctcatactgcctcattttctgcatcatacgaacttttctgcatcatattttatcaaaatgaggtagaaaatgggctgatgaggtagaaaaggcggcaggatggtggccatctcgcttgccggttgcgctactttcccgggaatgttgcgctcgtggcaagagacggcaagttcaggcggccgagattggcgatacccgtcgtgtagtcgaacgtcttaccggactgccttacgagcgttgctgacggtagcctacactgagaaaccatgagcaagcaccaccatcgcgaccgtagctgggccccggcacctgaagcattgccggacgacgcccagaccatcgacaaccacactcacgtggcctccgtaatccctttcgcgcgcgctatgagccatgaggcgcaggagaaggggcagcccgaagtcccggtgtacgacgtcgaccaattgctggcgcaggcgcaatctgtcggcattgggggtatcatcgactgcggttgcgagctgccgcacctgatgaccgccgtccagatggccctcgatcatccaggtaacgtgcacgcggcgctcgcaatacaccccaatgagtccgtgctccacgggcatcgcggtgtgccggggccggatggtctgcctctcaaatacaagccttaccatgacacgtctttcgaggacgcgctcgccgaagtacatcgcctcgccaccacataccccgagcaagtggtggctatcggcgagaccggcatggacctcttccgcaccggcgaaggtgccaaggaactgcagcgcgaggctttccgcgcgcatattgccctggccaaggaactgggcctgcccatgcagattcacgaccgcgactcccatcgcgaggtcatcgaaaccctgctggccgacggcgcgcccgaacgcaccgtattccactcgtattccggcgaccgtgagatggccgagattgcgcgcgaacatggctggtatctgagcttctccggcaccgtgagctacaaaggcaatgacggtatccgcgaatcgctacggattgtgggtctgggccatgcgatggtcgaaaccgacgcgccgtatctgacgcccatgccgtaccgtggccgcaccaacgcgccgtacatgatcccctacaccttgcgggccatggccgatacgctcgacctgtccatcgcggatgtggcgcgcggcacccgcgataccgcccgcgccgtatacggactgtgagggccgggtgtgcggccgtcgcggcgatgtgttgacttgtaaaatttgtcagaattgtgaacgaggtctaccatgatgtacctgacataagcgagggggatgatctccacctcaatggaggactgaacgtatggctgagtcgaaccaaaggaccgcacgcgcccaaaaagcctcaaaggcccagacagcccaggctggcgccgccaaagccaaggcccgacaggaagaagaagcactgctgagggccgacacctttaccaacgctcccaaggtgtcccgccgcactctcaccaaggaggagcgcgaggcactcgccaagcagagggaagccgaaaccaaggaagccgagaaaatcgccagcgcatggtcgaaaggcggcctcggccgatggtgggcccgcttgcaatccagcccagacaaggttacctggggcatggcgatcgtggcgctcggcgtggtgtacggcgacatcggcacctcgcccctctacaccgcgcagaccttccttgccggtcagggagggcttggcagcgtaaaccgagaggccgtgctcggcatgctgtcgctggtcttctggtcgattacgctgatcaccaccgtcaaatatgtgctcatcgccatgcgcatcgacaacaatggcgaaggcggcatcttcgcactgtactcgttgattcgcaagtacggcgcatggctcgcgattcccgccatgctcggcggcgcggcattccttgcggattcggtacttaccccggcggtttccatcagttccgcagtcgaaggcttgcagaccctgccgccattggaagggttgttcgacgaaaacccaagcctgaccctgatgattaccgtcgtgatcatcgtgattctcttctccgtgcagtcgcgcggcaccgaaagcatcggcaaagtattcggctcgatggtgctggtctggttcagcttcctcgccatcgtaggcgtcacgaatctctctaacgactggtctgtgttcgcggccctgaacccggtgtacggcatcaaattcctgttcagcccggacaatgctgccggcatcgccctgatgggcaccgtgttcctctcgaccaccggtgccgaggcgctgtactccgacatgggccacgtggggcgcggcaacatctacttcacctggccattcatcaaggttgcgctggtgctcaactacttcggccaaggcgcgtggatgttggccaatagcgataacccgcaatacaccgcgatgaagtcgctcaacccgttcttccagatgatgaccccgaacgtgcggtacctggccgtgattctgtctgtttcggccggcgtgatcgcctcccaggccctgatcacgggcgcgttcaccatggtttccgaggccacccgcctcaactggatgccccatctgcaggtgcgttacccggcccgtacgcgcggccagctgtacattccggtggtcaacggcgtgttgtgcgtggccacgctcgccgtgctcgccatcttcaaggattccgaacacatctccgccgcgtacggcctggcgttgaccattacgatgatcaccaccaccgtgttgctcggcgtctacttatggcattccggcaagcgggtcggtgccatcgtgttcaccgtgctgttcttggcgattcaggctatgttcttcatcgcgtctatggccaaattcctgcacggtggttggttcaccatgttgctgaccgccgcgattctgttcgtcatgtacacgtggaatgagggcaccaagctcgaacgtgcgcaacgccgtcacatgcggcccaacgacttcctacccgcgctcgacaagctgcacggtgatttccgcatcccgtattttgcggacaacatcgtgtacctgacctccgactcggaaaccaagcgactcgacacggacatcttcttctccatcttcgccgaccaccccaagcgtgcccgtgcttggtgggcagtcagcgtggaaaccaccgacgagccgttcacccgtgaatactcggtggaggacttcggcacgaactacatctaccgcgtgcgcttccgtttgggcttcaaggtttcgcagtccatcccggcgtacatccaccagatcatgcacgacctgtccaaaaccggcgaactgcctaagcagaagtcgatttaccccaaggtcgacgccgatccggacatcggcaccatccgttacgtgctgattcacaaggccctgatgccggaatccaaggtttccgcacgcggtgccctgtcgttgcaagccaagtacgcaatccgccgcatggccggctcgccggttaagtggttcggtctggcaccttacaacccgctggtcgaggtgcagccgctgttcgtctccacccgccgcccaccgcgtctgaagcgcaccgatacggccaagaccatcacgacgcccacgccgactcgtgcagtggccgacccggccgccgtccccgacccgatggacaccacgtccgggctcgggcgattggtacaggagctcgatgccgccgtatcggccgaggagcggaagatcgctgagaccgctgccgccgctgctgcggtcgctgagcagggcgataagggcaaggccaagaacggcaaacccgccgccaagcctcagcgctccgccaaacagaagcgataacataccagtttgcagcggcgctgatgcgctctataaagaatgcctataacagtcgccgcacgtcgccacatggtttcggtaagttgaaataccatgtgcagattactgggatacgcgacggcaggcttcaacctgagtctcaacgccgtgttggggcaagacaatgtcgaggatttccgtgaactgtctgaaatccacaatgatggctggggcgtagcccagctttccgatcccgccgaagcaccgcacgtgcgcgacggcggcgcacccactccggaaaccggcacccgaatctacaagtcgaccatcgcggcccgtcatgacagcacgtttgaggcgctggccgacgaaccgtctcgcggtgccatctggcacctgcgcttggcaagctccaatctgccgctcatcatggagaaccagcacccgttctatgcgaacggcctgagcttcatccacaacggcgatatctcggacgccaatggccgcaacatcgtcaccaaccgttcatacccggtgaaccacagcgtgctcctctccaccggcggccgttccgactccgctatcttcttcgcggtgattctggaatacatcggcttcggcttcccgctcgacgaggctgtggcccaggccgtgcgcgaactgcgccaaacctacccgaagtccagctacaactgcatgattcagtccgaggaccagctcatcgccctgtgcgccgccggtcgtgagaagaccagcccgcgcatcgtggaaatctacgatgagtacggccgtggcgagcaggccgccgactaccgtgtgatgcgctaccgtgagctgcgcgacgacaacggcgactccgccggtgtggtggtctcctcttccggctatgagcaggaaggctggaacgtgctggagaacgaccagatgatcatcgcctccaaccgcaacggcacctaccgtctccgttccatctgaaatagcttcataagccgtctctgacgaggggccttgagcctcaaatcatccgcatcccatacttctccgccaacgccggaatatccggcacgccatacttggccaccagatccagccatcgttgtttgttctctccgccaaatcgctcggctcgggccgtatacgcctcgacctgcaggaacttcggcggcactgacttgctatggaacttgtcggcgtacatcaccacttcctgctcgagattcatcggcacatagtcggctggtggcaatggcagctcctggcgcaccacatcctcgcgcgtaagtcccacgccggtatggttgcggcagaactgggcgatggactcgtccacgccctcgtcgagcagatactcgtagcccttaagaccgtgcagaatgtagcgtttcttgctgaatttgagcggttcgtcgtcagagccgtcatgcttgaacacgcggtaggtgccgatgtcatgcagcagtccgccgatgagtactaaatgctcgtcgagcagacgcggcggcacatgaccgccggtgacgcctgcggtgggcggtacctccgcgtccttcggtaatgtgcagcggcgcgtgaacagcgcgttctgccggcgcacgatctggcagccgatggtcgccacaatcacgcaatgcgtgtgcaccagctcgtacgccgccttggacggcgcgattttgcggtgcaactcgtcgatctgctccagtgtgggaatatatccggtcatgattatcaggtttcgcctcgtacggtcagatttatcttcagattagcgcggcaatgagccgcggcaggattgtcaggagctgattcggacatctcgacatgcctatctccgtttcaaggggctgattcggcatcctcctgaggtctacttccgtttcaaggggctggtgcccaagtatacgcggcgtaaaaacggcggaatgacgttggcatgaagccgtttatactcggggtttggcggatgaccagccccttgaaacggaagtagacctcccggaacacgcaaatcagcccctcgaaatcgaaaaagctcacgatgtttggtatgtatccgaacatcgtgagcttcaagagcctgtgctggtgtgtctggtgtgtattgctgccggacagatcagatcttgaagagtgtgtcggctgcttcagcgagctcgcgcgacgcagtgagcacgataacgcaatgcttcgggtcaccggtgtgcgccagcttggccagcgcggcgaacacggtcacctcgtcatccgcgttcagccctcgtgtcggctcgtcgaggatcagcacttcggcctcggtgctgattgcacgggcgatggccaccaaacgctgctgcaccaaaggcaatgtgccgacggccacgccgctggtggcctcggagaagccgaccttggccagcagttcgcgggcgatcaccggcttgggcttcaggaagttgcggttggacgcattcatggcgtacagcacgttttgttcggcgtcgagattcggttgcacggcgtgcagctgcggtacgatgcccagacggtggccgcgcagttccacgggctcgagctcaacaatgttggcgctcttgttcatcaccgtgccagacaccggcgtggccaaaccgctcatcacgcccatcagcgcgcgacgtttggcgtcggcggtgatgcccgaatcggggtcgtcgctgatcagcagcgcgtatgcgtgtccggagtagcagaagaaattcgcgccatcgaggatgttgaccttgcccttgggaccggcgaccgtcaccttgttcagggcaaaggtcgggtaggtcttgagcagaatgtcgtcggaaccgccgcccaccaacacgcgatcgatacgcgaggccagcgtcatggtgggttcggccgctttgccctgaggctccgcatgctcggccaatgcgtctttgtgatcggttttggccagtcggagtgtttcgttgacgcgggcggcattgcgctcggtcacttcggcggatgcgttggccgaagcgatggcgtctgcttcggcctcgctggtctcgtcggttgctccggtttcggcagatgccagtgcgctgtaaataccatcgtcaacagtgccttcgtcatcaacgtcatcgaaggtcacgctaaactgcacggagtcagctggaacggattcaatggcgtcgttcgtctcagtctcagaagtcacttcgtcagccgttgcgtcagtggtcttctcgagttcctgatcgttgttcttgtcgctcatgcctgtgcctccgcatcgtcggttgtggtggtcgtcttattggcctcgccggcatcatgagcggtggcctcagcagcttcatcggtctcagcagcgccagtggtttcggccgtttcaatcgcctcagcctcgctcacggtgccccagtcgccatcggcggcgaacagcttgttcgcgctgaagaacgcaaggcgcagggcggcaagaatcgccaggatcaggattgaacccaggccataccagaccatggtccaaatcaggtccgatgtcaccgggatggtatggccggatgccagagcaggtccgatcggcttggcggcgaacgcgcctccgaccagaccaattacgtagaagggcagggtgacgatgaacacttccagcatgaactgccatcccaaacgcccgcgagtgacgccggacaccagtgccatgccgatctcgtcatcacgcttgggcgcccacacgcctgacagcacgaggatgagcaacagcacgccgcccacggcaaccaacgcaatggtgccggtcttcgcgcgcgaggatagcgtatccagcggctccagagaagcgttgtaggattccagcgaaggggaagacacctcgtatcccttggcgggcagcttggacttcttgagggtggataccaaggacttgtatgtagcgggatcaccggtgtcgaacaccacgtccagatccggcaccgcccagccggaggcggtcttgtcgttggactgtgggtcgagtccggccttggcgaaggtctgatagttggtgaagatcgcgttctcgcggttgcgggcggccgtcaccggattggcgacggcggattcggatgtgtacttgtagatgccgcgcaccttgagctcggccgtggtctgggcgtccgaggcggccgccaccttgagcgtatcgcccaccttcaggttgttggcggaggcaaacgcttcagagaccagtgcgccggtggtgttcgggttggaggacttgttgtcgtagctcaggtccttgccgtccacgatttcgaaggtaccgaggtcgctggccttggcggcatcctcggtccagaaggctcgccaaatgagctggccgccggtctcatcatcggaggccgagcccagcgatccgccgtccagggccttcaaatcaccgctcacgcgggccggcacggtttcggtaaccgtaaagttcaacgagttggtggccgactggacgagcgtggcgtattcggtatatgaggtccacgtcatgtaatgcttggtggaagccgagtccgtagcggagaccttcttccacgtagccgcagtcgggcgaatggccaacgtggccttctgctgatcgtacgcggtggtgtgtgcgttggtatcttcttgaatgatggccagtccggcgactgtgccgaaggtgaccgccaaggtgatgaatgcggtcagggccgtacgtcctttagaacgtgtcagggcccgccaggcgttgctgaggacgaacatgtaattacctctcccgttctcctaagccgaacagatcaatacggctttaactattgttgcgtttagtgaccgttttcttgcgcaatactgttatacccctcaatgaagtctgagaacattctgacagcgatgtggtggtcatgcggggatttgcacccggtatgggataaaccctcggtctatttcggtggcatcggtacactggcatgagatatgcgtggcgtcacgtgtgctccggcatgtctgcgattccggattcgcccggagtccggcatccggaagcgtggccttgcgccgttggataagagtatgagctgagcagattttcgggtaggataagtatgcgattcacttcagggcattcgagccataaggctgtggggcgtaggagaagccgccatgccggtaacgggaaatccaatcgctccgcatctacgaatagcgctgcaaatcagcagacgggtcccgtaaacctgaagactccccagcacgtgggtggcgacggccgttcgctgatcagccgtacaccgatatgggcgcgagcggtggttgtactgctgctgacgttgctggccagcgtcacctgtgtgggcacgctctacgcggcatccgtctcgagaatggccacggatgcgcagcgtgtgctgacatccgccgaaggtctggccaattcggcacttggctgcggcagcgataagagtctgtcggacatctcccaagagttggtcaatgccaccaatgatctcaacgaggagctgaacggcccgcagtgggacttcttccgcgaccattcgcgatttggcagcgacatcaccgctgcccgcgaaatgctggcttccgtggatacgctggtcaacggtccgttcactgatctgctgaacctgtccaaacgattgcagggcttctccctgaagaatggctcggtggacgtcagcgccctgatggatatgccggatatcgtcaagcaggcgcataaggatatctcgcagcagctcaccaagctcaacaaggtgccgactccgagcgtcgccaaggtggccaccgtgctcgaatccgaaaaggctgcgctcaagaccgtggattcgatgctcagcgaatacgatggcctcattaacttgctaccgcaactgcttggcgaggacggcaagcgcacgtatctggtgatggtgcagaacccggccgagctgcgttcggcgggcggcatggtgggcaccatcgccgcaatcacggcagataagggcacgattaccatcggtgatttcgccaccacttctggttgggacattcctgagaagccaatggatgctacggtgctgaaggagcgccaggtatttggcgacacttttgaccagtacccggccaccacgaccatcgaccccgaattccagcgtgtggcacagatgaacaaatacatgtggctgtatcagaaaggcaacgaagacgagaacgtagcgggtgtattgtcattcgatcccgtattcctccaggcattgctgggagccacaggcaaggtcaagctttcggacggccgagtgctggatggcaccaccacggtgccgttcttcgcttcagacctgtacacggattacccggacttcgagcagcagaacaacttcgtttccgaagcggctcaagcaattatgaaccatgtgcttggcaacgcgaatgcttccaccgcatccccgctgttgaaggcaatcagagataccagcgctagcggtcatttcaagctatggatggctgatccggatgagcaggaggcgctgattgccaccggacttatcgacgataaggccagtggcgagttgtctgctgacagtcaggtacctgaaaccggcatctatctttcggagctgcagcaaggcaagcaggattggtatctgaagacctccaccacggtcacaaaaacctgcggcgacgcctcggccagccggaacgccctgtattctggcgtgctggataagcgcatcacgacagctgtgcgtaacacgcagctgggtcagtttacggaagatcagctcggtgacgaatacacggtcaccttcaccatgaagaacacgctgactaaggctaaggccgaatcgttgcctgatttcgttaatggcggctcggagaatccagtgctcggtggcatgctgtaccgcgtggtgcttaccgccccgtacggtggcgaaatcaccgctgtgcaggctgatatagattcatggggtaccaacaccgcgagcctgtatgaccgtcagtacattatgttcaaccagcagtggatcgagcccggaaaagaattgacgattgcctataccgttcgggtcagcagcgatgccacacatccactgaacgtggtaaccacgccggtggtgaatgcggatggc

SEQ ID NO: 3638 - DNA, 19884 bp, Unknown
  R85_18m  MAG No. k141_36831
caagccgaccacgaaacaggacgcccagccctctacgacaacgctatcgacaccgactacacccactcaatcggcattcaaaaaggccaaatctaacccccgcgacacgccgagccagacacacattttgacccttaacccgccgaacatgatggagaagatcggcagatcacggccgcgcgacttataggcgctttcgaattcgtcctgatgatcggagttggagcggccgtcggtcatgagcacgatggcggtggtgtattgcgaggcttccgactcgctgggcagctcgtcgagcgcgctcagcaggccttcatagatatcggtgccgccgctggcatcggtggcatcggcctcatgcagcaggtcgctggtgcttgtgccagtggccttgaccgggcggtgggcctcggtttcaaacgggatgagaatgttcacgtcgccgctggcgggctcgatgtacgacttcttggcctggtccgggtcgagcgccgcgttcaggcctttgaccacgccgttcttgccctctccagacatcgaaccggagtaatcgaccacccaaatggtccagctgggtttcctgagcgcggtctggtagacgttgagcgcgctgtcgatcaccgtggcggaggtcatggagaacgtgagtttgccgtcgctgaccgcggcgaggatgtccgcggtggagacgggcttggtggcgccggagtcgtcagcccagccgagtttgacggccttggatttggcgatgccgaacacgatcggcgtggtggaggtgctggccgcgtctttgacgatgtgcttggtgtctcccatcgaaatccacatcgaggaggcaggccagacggcgtcgtgatcctggccgccggccttgagcgcgttcataatctccagcgaacccatgtagtgcatcgtcacggctacgttggattggtcggccgctttctggatggcagtggcgacttccttgttctcggagccggaggcaatgctcagggtggcggtcggtttgccgccggacggctggaaggtctgcgtggtggcggacgtgccgttgccgtccgctgtgccgtcatcggaattattgaacgccgtgcaaccggtcaacgcgagcacgccggcacatgccgcggccgcaaccgcggcggcggagagaagacattatgcccataattccatggctctcccgccatctaaagcgggccgggccacaaggtgaccgcacggtgaacaatgggtgaagagctacatcagtacgcggcgcaggcaatcatggggtcgtcgtagaagccgaggatcttttcgaggtagggcttgtaggtgctgttgggcatggagaagatttcgtggcgcgattcggggaagcgcacgatgttcgcctcgccgccgccgtccttgaccagttggacgaagtgattctgcggcttattgagtacccagatgtcgcgtccggactggaagagcagcaccggcgtctccacttcggcgcaggcggacggattcagtatggcccggttgagcttcaacgcctggcgcacccattcgaacgccgcgcagtaggtctggtattcgctattctcgcaacgcagcttgaagtaccagcgttcacgcgcctcggaagcgccctcgttgccttccatcgagaactccggcgtgaagtccgactgcccgaacacacgcttcttgccgaagccgagtccgcacagcgcgccgaccagcacacgggccacgcccagcggcatgccggtggcgggggcgaccatcggggcggagagcaccgctttgtcgaacagggtggggtatcgctccaacacggccgcgccaatgccgccgcccatcgaatggcagaacaggttcagcggcatgccggccgcgtactgctggccgatggtttcggcgaagccggccagatcggccacgtagcgctgccagtcatcaatccacaccatgcagcggttgtccacgtcgcgcgcggacttgccgtggccgcgatgctcgagtacacacaccgagtagccggcaagcaggaagtaccagaccagttcgtcgtacttctcggcgaactcggtgaagccgtggctgatgacgatggccccgcggaagacggcggtggcgccttgttcgcggatcgcgtcgaatttggcggagtcgtagcacaggtagtgcagctggcccgagcggccgccggtgtccataatgccggacagcggctcgatcccggccgaacgttcggcggcggacggatcgaaccagccctcctcgcagcattgttcgagcgcgggcagcaccacgtcggtcatcgtttcggcgtacttgttttcgtcgatcatcgtcacctgcatggctcccatcttaggacaagcctcacgcccacacctcgcacccacaccacgacacattcccgggaatgcgtcgcaagcctgcgcgccactgaccgcacaggcgcgtaggttgtgaggtatgagcgaaaccaatgatgtcaatgacgcaatcaagcatttcccacgcctcagggcgcgcacgctgcggttcggctgcggcgcaccgcgctccgcacagaccgtgggcgacggctcgcgggccctgttcctgcgctccgacggccccgaggatctggtgaccgcactgtggctaagctggttcgacgagtccggcgaacaccatgagaccaagctgtccgacccgcgcgaactgttgggcgcaaccgccgacagcgaggacgtgccggccgaggagaaggcccgccgcgagcgtgcgcgcgaaggcggcaccggcatcgtcggctactccgcagacgatgacggcaatcgcatcgtgttcaccatcaacggccgcctgttcctgaccgacatcgattggaatgacgagaccggcgcacccgagccgcacacccgcgaactggccggcgaatggctcgatgaggacccggagatgtacacgccggtgctgaacccgcgcatcgccccggatggcgagcatgtgctgtacaccacgggcagctacctgatgctggtcgatatcggcggcgagctgggtgaccgcatcaccgcggtctacggcgtgagcgtggaggatgaggacggcaatccggccgaaaacacgtggaaaatcggtctggccgagttcgtggccggcgaggagatggaccgttacgacggtttctggtgggccccggattcgcagcatgtgctgttcgaatccttcgacaccgccgacgagccgacctggtacatcagcgatccggccgaccccgagaagccggccgccggccgccgttacccgcgcgcgctgacccgcaacgccgacgtgtatctgaccgtgatcgccctggcgttcgatgagaacgaccggtacgcgggcatcaccggcaacgccgatgtggattgggatcgcgaggcgtacgagtatgtggccgccgtgagctggcgtcgcggccacgatccgctggtgctggtgcagaaccgccgccagacccgcgaccaggtgctcgaggtggcggtcgcggcggatggggccgcgctgggcgccacgcgtgtgcttgaggagcacgcgaacgagcagtggatcgacttggttcacggcacgcccgcctacacgccggatgatcgtctggtgtgctcgctcaacgatatggccacggataccaaccgtctgacggtggacggccgaccgttcacgccggctggctggaacgtgcgcacggtgctcgccgtgaccgacgaggatgtgctggccgtggtgcagcgtgcgcccgaaatcgcgaccgaggtgccgcgcgcctgggccggctcgggtgccgcttcggatgccgagtctctgttcggcggccatgacgcccgcagcttcgatgtggtgagcatgggatatgacggctcggtcgcgccgatcacgaccgagcccggtcagtggacggcctcacgcggcgcacgcggcatggtggtgtctgggcgcgatatgcgttccgcccgcgcccggatgcggcacatcgtcacgcgacgcgccgtcggcggcgtcaccgatgccgtcatcgccgccaacaccagcgatgccgccaacaccaccgacatcaccgccgccgacatcaccagcaccgccgcggaacccgggttcacgccgaacgtcacgttcacgcggctgggcgagcaccggttgtacacggcgatcatcgcgccgagcccgtccagcccgtacgcccatgccgacaaactgccggtgctgatgaagccgtacggcgggcccggcttccagcaggtcgtcgcctcccagtccttctactgggagggccagtggtgggccgaccagggcttcctggtggtcacggcggacggccgtggcaccacaggccgcggcccggcctgggatcgcgcaatcttcgagaacatgaagggcgtgacgctggccgatcagatcgaagccgtcaacgcccttcccgaggccgtctccaggctcaacgccgatgggcgcaggcccggcgttcccgcaccggacctcgacaaggtgtgtatgatcggctggtcgtacggcggcttcctgtccgcactggccgtgctggacgcgccgaacgtgttcaaggccgcgtgcgccggcgccccgcccaccgactggacgctgtacgacacgcattacaccgagcgctatctgggcctcgacccggatgtctactaccgcaacggcatcgtgcaggacgcaccgaaactcgagcgcccgcttatgctgatccacggtttcgccgacgacaacgtcaccatcgcccatagcctgcgcctctcgcaagccctgatggcggcgggtcgcccgcacaccttcctgccgttgacgggcatcacccatatgaccaacgacgagaccgtagccgaaaacctgctcaccctccagcgcgacttcctgcgcgacgccctggcctgaccggccccgggcgcgccgtgggccgtgacgtccgcggcacgcccggggcccgcgcccacacggcatgcggaaaaacggcgcaggtggtgcgccgcacccatttccgccctgaatttttggatatttttggatattttgcacccatcgtcatgtgaaagaccggttttttgcctcatattcccatcaccgcgtaggatgggtgaggattagaaagggaggactatgagcgttctcgaccgttttgaaaaaagcgtggagggtgcagtcaacggagtattcgccaagtttggctccaaagacctgcagcctgtcgatctttccagcgccttggagcgcgagattgacgccgaggccatgcccgtgggccgtgaccgcacggtggccccgaatgaataccgtttcaagctcagtactcctgacttcgaccgtatcgaggcatggggtagcgagaccctggccaacgaactggccgataacctcaccgagtacgcgaagagccagcattacgccttcgtgggcccggtgatcgtgatcttcgaggaagaccttgacctgtccaagggcaacttcaacctcacctccgaatccgtgcagggcaatgccgtgccggtcaccaccgatgcgcagaccgaggacagcccggtgctcgaggtgaacggcaaccagtacctgctcaccaaagacaagacggtaatcggccgcggttccggctgcgatatcgtcatcgacgatccgggcatctcccgcaagcacctggaaatcgacatcacggataacggcgtgatcgcccgcgacctgggttcgaccaacggcacgtacgtggagggccaccaagtgcccgccgccacgctgctcgatggcaacaccatcaccatcggccgcacccgcatcctgtactgggcctccgcccaagcccaggagtagtcgagcacacgcccgaaagtcgtccacttatgaccgaactgacattcgccctgctcaagtatggattcctgatcctgctgtggatattcatctggctggccgtgcgttcgctgcgcaaggacatcgagacgttcagtccgcgaccttcgcgcgcacgccgccgccgtgagcgtgaagtgcataaggccaaggccgaaacgccacaggcagctgcgccgcgcccgcatcgccggcccagcgcttccgcgtcgtccgtcgcctcggcgcagcctaccctgttggtcatcatcgatggtccgcttgccggcagctccgtgccgctggccgaagccgacatcgcgcttggccgcgccgcctcgaacaccgtggtgctcgatgacgaattcgtgtcttcccaccatgcccgcgtctaccgtgacacgcgctccgggcagtgggccattgaagacctgaactccaccaatggcaccgtggtcaaccagcagcgcatcaaccgccccaccatcctgcccgctcgtattcctgtgcgcatcggcgccaccaccttcgaactgaggtagccgcatgccaaaatccgccgcttcacaaccgctgttcctgtattccaccacggtgtccgatgtgggcactgtgcgcgcgaacaatcaggattcctccttcgccggcgagcatctcatcgccatgtgcgacggcatgggcggtcacgccggcggcgatacggcatcctccatcgccatccggtcactggcccacatcgagcaggacgacaccggcggcaacgtcgagacgatctcccgcatgatggaaacctccgttatggccgcgcatgacgccatcgtcggcaaggccaagcgcgaacgcaagcttgccggcatgggcaccaccgttaccgcagtggcattggtggccggctactgggtcatcgcccatatcggcgattcgcgcgcctacctgctgcgcgacggacacctgagccgcatcacgtgcgaccacagctacgtgcaacacctcatcaacaccggtcgtatcaccccgtccgaagccaagaaccacccgcagcgcaacgtcgtgatgcgcgtgcttggcgactttgacattgacccgcgcccggatatttcgattcgccgagcccaccccgccgaccgttggctgctgtgctcggacggcctgtgcggtgtgctggaagattccaccatcgaagagacgatgaccacgctgtccgatcagggcgaatgcgcgcagcgtctggtgcagatggcactgcgggcaggcagcaccgataatgtcacggccgttattgcggatgccacgttggcgttggatgccgatgcgttcgatctgccgcaccaaacgccgttggtcggcggtgccgccagccgtaatcttgagccgatcgccgacatcgtcaacgagccggtggctaccgcgcccgcgctgcgtgaggatgattcccccgcccagcgcgccgcagcattgattcagcccgccagcgcgcacgagacggaggccgcgcaaaccacggccgaaccgtcgtccacacgcgtggtgcagccgtccaccgtccgcgaggagaccggtgaacgagccaatcccgataccggtgagattccggtggtgcaaaagccggatgggcgcctgtccgccgaccccaacgacccggatgtggccaaagccatccgcgatgagcagatcgagcagaagaaggccacgcgcaccaagaagcgccgcaataagcttgcggtgattattacctgcattcttgccgtgctggccttggccggcgctggctggggcgtgtacacgtggagccagacgcactactacgtgggagatagcaacggcaccgtggccatttatcgtggcgtgccgaccaatctctttggacttgagctttcgcacgaagtgcagaccaccaatatcgccaccgcggacctgcctcagacatggcgtgaccagctgagccaaggcatcacagtcggttcgttggacgaagcgcagtcgcatgtgggtatcatccgcaccgaaatgcgcaaactggccaagcagcaggaagccgacgccgccaagaaggccgaggcgtccaattccctggacagttccaaagacagttcccagagcgattccaaggacagcaccaaggattcgtccagccagtccggttcgtcaagctcatctgattcctcggataaatccggtatcggagcggccgacaacgcggccacgggggattctcaatgatcgctacccgtctacgtcagatttccttgttgctgattgccatggcaatcagcgcgttggcgttcatccagatgttccagcgcaccgccggcgaattccctatgcaatacgccggcatgctggcattggtcgtagtgctgtttctggtgctgtgggggctgattgtgcgcttccagccgtacgccagccagtcgattctgccttgcgtgctactgctgaccgccaccggcgtgaccatgatcgcccgcatcgaccagagcgaaggttgggaggtggcccaacgccagctggtgtggctgtgcatcgccatcgtgctttccgcgctgctcatcatcttcctgaaggactaccgcgtgctacgacgcttctcctatgtgtcgatggtggtgggcctggtgctgctgctcgccccgatgctgccgttcatcggcatggaggtgaacggcgcgcgcatctggatcaggattccgggattgggccagttccagccgggcgagttcgccaaactgttcctcgcgttcttcttcgctgcctacctgttcgatcatcgcgaccagctggccgtgggcggtaagaagatgctcggtctgcagctgccgcgtatcaaggatctcggcccgatcatcgtggtgtggatcgcctcgatgggcgtgctcgtcatgcagcatgatctgggcacctcgcttatgttcttcgccatgttcgtggtcatgctgtacacggccaccggccgtacaagctggatcatcatcggtctgatcgcgttcgccgcgggtgccgtgctggccgcaggcatgttcagccacgtgggtcagcgcatcgacgcctggctgcacccgttcagcaacgagcaatacaacaagacccccggcggctcctggcagctggtcaccggcattttcggcctggcatcaggcggcatgctcggcaccggtctcggccaaggccatccttcgctcgttacgttcgcgaactccgatttcatctacgcctctctaggcgaggaactcgggttgatgggcgtcctggccattctgatgctctacctgctcatcattgcctccggcttcatcaccgccatgaaaatcaaggatggcttcggcaagctgctcgcttccggactggtgttcaccatggccttccaggtgttcaccgtggtcggcggcatcacgctggtgattcctctgaccggtctgaccctgccctatatggcggccggcggctccagtctgatcgccaactatattctcgcgaccctgctcatcatcatctcgaactcggccaatgcgcccgagccggagctgacctcggatacgttccagtacgaggctttggccgtgctgcgcaacaaggaacttgaggcccgagcccacgccactgagccgatcgttcagcctcgcagcgcgtcggctacggcgtcgcagtccgaggcggaatcgtttgacgaccccattgtggacatcaccaagcacgcgccagacacacttgaggcacccgaagtgcccgcaattgtgacctctgcgggctctgctgcggcccccatcgccgagcccattgtggatgccaccactccggcgtatgccggcgccgatgaaccgtacacgcctaccggtacgattcccccgcttcctcccgttaacggaggcactcgcgtatgaacaaatatcttcgtcagcttttcaccgccgtggtcgcgctgttcgtgattctcggcctgtcgtccaccatcatcatggcggtacgggccaacgcgctgaacaacgatccgcgcaacgcccgttcgctgtaccaccagctcggtgcctaccgcggtgccattctggcctcggacggcacggtcatggccaaatccgaaccggtcaacgacgcgttcaaatacctgcgcacctattccaacggtccgctgtatgctccggtcaccggcttcttctccatcaaccagaccgccgatcgcggcctggaagcctcccgcagcatgctgctcaacggtgaggccgattcattgatctggcagcgggccaaggccatgctcaccggcactacgaatcagggcgcgtccatcgaaacctccatcgaccccaagctgcagcaggttgcctacgatcagctcggtacgcgcgatggtgcggcggtggccatcgaagtcaacaccggccgtatcctcgccatggtgagcacgcccagctacgatccgaacaaactggcgacccatgacgccaaagccgcgtctcaggcctacaacgaactctctgcgggccaaaatagcccgctaatcaaccgcgccacctcgcagctgtacccgccagggtccacgttcaagaccatcgtcgcctcggctgcgctggaaaccggcgattatcagacggacacgaagattcctgcaggctccagctataccttgccgggaaccgccacacagctgccgaacgccgaggcacaggccgatggcgtcaacggacagatctccctgcaagaggccgtcgcatggtcgtccaacaccgctttcgcccagcttggcgtgaaactcggcgcgagcaaggtttcggacatggccaccaagctcgggttcggcagcaccatcaccattgacggcaccgaatccacgggcaccccgatgacggccaccgcgtccacattcccctctgatccgaccgacgacaagcttgcgctggcatccatcggccaaggcgacaccacggccacgccgttgcagatggcgatggtcgcgcaggcaatcgccaacaatggcaaactgatgcagcccacgctggtcgatcgtgtgcgcgccgccgatctcaccgtactttcgcagaccaaaccgcaaaccatggccaacgcgttcagcaaggattccgcagacaagctcaccacgatgatggagagcgtggtgaccgaggccaatccgcagctggccatcgacggcatcaaggtggcggccaaaaccggtaccgcacaaatcggtaccgacaactctgccatcgacggctgggtgatcggtttcgcgccggcggacaatccgcaaatcgccgtcgcggtgttggtgcataacacagatgtatacggttcgctcgccgctggcccgatcatgcgcgcgatgatgcaggaggctttgcagcagtgaaacttatcgaaggacagcttattcaccgccgatatcgtcttgattcgcgtcttgcgcaaggcggtatgggcgaggtctggaaaggctacgatattcagctcggccgtgaagtggccatcaaggcgctgcgctcggacgtgaccaacgccgaggccaagctgcgccgcctgcgtgccgaagcccataattccgccaatctggcgcacccgaacatcgctgcgttgttcgaatactacgagcatgacggcatcggctttctgattatggaatacgtcccctcgaaatcgttggcggatctgttccatagcaagggcgcgatggatcccatcgaactgctgcccattctgattcagaccgcgcgaggcctattcgtggcccactcgcacggcgtgattcatcgtgacgtcaagccggccaacatcatggtttccgacaccggcgaagtgaagatcaccgatttcggcgtgagctactccaccggccaaggccagatcacccaggacggcatggtggtgggcaccgcacaatacatctcccccgagcaggcgcagggccagcaggccacgccgcaatcggacatctattcactgggcgtagtggcgtacgagggccttgccgggcatcgtccgttcaccggcaccactccggtcgatatcgccgcagcgcacgtgaacaatcccgtgcctccgctgccgaactcggtggacgtccagttacgcgaatttgtcatgtcgatgctggccaaggacccgttggatcgcccgaaagacgcgctggtggtgtcccgtacgctggcacgcatcgaacgccgtctgctggatcagcagaccgaaatggccgacaccaccatggccacgtccggcaatcgactgccgcgccgagtgaccagcacgccacgcattgttttggaggccccggcctcaagattgggagggaataagcaatgagcaccagtatgcccaccgcattggccggcggacgctaccagcttggccagctcatcggtcgtggcggcatggccgaggtccacgtggctcttgacacccgtctgggccgtaccgtggccgtgaaaatcatgcgcgccgatctggccaacgacgacatcttcctggcccgtttccgccgcgaagcacacgccgtggcccagatgaacaacccgaacatcgtgaacatctacgattcgggcgaagaactggtttcttccgaaagcggcgataccgagcgtttgccgtacatcgtcatggaatacgtcaagggccagaccctgcgcgacatcatcaaggtcaacggcgcactcagccagcgcgacggcgaacaggtgatgttgggcgtgcttaacgcgctcgactattcgcatcgcatgggcattatccaccgcgatatcaagcccggcaacatcatgatttccgagcagggcgcggtcaaggtcatggacttcggcatcgcccgcgctctggacgattccgcaaccaccatgacccagtcgcagggcgtggtgggcaccgcacagtacctttctcccgagcaggcgcgcggcgagaccgtcgacatgcgttccgacctgtattccgccggctgcgtgctctacgagatgcttaccgggcgcccgccgtttaccggcgattccgctgtggccatcgcctaccagcatgtctccgaagtcgccacgccgccatccgccgtggtgccggggctgccgaagatgtgggattcaatctgcgccaaggccatggccaaggaccgccagaaccgctacgccacggcctccgaattcaagaccgacatcctgacctacatgaacggcggcgtgccggtggcggccgcgttcaacccattgacggacctgtcgaatatgaaggcccgcaaggaagccgaacgtgatttgcccaccacgccggtggaaccgcagcagcagcccacccaggcattcaacccggtgaccggtcagttcgagcagattccaccggccaatggtgccaactcagcggcgttgcagtcccgtgcgcagcagcgtgcggcggcggccaaggccaagaagcgcaagaagatcatcatcggttcggcgatcgcggcgattgtcgcggtgctcgtcattgtgggcatcatgttcgccatgaacggctccggcaacaagtcctctgaagacaccgtcaccatccctgaagtgtgcaacgcttccacgtccaaggacaacatcaagctcaagcttgagagattgggcttgaagatgaccgaaaagcaagacaccgactccaccgagccggaaggcacctgcaccaagatgagcccggacgccggctccaaggtggccaggggatctgccgtgaaggtgtggttctccgcaggcccgcagtccactcaggttccggatgtcaaggagcgcagccaggaagaggcgcgcagcattctggaaagcgccgggttcaaggtgaacgccaccgtcaaaaccgaagacagcgccgacatcgccaaggatatggtgacgagaaccgatcctgccgccggtcagtcggttcccaagggcaccaccatcaccatatatgtttcttccggcatgaccaccgtaccgagcaatttggtcggtcagtcgaaggacagcgtgctacagcagtatgagggcaagttcagcttcaccgtggagcaggaaagctccgatacggtggaggccggtctgattacccgcgtaagccccgattcgggctcttccatcgcgcagggcgggtccatcaccatctgggtgtccacgggcaaggaaaaggtcgctgtaccgaatatcaccgctggcactgactacgccaccgccgaactcatgctcaaggccgtgggcctcaaggctcaggccagtggcccaaccgacagcaccgctgtggtagtcagcatcaatcctggcgctggcagccaagtagatgcgggatcgaccgtcaccattaccacgaaggccggcagcaccggaggcgacaccggtaccggagacggtggcaacggcaacggtgccaacaacggcaacggggggcggaacccgtgagtgagtgagcgccgggcgtgtgtgttgcgcatacgcaacgcacatagcgcaacacatgcgcaacacatgcgcaacgtaaacacgcaacgcaatcacacaacgcaaaggggaggggcttctgcacccctcccctttgctgtataaagagctatcccagcgcaacattcccgggaaagcgtcgccgcgcgcggaaaagctacttcgtaaccttgggctgaaggccggcggacttggccacggcgttgtcttggccgcagaccttaagccagttggccagcagacggtagccgtcctgggtcatcacggattcgggatggaattgcacggcgtacatcggcttgcccttgaccttgatgccctgaataatgtggtcgccctgcgtccacgcggtaaccaccagcgtatccggcaccgaatcgggctcgacggccaacgaatggtagcgggtggcggtcatggggttggccacgccctcgaaaatctcgtcatcgatatgttccaccaagctggtcttgccatgcatgatggtgggcgcatggcccacagtgcagccatacacctcggcgagcgcctgcaagcccaggcacacaccaaacatcggcacgccgctggccgcgcacaggcgaatcatatcctcactggcaccggattcggccggagcgccagggccgggagaaatcagcacgccatcgtaaccgtccagtacacccggcgcggctgggtcgatagcgtcgttacgcaccacatcaacagtggcgccaagggtttgcagatagcctacgatcgtgtagacgaaggaatcgtagttatccaccaccaaaatatgcgcggaatcggtcatagggctctccttgagggacgtgtactgcaagacatagtactaggctgccgtcagctcactgccacgaagttcgacatctgctgtaggaatgggatattggcggcggcccaagggaatccccactggaacagcgccgcggcggctgcgaacaacagcagagccagcagcagccatcgaatcggtgccacgccgggctgcagacgcaacagtccgccatagatgctggcatccgggcggcgacgctcacccgcgcgaatctcgcgcagcaccggccagcgccatgccaccgcagcggcgatgaacagaaccagccacactaccagcgcgccgaataccaccttgtccagcgagccaatgcgggaagcgatcgagggggtttcggtggtggagaacttcactgcaccggacgaatcagtagtagccagctctttgggcacgccatcagacactttggcccagtacgccaactcaccatagctgatccatcgatgggtgggggtggagtatttcggctcacaggtggtcagtgtgatcatgcgtttggtgggattggcagtggagtcttccggattgggcgcgatcacatacacgtccgtgggcagcacaatctcgtaccgggtgtagtggtagacgtaccagtaatccttggtacgaacgatgatgggatcgccttcctgcaacttgtccacatcgcccaacggctgcccgtagccgttgcggtggccggcgacggcgaagttgccgacctgccccggcatctgggtggtgtcgtaatggcccagaccgtggcgattgagctgctcgagcgtggtgccttccacgatgttgcgatgccattgggagccgaagcgcggaatgtagatctgcgcaatcaagtcgccatatttcgcgtctttcggctgtactggagcatcgccctcctgggctttggcgatggtgaccgttcccccgttgttgctggggtcgctccagtcgacggactgggtggtttcgttctgggctcgctccgcctcgacaccggtccaccacatctgccagacgatgtacagggcgcaaatcacggcagcggtaatcagcagttcggcgcagatgccgagtgcctgccagatcaagctccgctggggcgaagacgcgccgcgtactgcggcacgacgggaccttgccctgctggcattggccgggtctgccgccattcgtgcggcgtcgtcctcggggaagggctgtacgtccgacacggacgcgagatcaatgggcgccggtgcgccgctgttgtgcctgccgtgtctcattgctgagtctgctcctcatctgtggtctttgacgtatcgaccgtggcatatttcaactgctgcagcaaggcggcggtagcggggaactgaaggccctcggcattctccaccttgtagccaatgccaaacgcggtcacatattgcttaagaatggtaatggcttcggagtcgttcaacgctgcgcgaagtctttgcgggtcaccaatcgcggaaatggtgaatggcggcgagtatttcttaccgtgcaacgacagcacgttgccggaacagatgaccgccgaattgaacagcacccgctgatccataatcatcagcgcatcggcaccgccggcccacaaggcattcaccaccgattcgacgtcctgctgatgaatcacgtaatcgttgatattggcggtcgtgccattgttgttgacggcgttctcccataacggagaatcatccagcgttaccgttacgccgctgccgctgagcgcgggcagcatcaggctggaatccacattgctggagtccttgccttggttctgcgtgctgtcagtaccgtcggtgccatcggccttgagcgcgtccgtaagattggcgacctgttcggtcagatcgctgacgtcctgctgcagctggttggcctcgtccacgccttgctccaccagatcggccgtatcgttggtggcggcaaccgtacgattgaccctcacgttggtgctcagcagaaaaccggtcaaggcaatgacgacgaataccgcgacaccaccccatagggagtgccgtgcgccgtgcttacctacatgtctggccatgaatttcctgtcttcttgccgactctggtcgccgctttcgagtgtagccactattatgacttttagcctattgaatggagactatgctgatggctgacgaagagctgcacgagaccgactcgaacaaccagaaggactggcagagcgagacctcatccagcaccgctgctgacgagaccgccaacaaagacaccgagcagaacgcagagaacgcttctgctgaggaagacgcggcttacggcgtgaatatggagcaggtgcaggccgtgctcaacgccactgccgataaggccacgctgaccccgcagatgcagcgcatgatgaaccgtcaggcggagaacaccaagcgtgttgaagaaaccattaagggcaccaagtcgaacccgcgttggttcgtgccgctgttctgcgcgtttatgatcatcggcctgatttggtgtgtggtgtactacctctccccgtccggctcctggccgattccgaacatcggcgcgtggaacctgggcatcggcttcgccctgatcatgatcggattcctgatgacgatgggatggcgctgagttccgactcgttgcgcttatctatcggtagatcgttttttctatcgttaggttgttcttagttcttatgcgaaaggccgacctcccgtatgcggaggccggcctttttcgtgccttcacctgttcatccacagctatccaccacttatccacgacttatccacgacttatccactacgttatccacagcctgtggatgaatcacacccatgtagttttccaccgaatgtggaaaaccatgtggataagtggtggataagcggcgtttctcggtgtatatctcgtgcataactttggcttggcatacatcgccacagcgagggaacagttatacacccgagttatccactgcaacaaacccagtaataccgcggcattcctaacttatccacataagttatccacagtcttatgcacttttctacacacttgtgcacaagtcaccattgtggataactcgtcattgcgcgcatctcattactgtggatatcttcattactgtggataccttcatacagcgcatgcccactcaccgaatgacgatatccacatcgctaatatccacatcgccgctttccgtacatacactgatgccgggcactgcatgttccgcaatacccggcatcaatcgttttttacagccgtatcaagccatatcagtgcagggagccgaaactcatccacccgtaaggattggccatattgcataacagaatcaacacaacgaccagcaccaccatggcccagccgtaaacctgcatacgccatttcaggcttttacctcgccacgccggcacaccacccaccagcagccatgtgagtattccacccactacaaagccgccgacatgcgcctgccacgccacgcccccgaccacgaacggcaaggcgaagttcaccgccatccagatcaacatggagcggatatcggcgccgatacggcgatataccaccagcaatgatgcaaacaggccaaataaggctccagaagccccataggctgccatctgccagccgatgcctcccggagccaccgcagcccacaccataagtcccagagagccgccaaggccggaaatcacatacagtcccaagaaccgccagtggccgatcattcgttccagcactgggcccacggaatacagggcgatcatgttgaacaggatatgcaatagcgagttcggcgcatgcaggaacatcgaggtgatgagcgtccacggctcagccaccagtctgaccggagccgccatgccgaggtacatcaaccaagccctcaggcccggggcaataaatcccagcaatacctccagtagccacactgccacgcacgcaccaatcagcgcccaggtcatcaccggaccaccgcgctcccactggtatcgaatctcccgctgtgtaggaatatgcatgcagtccactgtatcgaaggtctcggatgcgttccacgcgccgcgaagatgctgagccggccgagggcatgcgggcgtggatgaatcgcccacgaatgtcattccacccaatcgtcacaaacagcggcctagaatagggagcagagtcggtctgaatgggcataccgaccagacgatccctagggaaaggagccgtcatggagaacaagtcttctaacggttggaagttcttcgcgctgctgttcggcggattgctcgccgcgcttgttggcttgtacatctacaagcagcagaacccagattacgatccgtgggaggagccgtgggagaacagctcctcgccggtcgacctgggtctgaacaaggccgaggatgaggccgatggcgaggcggaagccgccccggccgaagcctgatagggcggtctttcaacgcaagaagccccgcaaccgatggatgtcggttgcggggcttcttatgttctggttcccctctccgaggggagccgccccaccgactcagtcagccagaggagcagtgtgccagatatgcggagccgttaagcgggaagcccggcgggcttcccgtaggcgacgccgagcggcgacagccgcgaggtagaaaccagcacgtagccggcgcgctgctccggcggccgtcaggccagaggagcagtgtgccagatacgttccaaatagtcttccatggagcggtcggagctgaagtagccggagttggccacgttgagcagggccttgcggttccattcgagctc

SEQ ID NO: 3639 - DNA, 6832 bp, Unknown
  R85_18m  MAG No. k141_37636
attagcgggagggcgcgaaacagtgcgcagagaacggttctcaataacaactgtgcgctggtttcggtgcgccaatcgcacatgtttgccgataaaatggcgtgattccagcgtttcagtcgatgtgcgtttgtttgattatgtgcgttggggcgcacagttgttattgagaaccgttctctgcgcactgagccaaggggaggggtgctacttgaatgggcaactatgagtgttgagacgccggatatggacgagttgctgcggctggtgcccactgtgggctatggggatgacgccccggccgatcggcgtgggggagcgctgcacctgtccgccgtgctgcccgccttgtccgccgcgattgggcatccgactcccaccaaggtccacgccgatcccaaggcctgccagcgcgcgttgggactgcccgacgccgaatcggccatcgtggtgctcgtggacggcctgggcttctggaacctcgccatgcgcctcggccacgcgccctatctgcgttcgctgatgaacgaacgcgccaatcagcgtcccatcgccacctgcgctccaagcaccactgtggcggccatggccgcattcggtaccggaacctgcccgggactgaccgcaatggcgggctatacgcagctcgaacccgccagccataagctcatccaactcatccagttcaaagacgcgctggcacccaaaccagccaatccgcacattcctgtgccacccatggtcgatccgctcgaccagcagcgcgaggagacggtgttcgagaaacttgcggctcaagaggtgcgcgtcacaagctcggggttgcccaagttctccaaatcgccattgaccgaagccgcattgcgaggcaccgactatcaaggcaacgtcaccccacgcgatcgtgtgctggccgcctcacgtgcctcccgtacccccggcctgacctacctgtacatccgtgacgccgacaaagtcggccacaattacgggtgggattccgaacactgggtggccgcattcgaacatatcgacgcccagctcgcgctcctgaaacgcagcgcacccaaaggcacgctgatcgtcatcgtggccgaccacggcatggtgcaaaccgacatgggccagcggattgacatcgccgttgaaccgcagctcacccgaggcgtgtcactggtcgggggagagcctcgctcgctgatgctgtatgccgagccggatgaacgacctgaggatatagcttgccgatggcgcgattacctgcaagaccgagccttggtgcggaccagggatgaggccatcgcggacggattgtttggaccggtctgcgagcgagtccggccgatgctcggcgatgtggtcgtgcaggcagcgggagccgtgaccctcgtcgattcgcgtacgcaaggagacaaagccacccacctgccgagcgtgcatggctcccaaacggcattggaaatggatattccctgcctgatcgatatggcctgattcggaaattcagtctccgaacagaatctcgtcccagcttggtacggccgaacgtcctgatttacgcttggccggtttggctggtgcctcgtgtttggtggcggcggattcggccgcccgctcctgctcggtggctaccagctgtgcattggggccacgccgtacggtctcgtccgaaatattgtcagaaccctgctctggtgccgtggcaggcgattgctgcaatcctgcggcagatgacgaaacaggtccggcggtctgcgaagagaccgggctgggggccgtagcgtcatgagcctggttcgtggccggtgagatggacgtggataggtccaccgggggcatggaacctgtggaagtgacggagggccggatcgcggcaggccgtgcggccggaatcgaaggcgtaggcgccgcccaagcagacacggcgcgctcgatacgcgcggaacgtacggagtcgccgggcagttcaggaatcgtcggcttgagtttggaatccgtggctgattccggattctgttcgccgagcagttttcgagcggcattgttcaggctcatcacggaattgtcgtgcatattccacgtccattcggcatggatctcacggcccgcggaagtgaatatcgccacgatgcgccaaggctcaagtccgcgccgggtggatttccaggtcactgattccatgccgattccagcagaggccagcgtgcgttccaccagttcgctgatggtgcgcaccctgctgtctttgggtgccgccacggcaaggaattgttcgatggcgtactgtttctcggtctccacggccatggagaaacgacgtaccagcgtttcgctcagatgatatttctccgcgacacgggccggatcggcgccggcgcgaatcagcgactgtatctgggaaatcggcaaagtggactgctgatgcggctggggggcctgtcgcgtctcgcttctgacctgcttggcctcaagaatcgcccgttcgagcgtgtcgtccacgctcacggccatttccctgccgccaatggagaatacgaggtcccccgtcttgctcacgcgtacgaaacgggctttttcaagccgatcatctggcatattcgcaccactttccgtcgcaaagacattacttcttttaagtatgccccacgtgtcgaactttacgagtatttcaaatcgtgtatcctatgggcgagtacggcgctgaccgtgctatatatatcgacttacgaaccaaagacgacgaaaggaccatgatggctcaggattatgattccccccgcaataaggatgaggacgaggaatcgctgcaggcgctggggaagtcctcgcagaacgcctcgagcgacatcgacgacgatgagaacgccatcgccgaagactacgaactgccgggcgccgatttgagcaacgaggattcctcggtgaccgtcatccccatgcagggtgacgagttcatctgctcgcagtgcttcctggtcaagcatcgcagccagctcgcctacacggacgaggatggccagccggtgtgtgaggagtgcgccgcctgatggcgttcgacgagacctacaacgagcccgaatccaccgaggtcttggtcaagagcctcgaccccgaacatccggcccagctgcactatgcccacgcgggcgatgccggtgccgacctcatcaccaccgtcgatgtgacgctgaagccttttgaacgggtactggtgcccaccggcgtggccatcgccctacctgcgggctacgtggcgttggtgcatccgcgttccgggctggccgccaagcagggcgtcaccgtgctcaacgcgcctggcaccgttgatgccggctaccgtggcgagatcaaggtgccgctgatcaacctcgatccgaagcacaccgccgtcttccatccgggcgatcgcatcgctcaattggtgattcagcggtatgttgaggcccggttcatcccggccgaaaccctgcccggatccgatcgcgccgaacgtgggttcggttcgacgggagtggcgtcctgaccggattgggccggttgaatgaccaaggtgatgacggcaacgacggttgcggaaccaatgatggcgaacaggtgcatgcataaggctccggttcgcggttacaatgaacttcatgacgagggaggtgactggcatggcagagattgatggcgagcagtacgccgcccgtaagttgggttgtgagatcagtgccgatccgctcaatccgctggatccaatcaagaaagtgtgcaagtcccaccatcccggtgaggatttgtccatcctcgaccgcgcgtaccggcgcgccgtcatccagcattgcacgcaacggcgcaagtcgggcgaaccatacatcatccatccgttggccgtttcccagattctcgcggatctgggcatggggccgattgtggtggcggccggtctgctgcatgatacggtggaggacaccgactacacgttggatcaatgccgtgccgagttcggcgacaccgtggccggtctggtcgatggcgtcaccaagctcagccagcttgaagtgggtgattccgcccaagccgaaaccattcgcaaactcgtggtggccatgagccgcgacgtgcgcaccttggtggtcaagctcgccgaccgtgtacacaacgcccgcacctggcgctatgtgaagaccacgtccgcccagaagaaggcgcgtgaaaccctcgacgtgtacgcgcctttggccaaccgactcggtatgaacgccatcaagacggagctcgaggaactgagcttcaaggtgctctacccgaagatctacaacgagatcgtggtgctggtggctcgccgagccggccagcgcgatgtgtacctgaagcagattctggcggagatcaacgaggatctcgacgagcagaacatcaaggcatacgtcaccggacgcccgaaggactacttctcgatttatcagaagatgatcgtgcgcggccatgatttcgcgaacatctacgatttggtcggtgtgcgcatcatcgtcgacaccattcaggattgctatgcggcgcttggtgccgtgcatgcgcggtggaacccggttcccggccggttcaaggactacatcgccatgccgaagctcaacatgtaccagtcgctgcacaccacggtggtgggccccggtggcaagccggtggaaatccagattcgcacctgggacatgcaccgccgcgccgagttcggcatcgccgcgcactggaaatacaaggaaaacggccaggccggccgcgccctgagctcgccggacaagtccgaccgcaggcgtgacgagaagaaccaggagctttccgaagccgacaatctcaaatggattcagcagcttgctgattggaccagcgaaaccccagattccaacgaattcctcggttccctgaaggaagacctcggctcgtccgaagtctatgtcttcacgccgaagggcaagatcgtctctttgccggcccatgccacaccggtcgatttcgcctatgccgtgcataccgaagtgggccaccgtacgatgggcgcgcgcgtcaacgggcgtttggtgccgctcgacaccacgctcgacaacggcgacaccgtggagatcctgacttccaagtccgataccgccggtccttcgcgcgactggctgagcttcgtcaagagcccgaaggcacgaaacaagatccgccagtggttctcgaaggaacgtcgtaccgaggctattgaggaaggccgcgacgaactgacccgcgctatgcgcaaacgtaacttgccggtcaatgcgctgctgaccaccgaggcattgatcggtgtggccgacgacctcaatttcccgaacgccgacgctgtgttcgccgccatcggtgatgggcagatctccacgcagaacgtcatctcgcatctggtcaaggatgccggggccgacgaggtcgatgaggaggtcgagcaggaggctctgccgctcaagcccgtggagcgcaagacttccagcagctccaccggggtatccgtcaagggcgtgggcgatgtgtggatcaagctggcccgttgctgcatgccggtgcccggtgacaatatcatcggcttcatcacccgtaatcagggcgtatccgtgcaccgcaccgactgccagaacatgatcgatctgaaaaacaagcagcctgagcgtgtggtcgaagtcgaatggaccagcaccaagggcctgttcatggtcaagattcaggtcgaggcgctggatcgacgaaacctgctttcggacgtgacacgtgtgctttccgaccatggcgtgaacatcatttccggtacgatcgccaccggttccgatcgcgtggccaccagccagttcagcttcgaaatggccgatccgcagcatctcaactcgttgctggcagccgtgcgcaagattgatggcgtgttcgacgtgtaccgcatcaccggtgccaaggaatccgccgaacctcgactgcgcaagatgaagtaggccgttgcttggctcccctccgggaggggctgtcagcgaagctgactgaggggagcagcgcgggcttgcggaactcccctcagacgtctgcggcgccagctcccctcagagagggagccaagaatacgaaaaggtcctgactggaataccaatcaggacctttgctgtatatgtgtcggtcttactcggccacgttcacggacagaattacggccggctcgagcgggcgatccatcggatcggtgtccagtgcttcgagcttatcgacgaccttcttggagtcgtcatcggcgacctcgccgaagatggtgtggtgaccgtccagccacggggtcggcacggtggtgatgaagaactgggagccgttggtgccatggaccttgccgtccatgccgcgacgcagaccggcgttggccatagccagcaggtatggcttgtcgaacttcaggctcgggtcgatctcatcgtcgaactcgtagccagggccgccggtaccggtgcccagcgggcaaccgccctgaatcatgaactgcttgatgatacggtggaaggtcaggccgttgtagaacttgccatgggaaggctggccggtgtacgggtccgcccattccttctcgccggtggcgaggcccaggaagttggccacggtgttcggggccttgtcgtcgaacaggttgatggtgatgtcgccctcggaggtgcgcatgatgatggtagtcatggctccaagtgtctcatgggcttgagaccggggaagagacgtgattgcgggaatggcgcggagagctgggaatgggcgtgggcaatagccgggacaacatgccgcagcgtgaagcgtcatacgagttgtc

SEQ ID NO: 3640 - DNA, 14435 bp, Unknown
  R85_18m  MAG No. k141_37661
cgccaagtgcttgaagaggccggcgcgcgcggcaaggaagtcaagttcctcgtgcagggcaccctctaccccgacgtcgtcgaatccggcggcggcgacggcgcggccaacatcaagtcccaccacaacgtcggcggcctgcccaaggacatcaagttccagctcatcgaaccgctgcgcactctgttcaaggatgaggtgcgcgccatcggcaccgagctcggtctgcccgacgaaatcgtctggcgtcagcctttcccgggcccgggtctgggcatccgcatcatcggcgagatcaccaaggagcgcctcgacctgctgcgcgaggccgacgccatcgcccgcgaggagctctccaaggccggtctcgaccgtgacatctggcagtgcccggtcgtgctgctcgccgacgttcactcggtgggcgtccagggcgacgagcgcacctacggctcccccatcgtgctgcgtccggtgagctcggaggacgccatgaccgccgactggtcccgtgtcccctacgatgtgctcgccacgatctccacgcgcatcaccaacgagtgccgccagatcaaccgcgtcgtcctcgattgcacgagcaagcctccggccacaattgaatgggagtaattgctctctgtgacgaatgggattctccatcggggaatccctttttgttgccgacgatgcccggtataatttttccgcttacgacgtcgtccggaaagggatgccgacctctttgcgccagggattcgacaacgaaaaatacatcgaactgcaagccgccaacatctcaacagcgtgaaccgacgcttgcactcggatgaaacgctgattgcattgtcaatcaccagcgccaccagtcctgtggccgctcgcgtcatcgacgggctcaaacagttgcagggctgcgacgcctttttctccgttatcatctcatccacggacgaggcgttgtatcgcaaactcggcatcaacgtgtgctgcgaaccgaagtacgaacgggtgagtctgtatcaccggtaaacgccaccggtaagcgcggtatgccgcgaatcgtcaagccggtaatcatgcagcatgcggcctgacgattcgctgctgtcgcattgtctctcccctcgaccatgctgggcttgttttccgtttgttggagagaacgggggatgccatcagcactacggtgagagaaggattatccgtgaatcggttcgtgggtctagacggtattaaaggactggcgctgatagccattgtgctgtaccactgcatgcagcaactgctgccaggcggattctacggagtcgacgtgttcttcaccgtctctggattcctgattgccgtcagtttgattcgttctctggcgaaaaccggatcgctgaatctcgtgcgatatatccccaagcgtgcagtacgtctctatccggcgctgtttctgctgattccggtcaccgtctccgtcggctggctgctcgatcacgacattctggtttccatccgcgatcaggtcatcaccgtgctgctgggctgctacaactggtacgccattgccggaggccaaagctatttcgaccaaatgaacccgcaggtgtttcgccatctgtggttcattggcgtgctcatgcagttctacgtcatcgtgccgttcatcgtctggctgatgtggaagctccgccagacgaaactgccctcactcatcccactgggactcgcggcgttcagcagtatcgccatgtgggtgatgtacgtgcccaagggcgaccccacccgcgtctacttcggtactgatacccacagcatgggcctgatgctgggtgtggctctcgcctggtgggtcaccgctcctcagttgggccacgctcgtcagggagctgtgccgatgccccgcaccattagatcgagcgcttcggccgccacgtaccgggctccgttacctcagattcctgtaaagcatcgcatctggaatgcgacggcaccggtattggcattcctcagcctgattgccttggtcaccatgacggttatcggcaaacaggatgcattcgccttccgcggcggcatcatattgtccagcctgttgtccgtgctgctgattgccggtaccatctccgacgattcctggatgcaaagcctcatggtgttcaagccattggccgccctcggcaagtattcgtacggcatttacctgtggcactggccgttgtggattctttccagcgcccttgccccgaagatcttcaaggcagcagggccttggcctctcatcatgaccgcgttgctcaccgccattgcggtgatgatttcctggctgatggtggagaaaccggcggcaatgcactcggtgatatccgtcgtggtgccccttcgcacgaacaagaagaatcatgcggcccgggttattgccgttgacgttatcctggcgctgtcgttggtcggctgcgcgcagggcattactcatgcacctgcgaaaaccgccatgcagatccagctggagcaacaggccgcacaactggaacgcatacagaaaaccgaacacgtgctgctgcgccatgccgtgccggcaccgcccaagcccaagcatgagatgcccaccggcgatcagattaccgccataggcgattcggtgatgctggcctcatcacagggcctttcggaagtcttccccggcattcagaccgacgcgagcgtttcccgctccatcatggtcgcccccgaactcatcggcaatgatctgtccgccggcagtctgcggcaatgggtgctgatcggccttggcaccaattcggcaatcacccctgatcagctggaccagattcgtaatatgatcggccccgaccgcgtgctggtactggtcaatgcccacggagaccgtacgtggattccacctaccaaccaggtgcttgccgactatgcggccgcacatccggacaatgtggtgctggtggattggaatgccacagccaacgcgaacgcgcaggtgctcggctccgacggcatccacccgagcatggatagcgatatctatgcaaaggcggtcaaacaggccatcgaacaatggatcgcaagcggcaggtgaacggcaggcaacgctgagttgtccaaccggtcgtgaagaacggctatgctgaagactgcatcaacgagaccacacgttgggagacatggtgagcgcaatccttgaagggaagcccgataagaatcttattctcgttacgggaaggattcatccgaaattggctgaggatgtcgccgagcagctcggcatcgacgtccttgaaaccaccgcatacgatttcgccaacggcgagatgtacgtgcgctacaccgaatcggtgcgtggcgccgatgtgttcgtgctgcaaagccactacaaacccatcaacaaggcgatcatggagcagctcatcatgatcgacgcattgaagcgcgcctcggcccgttccattactgcggtctgcccgttgctcggctactcccgtcaggacaagaagcaccgcggccgcgagcccatctcctgccgtctggtgttcgacctgctgaagaccgccggtgccgaccgcatcatgtcggtcgatctgcatgccgcgcagtcccaaggcttcttcgacggcccggtcgatcatctggtggccatgccggtgctggtcgactacatccgtgatcgtttccaaggccatctcgacaacgtcgccgtcgtctcccccgacgccggccgcattcgcgtggccgagcagtgggcgcagcgtctcggcggcggtccgctcgctttcgtgcacaagactcgcgacatcacccgcccgaaccaggcggtcgccaaccgtgtggtcggcgacgtcgccggcaaggactgcgtgcttgtcgatgacctgatcgacaccgccggtaccatcgcgggcgcatgccacgtgctgcaggacgcgggagccaagtcggtgaccgtggtcgccacgcatggcgtgctctccggcccggccatcgagcggctcaagaactgcggtgcgcgcgaggtcgtgctgaccgacaccgtgccgattcccgaggaaaagcgctgggatggcttgaccgtcctgtcgatcgccccgctgctggccagcgccatccgcgccgtattcgaggacggctcggtcgccgaactgttcgacacctaccccgagcaccacggtcaaggcttcctgttcgcctgatcacgtgcgtgtttgttcaaggaaagcacatgatgcgagacgcgacatggcgtagtctttcggtaaataccgacagtatggtataaatgaacacttgtgggccgaaagcccacgactcccccatggtgtaatggcagcacacgggtctttggaaccctttgtcttggttcgagtccaggtgggggaacggctgacggccgctcgacatccgggcggccgtctattgttttgaggtgtttccaccctcaatagacattccgatcgaagggaatacgtcagttatggcattatccgcagccatcgtcctcgccgccggcgagggtacccgcatgcgttccaacaagccgaaggtgctgcatacttttgcaggcaagaccttcctgaacagggtcatggattcggtgaccgccctgaaccccgacacgctggccgtggtcgtgcacttccaggccgagcgcgtcgccgaagccgcccgctcctatgacgagcaggtcaccatcgtgaaccaggacgacattcccggtaccggtcgcgccgtgcagtgtgcaatggcacagctcaccgaggctggcaaggtcgatggcccggtgctgatcgccgcctccgacatgccgctgctcgacagcgagacgctgcaccgcctggtcgaattccacaccgcctccggcaacggcgccaccgtgctcaccaccatcctcgatgacccgaccggctacggccgcatcatccgcgatcgcgaaggcaacgtgctgcgcatcgtcgagcagaaggacgccaaccgcagcgaactcgccgtgcaggaagtgaacacctcggtctacgtgttcgaggcttccgtgcttaccgaggcaatcgccggactgaagtcgaacaacgcgcagggtgagttctatctgaccgacgcgctggaaaccgccaaggccgctggcaaggtcggcgcgttcgccgctccggatccgctcaccgtcgaaggcgtgaacgaccgcgtgcagctggccgcgctgtccaagacctacaaccgccgcgtctgcgagcgctggatgcgcgacggcgtgaccattcttgacccggaaaccacttggatcgaggacgatgtccagatcggccgcgacgccaccatcctgcccggttccttcctgcaaggccacacggtggtcggcgaggacgccatcgtcggcccgtacaccaccctcattgacgcaaccgtggacgaaggtgccgtggtcgagcgttcccgcgtgcaggaatcgcacatcggcgcacgcacgaacatcggcccgtggacctacctgcgcccgggcaacgagttcggcgaggatgccaaggccggcgcgttcgtcgaaatgaagaaggcgcacatcggcaacggcaccaaggtgccgcacctgagctacgtgggcgacgcccagctcggcgaccacaccaacatcggcggcggcaccatcaccgccaactatgacggtgtgcacaagaatcgcaccaccatcggctccggctgccatgtgggcgccggcaacctgttcgtggccccggtcgaggtcggcgacaacgtgaccaccggtgccggctccgtggtgcgccacgccgtgccgagcgacacgatggtctactccgagaacacgcagcacaacgtcgagggctggaagcccgcctgggagcgctgaaccatgcccgcacttcaggattccatcaacgccgtccgcgtggccgccgaggccgcagaccgtatcaaggccaccgacatcgtggccttcgacgtagccgacctgctcggcatcaccgacatcatgatgatcgccggcgcctccaacgagcgtcaggtactggccgtggccgaggaaatcgaaaaggacctgttccttaagtgctccggccgtcagccgcgctctcgcgagggcctgaccgagggccagtgggtgctgcttgactacggtgatttcgtgattcatgtcatgcacgaggaatcgcgcgaattctacgggctcgaacgactctggcgcgactgcccggccatcgatcttgaactcgcacacccggaaacggcggagcatgcggacgctgctgccgtcaccaccgcgtaacgtgcgaatcacataacgctgatattcgctgatactcgctgatattcgtgtgtcgggctgcctgttgccgaacgtcattgacggcaccaggcagccctcccttttccctgtttcctcactggaatcgaaaggatcgtcactatggccaatcatgttcgttccattttccttatccgtcatggacgcacttcctataacgccgctcacaagctccaaggccaggtcgacattccgctggacgccgtgggtgaatggcaggtcaagcagaccgccgcggccttgaaaagcctgtacgtcgatcgtcggccggaaatcaaccaccggttcattgtctgctccgatttgaagcgtgcgcacgccaccgcgcaggctttcgccgacgtattgggtggaatcgagcccgtcgatgatcatcgcgtccgtgaacgcagcttcggcgactgggatggccatgccgtggctgaactggccgaacgctaccctgaggacttccgttcctggatggagtctcggggcggtgaactgaagtatggtgccgaacccaaggaagccgtaggcaaacgcggtgtggaggctcttgaggactggtccacgcgtgccggagacgacacggacctgttcgtgttctcgcacggcgcatggatcgcgcagacattgcagaccctgttgggcatttccgcgatcgatccgaccttctccacggtggtctcattgcgcaatgcgcactgggtgcgcttggtgccgatggacaatcccgatggcactgtgcgctggcgtctgctggactacaatcacggtccggccatcgccgacaccgacgaatgggaacgcgaacgctgatcatgttcccgactcccctgctaatccaataggtccggtgcattcggaaccgttcaagcaataactgaatgactcaatgcctgaataatggcggaaacaagccaaaaagtgtcgccaaatcacacttttgtcatttggcgacacgccggcttttgccagaatcgacatctcgtcgtaatgtatacgaggtccgaacaacgggccaacaattgaaaacggggctatagcgcagctggtagcgcatctccatggcatggagagggtcgggggttcgaatccccctagctccacgacgaagccatcaaatcgggtgatatggtggtttctccgctggttcgtggcgggtcttgtgactcccatgaatcggatagcttcactcggggctatagcgcagctggtagcgcatctccatggcatggagagggtcgggggttcgaatccccctagctccacaatcaaggccggtgcttcacacaccggcctttttcgttttctatcctatcgggcgacttttgcgcaacattcccgggaatgcgtcgcaaaacagggactggaatgcatgcagtgcgatactttccccggaaagtatcgccaaggggacgctcttccgattggcgcgacaccggcgtgagagataacagtaatcgccactacaatgaggtgtggtccctatcgtgttgatcatcaaaggagacaaaaacatcgtgaccgtcacccgtgtatatatcgccagccctgaaggcgccaatggccgcaacgtcgtcgcttacggcgtgctcaacgcattgacttccaagtacaagaccatggtgttccgccctgctgtgtccaaccatgacgaattcaccccgatcctgctcgccgcttccaatgccggactcggcgtggccctgtccaccggcctcgatgtgcataaggtgcgcgccgacaaggacaccgcccgcggagacatcgtcggcgagttcaactacgccatggaggtctcccgcgcgaacgccgccctgatcgtcggcaccgacaaatcccacgtcaacgacccgaccacctacgagttcaacgcggacgtcgccgccgatctgaaggccggggtgttcctggccgtgtgcaccatcgaccgctggccgcacgagctcgacgagaccgtcaagctgtccatcgagggcatgcgcgccgcgggcaatacggtgctcggcatcttcgtgaccggctgcgagccgcgtcacgccttctccgtcaaggagaccctcgccaaatacggcctgccggtctggactttgccgcaggtgcccttcaccgacgaatccaccaaggacctggcccttgagaccttccgcaagcacgctcccatcgacgaggtgctcgccgcgctcgatgtggacgtcaccgcgccggtcacgccgtacgccttccaattcgacctgctcggcaaggccaagagcaacaagaagaccatcgtgctgcccgaaggcgaggaggaccgcatcatcaaggcggccgattacctgctcgaacgtgagaccgtgaacctcatcatcgtgggcgacaaggacgccattttggcccgcggcaaggaactggggctgaacagtctggggcgcgcccgattccaggccatggacgacgagaacgtgctcaagccgatggtggccaaactgtgcgagttgcgcgccaagaagggcatgaccgaggagcaggcccgcaagcaactgaccgacgccagctacttcggcaccatgctggtggtgctcggctatgccgacggactggtttcgggttccgtgcattccaccgccaacaccgtgcgccccgccctgcaggtcatcaagaccaagccgggccagaaactggtctcgggcgcgttcctcatgtgcttcaaggaccatgtggccgtgttcgccgactgcgccatcaacctcaacccggacgccgagcagctttccgaaatcgcgttgcagtccgccgagaccgcacgtgccttcggcatcgacccgaaggtcggtatgctctcctactccaccctcggctccggcaagggcccggacgtggacgtggtcgaggaagccaccaagctgctcaaggagaaggctccggatctgccggtggtcggttccatccagttcgacgccgcctggtcccccaccgtggccgccaccaaggccaagggcaacgatgtggccggacacgtcaacgtgttcgtcttcccggacctgtgcgccggcaacatcggctacaaagccgtgcagcgctcctccggcgccttggccatcggcccggtgctgcagggtctcaacaggccggtaaacgacctgtcccgtggtgcgatggtgcaggacatcatcaacaccatcgccctcaccgccatcgaagcgcagtgagcccggcttagctcccgccagcgggagccactgtaatgcttattttgtagcaagcaacgagtaatctaatcaacggtaacccgtgtctcacgggaacattcaatcacaatggaggatgcccacaatggcgaaaaccgtccttgtcatcaattccggctccagctcgatcaagtaccagctggttgatctcgaatccggcgaaggcctcgcttccggcctcgtcgagaagatcggtgagccggtcgacggccactacaagcacgagtacaacggcgaaaagcacgagcttgaagagccgattcacgaccacgagcagggtctgaagcgcgtgctcggcttcttcgaggagtacggcccgaacctgtctgaggctggcattgtcgccgtcggccaccgtgtggtgcagggcggctccatcttcccgaagccggccctcgtgaccaacaagaccatcaaccaggtcaaggatctggctgtgctcgccccgctgcacaacggcccggaggccaagggtgccgaagtcatgcgctccctgctgccggacgttccgcagatcttcgtcttcgattcctccttcttcttccagctgccgaaggccgccagcacctacgcgctgaacaaggaaatcgccgatcagtaccacatccgccgctacggcgcccacggcacctcccacgagtacatctcctccgtggtgccggacgtcatcggcaagccggctgaaggcctgaagcagatcgttttgcacatcggcaacggcgcttccgcttccgctgaggtctccggcaagccagttgagacctccatgggtctgaccccgcttgagggcctgatgatgggtggccgtaccggtgacatcgacccggctgtggtcttccacctgatccgcaacgcccacatgaacgtggacgagctcgatgccctgttcaacaagcgttccggcatgatgggcatgaccggctacggcgatctgcgtgaggttcaccgtctggtgtccgaaggcaacgaggacgccaagctggctctggatgtctacgtgcaccgcatcgtcagctacatcggcaactacacctaccagatgggtggctgcgacgtgatcaccttcaccgctggtgtgggcgagaacgacgacgtggtccgcaagatggtgtgcgacaagctcgctccgttcggtgtcaagctggacgaggagaagaacgccacccgctccaaggaaccgcgcatcatctccactccggactcctccgtgatcatcgccgtgatcccgacgaacgaagaactggccatcgcccgcaagtccgccgcaatcgccgaggctggcaccgatacctacggcaacaccttcgccaagtaagtaaccgccgttaggcatctcactaatctctagttgcaacactatgggggctgattccgattggaatcagcccccattcgtatatggtcatgagaccactacccctgcgtcatactcccctcagtcgcctccggcggacagatccactcagagaggggatccaagccctataacttggctcccttctctgaggggagcagtccgcgtagcggactgaggggagttccaccagaacacaggaccccttactgcctcagcatgccactccacataccgacgaaatcaggcaaggtcttgcgcgtggtggccacgttgatgacctcgatatcgggaatacgcagccccagcatcgcggcgaacgtggccatacggtgatcagcataggtttccatcacggcaccgtgcaacgtctccgccggcaccggttcgatacgcaatccatcaggcaattcctcagccgctcccccaacacgacgaatctcgttgaccaatgcctccagacgattcgtttcgtggccgcgcaggtgaccaataccaaccatgtctgtcgacttatcagcaaacaccagaatcgccgccaacgagggcgcaatctccccggccgccgtcaaatcgaacgtacccagcccacgcacggtgccgtcaccggtcacctcgcaatagcgcacgccgccgatggtcgggaacgatacttcggcacccatctgctccagatatccgggcaacaggccgcccggctgggtggtggtttcaggccaatgaggcacccggaccgtgccgccggcgatcaatgccgcgccgaggaatggcgccgcgttcgacagatcgggctcaacggtcaccttgctcggcagttgcattgcgcgcggttcaaccgtccatgtgcgggcggattcgtcggcctcaaccgcaccgccggcaccggtcacatcggccacggtcatgcgaatgtgcggcaggctcggggtcttctcccccgtgtgcgcgaggtgcagaccgccaggcagtttggaactaatcagcaacaggccggagatgaactgggaagaaccggacgaatcgatgctgacctgcgcctgggcagccggcaaggttgcaggcggcgtaatagtgaacggcagacggccaacctcgccgtggtaatcaaccgttgcacccagctgttccaaaccgtcaagcaccggcttcatcggacgtgcataagcctgttcgtcgccatcaaaattcactgggccatctgcaaacagggcaaggccgggcacgaaacgcatcaccgtgccggccagtccgcagaacacattgacgttgccatggaatcggccggatacaggaggagtaaccgttacggtggtgtcggttgcggaatccacgtcgcagcggacaccgagggcttcgagtgcgcccatcataaggtccgtgtcgcgcgaacgcagcaggccaatcagagtaacgggcttgctgccgagggcggcgagaatcaggtagcggttggatagggacttgctgcccggcaccgttaccgtagcgttcaacggctgtgcggcgagcggggcaggccagagattcgtgagtcgttcagtcataaggccaaatctatcaaacaaattattcaccggtcggcagcgatgcgggattcgatctgctgatcaggtgcggaagacggctgctcaaaaccgccttcgatggcctgcgcgtgcaacaactgagcggccgcgcgatcggcctcgatggcggcgatctggcgcgagaacacgatgaaccagccgaggaacgccagaccagccaacgcctccacattggtgagggtgttgtgacccatcatcatattgacccagaatgcagcgcatacgagcgcggtcaggtcggaggccaccatcactgctttggacaggcgtggcgcaagccacggcaggagcacgaacagcagcagcatgacgaacggcaggcctttggcgcatatattgtgcaagagattgtgtggcgtgtaccgaaacacgccgatgccgatgaatgccaggccggccaccatcagcaggaaggacagaatggagatgcgcagcatgaaatgtgggatttcgtagccgcgattcggatctctgttggtgcggtcgtgccagaggcgctgtagccgttcggtggtcaccagttcggagatggcgaagtagctgacgatgatgatgcatgtgccggcaagaatcagcgtggagttgaacatacgggccgcaaacgtggttctgtcgccgagctgcgaaaagttgttgtgataccagtatgggtcgtcggtggtcatgccggcggtgaccacgccggagatgacgaagaacggcaacagactggcaatagttttggcgttcatcatctccgcctgtacaaaggtcatgtaccccaccacgccggcgaaggcggcgcagacgctggagatatagccggagaagatggcattgcccatcatgtcgttggccgcaccgatgagtgcaaaagacgacaggaaaatggtcgaggcatacactaccgaaagggcgacgatttcgaaaatgcgacgaatcggcgcaaaccaaccatgtttgaggttcaatgaacgtgatttgcgcgcatagccaataatgaaggaaatgacgccgcatgccgccacgatgcccgaacataccatgaatcggcgttgcgtcagctgccagatggccggcgcgtattccatgtacaggttcatcgataccgcgccaacgatggcgcaaatcaagaaggagatgagtccggaggtttctgcacgctgatgacgtcccatgccgggcctcccctatctattcgatgccgcgttatctttcaacaacaaacaaaactccccccgaggacaacgctttactagcaagccagcgggatttggctgtcgccattctactgaaaatctgaaacactacaaaaaaaaacgattatgtacgggcttcttagcctttgcgactatcgttaccgccttgccgagtaccgttgttcatgcagaaagaaagcagtattggacacaatcgaatgagcgtgtcggtatcgttgaaaaagtaatgaatgacggttctatcggttcaacctttaagggacgaaccagccgcggcaccatggcgctgatgcatgactatgccgagctcatcaatgaattacgtccgacagcagagcaattcaccgagatcgagcaatactgggtcaaacgaattcaggcgttcttcaccagcaaaccattcaagctggagtccgacaactcgctttccgttgatgcggccgtggaacatctgctgcggcaggcagcgcagcggcgaagggagaatccgggcaccatgtacgtcggcaccgtcctgcagcatctcgtcgcggcaaagctcaccatcgttgctccggaagtggaaatcaacggcgcgtccgttgctgatgatccgagtccgcggcttccaacggtgaggccgcggaccgtctcacaaaaccgtccgcggctccgccctcctgtttcgtcgcaactgactacgccgacgggttcgggcgcttcgtcacgaaaacgccattgcgatgcaccgtatacgcgccgccgtcactgccccgttccgcccggaacaggacg

SEQ ID NO: 3641 - DNA, 2822 bp, Unknown
  R85_18m  MAG No. k141_37757
cagctcaaactgttcgagatcagtctcgtgcaggtcgccgccaaccaaggggcggaagtgctcgaggtcaaggccggtcgagccatcagcaaggccaacgaggacaagattcgcacagcctacgaagcgctcggcgaactgctcgactccatcaccgaaacccccgacgatgacgacaccgacgattccaagcccgatgacgagccggacgacgatacgccggacgattcggacaagcccgagccggacgacggcaaggcgaaaaagagttttgacccgcagtgggccaaggaaatcagcgacttcctctcgctggcaaacaaccaatagaaaggatgatccatgggttacatggagaagctggccgccgagaagaaggcggtcaaggccctgtacgacaagggcatggagaacctcaccgatgatgaggcgaccgaactgaagaaccgcttcgaggaggccaagcgtcttcaggagcgcgtcgacctgttcaagggcgtgaacgacctgaacgtggacgatgtgaagcccgaggccaagacggctcccgccgccaagacgctgggcgacttgtacgcgcaggagctgaagaaggccggcatgaccgtcatcggcaccaaggcgcacccgttcgcttccagcgagttcaaggccgcgaccgacatgcacgtggcgggcaccggcacggctggcaccggataccagccggtcgtcacccagatcgacatgaacggcgtgtggccttacgagcgtccgctcgtggtcgcagacctgttcggctccgtcaccctgagcggcaacgccaacaccgtggaataccccgtctatggcgcgctcgagggcggcgctggaaccgtgggcgagggcggtgccaagccgcagacccatctgccggccccccgctgggagtccgacagcctcaaggaggtcgccgcctggtggaaggtcaccgacaacatggccgaagacctctcctacatcgtctccgaaatcaacaaccacgcccgctacaacctgcagctgctggaagagacccagctgctgtccggcaacggctccgatgcgaacatcaagggtctgctcacccgcgacatccagaagatggggcaggacaccgactccgacccggaccgcatcttcaaggcccgcaccaagatcgcgctggccaccggtttccgcgcggacgcgctggtcatcaaccccgccgactacgaggccattcgcctctccaaggacgcgaacggccagtactacggcggcggctacttcaacggccagtacggcaacggcaccatcatgcaggatccgccgctgtggggcctcaagaccgtggtcaccgaggccatcgcccagggcaccgctctggtcggcgcgttcaagctcggcggcgcggtcatccgtaagggcggtctgcgcgccgagtccaccaactcgcattccgatgatttcacgaacgatctcatcacgttccgcgtgcgcgaacgcctcggcctgcaggtcaagtacccgaaggcgttcgtgtccgtcgccctcggcaagaaggccaagtgaggtgaccgccgatgagtgacgcaaccaaggtgctgcagaccggggtcgataccggtgatggcagcacgtatccgcagccggtggtcgtggtcgacgccgccggcaatcccatcgacctgaccaaggcgaacggtgcggccatcacctcggtgacggccgtggccctcgccgccggcgcggctcccaccgcgacgctcgcggatggcgtgctcacgcttggcattccggccggcgcgaaaggcggcaatggcgatccggggccagccggcaagaatggtgctcccggtgccgccggcgtgggcgtgaagtcgatttccctgaccaagaactccgacaatgccatcaccggcggcacttgggtcggcaccgacgaccagtcgcacgccttcaccgtggcctaacgtgaatcgactggaggcgaacgatggccgatgaaaccattcccgacatcatcaccgacccgtcaggcttcgacgctgacggcgagttctggctgaaggcggcgcaggcggccatccgccgcacgtgcggctggcatatcacgccgaacatcgaactgtcgggcgtagccaattcgcggggaggcaaggtgattcgtctccccgcacgccatgtcacctccgtcgacgagctgaccgacagcgccggcaaccggctgcactacgcctacgaccccaccacgggtttggtagaatgcaccaccggcgcattcccggccggcgtcgccgcgatacgctaccgcatccacgccggctatacgccggatgaggtgccggacgtgatgggcgtgctcatcaacgccgcgaagcgtgcgagcatggcctccgccggcgtcatccaatcccagtcggtcaacggcagcagcgtcacctacaacgtgtcgttgatggccgacgagctggcgaaactcgaccggtacaagctaggagcgctgccgtgagcatcatcgacgacatcaatgcctccggcctgcctgcggccacacggttcgtgcggctgcgcgcctcgcgtaaagccgacccgtacaatcccgcgcagaccacggaggattggaagcatcctgtcgaattggaagtgcatggtgccctggcatcgagcacttcgactcgcacgcccgatgtgttggacgtgcagaccacctccacggcggtgctcaccgtcgccgacccgaatgcggatatccggcttggtgaccgtatccgacccgaaccggcggacggccgcatgtgggaggtgtccggcttccccagccgtgacgtgaacgcgttcac

SEQ ID NO: 3642 - DNA, 2937 bp, Unknown
  R85_18m  MAG No. k141_37890
gattatcaatcggttttaatcgatttcgcctcggtcgataaagtcgccgtcgaggaaccaataatcgtgcggatttccgcgtaacgccatgaacggcgtgagttccacgccctgtgtctcagctctgctcagcagataggcgcggataatccacggatactctagcacgcccgacttgagggtgatgatttgctccactctgctgccgctgacgccaaaatccctgccgccgttcggcggtcagacccagccggctcatgttctcctgaaattcgcggatagtcgccccgcgttgctcactgttcaaagacatggcttcatgaatgttgcattggcgccttaatcatccatagttaaggcaccacgcaacatacgattcgcttacgcagccatccgacgatggttgggatagattgttcggcgaagcggtctatggcgtcggcggtgacgtaggcgtgggcggtgaggcgcaggtacagttcgccgccgaccgcgctggccgcctcggatacccgacgctccgcgtaatcggcaagatcggacatgtaccggcgcacggcatcacagccccacagtcgctcgatctcgcgcagggactcgggcgcggcgatcggaccgcataaatcctgggtgccttgctcatcgaatcgctccgggaacgggtcagcgaaaccccacgagtcgatcagtggccacaaatcctgaccatcctgaccgccttcgggcggaatcaccagcaatgccgtgccacgcggcgcacacgggaacttatgaaaattgccgacccaccaatcggactgcagtccgccggccggatcggccagttgggcgggagcgtgcgcgccatcaaccaaaatgcggatgccgcggcgatgggcttcggcggcgatgcgctgggccgtaaacagcatagcggtggcggaagtaatctggtccaacacgatgaacgacgtacgctcgctcatctgcgcggtcacggcgccgaccacgccatcctcgtcggcgtcaatggtaactggtgcatcttcctcatccatgcgaatgagacgaatcgcctttcatcccaatgatttcgctctcgtggccgatacccgcatgccgtcatgttccgtaccttggaatcagaagtcgagagtcatggtccaaaaccgaatggagcggaccgaagcagggagcattgaagatgggatttctcaagaacttttccgaaccgtttgcgttcgcgctggcattgtggccgtttgtgtccatgctgctgacggtgccggtgctggcgttgctgtatcaccgcgacaatcgcatccgactgtcgtcggccatagtggcgtatggcacggtgctgtacctgctcggcctgctgtgcttcacactgtatccgatgccggccgatgcggcagcctattgcgccgcgcaccatctgacgccacagctcaatccattgcagttcatcggtgacatccgtaccgatggtctcaccgccgtactgcaaatcgcgtttaatatcgtgttcttcctgccgttgggcttcatcatgggccgtatctggcgttggccgctgccggttaccgcagtactgtcattcgccacgtcgctgtttctggagacgatgcagctgaccggcctcatgggcgtgttcccgtgcgcctaccgtctgttcgacgtggacgatctcctgtggaacacgaccggcgcgctgatcggattcgcgctggccatgctttcgctgcgcctgattccggcgcgggtcgccgatatgacgccgaccaccacacctggcttcatgaggcggctgatcacgttcatcatcgacatgacgctgatcgggttcgccgtgatgccgacgcatctgttcgtcatgatcgtccgctcaaacctgccctcgggctccaacggctcatggcagtcgatggaaccgttcgactggaccggctcgatcctcttcctggcggcgctcatcctcttcgagggcgtggtgccatggttgcgcggcggctgcacgttcggcggcagcttcacgcacatgacgatagagacccggccgcgcgaagggtggcttcgcgtggcgttctatgtggcgcgcatggcgacgctgatcgccgtggtgtggtggcatagtggcggattcaatctgctggtgttcatcggcctcggcatcttctggctggtcaagcgtcagatgccgtacgacctgatataaaccggcgctccgctgcttggcgttacaggaaaacctccgaccactggtcgggattcggaatgctgcgcagcgggccggccaacgatacggccaatcccgctacggaacagaccacggctacggccatcaccgccgtgaaaccgagatctggctgttgcaacagccagccgaccatcgccgggcatgctgcgcccagtatgccgaccgtggtttcaaatacggcagaagcccgcccctgcatgttgtcgggtgtcttgccgtagagaaagcccagcagaccagcgttcaacgcggggaacggcaggccggccagaatctggcagatcagaatggccgcgtagctgtgcaggaatagcagtggcatctggctgaccacgaacaacgccagcgcgcccgcaatcagtttccctgtgggaaccatatcgactagcttgttggccaacagcgagccgaccaaagtactcacgcccattgccgtgccgagcagtccgatcatgaccgcgttggcgccacgggcggccaacatgatctgcgcgccggtgatactggctacgcaggcgatgttcacaattgccccgagtatgatcgcggataggaagacgcgcttggtcagggcccatcgccagccttcgaccaagtgcgtgggaaatggcacaacagaagtgccgtgggcccaaacggtgaccacggcttagcgcgacgagtcaacgcgcattagctgtctgcgaacgacaccaaca

SEQ ID NO: 3643 - DNA, 2521 bp, Unknown
  R85_18m  MAG No. k141_38120
cgctcggcatcgctcagctgggcgatgcccttctggtacttgtagccgatgtagtagccgtggacggcctcatcgcggatgatcagacgaatcacgtcggcggtgttcgtcagcttggcgtgcgcggagaagtacatcggcagatagaagccggagtagaagaggaaggattcgagcagggtggaggccaccttgcgcttgtacgggttgtcgccctcgtagtagtcgagcacaatctccgccttcttctgcaggaactcgttgttctcgctccagtcgaaggccgcgtcgatctgctcggtggagcacagggtggaaaagatggacgagtagctcttggcatgcacggattccatgaaggcgatgttggtgtacacggcttcctcgtgcggggtgagcgcgtccggaatcagggagacggcgccgaccgtaccctggatggtgtccagcagggtcaggccggtgaacacgtgcatggtgagcgtgtgttcgtcttcggtcatcttctgccagctggggatgtcgttggagacggggaccttttcgggcagccagaaattgccggtcaggcgatcccagacctcgaggtccttctcgtcttcaaggcggttccagttgattgcggagacgcggtcgatgagtttcagcggtttgcgcggaatagagataggtgccatgagtagtgttccttttactcgttgtcgttgtcgttatcgtcgttggacttgttttcgaactcctccggcgcggtcagccggagcagtgcctgataaatcattggtgacattgtggttccttagagtggttgggctcccctcagtccgcttcgcggccagctcccctcagggaggggagccaagaaagggagcccgatatataaatggacatctgtggttgttcgatgcgtgcggcctctaggcgcaccgagggaaggcgtacgaaggtacgtcgaccgaggagcaacgacgaggacgctccatcgaacaatcagagcatgcaggagacgcagccttggacttcggttccttccagggcttgctgacggatacggatgtagtagagggttttgatgcccttgcgccaggcgtagatctgcgccttgttgaggtcgcgggtggtggcggtgtccgggaagaacaaggtcagcgacagtccctgatccacgtgctgagtggcctcggcgtacgtgtcgacgatggccttccagccgatttcgtaggcgtccttgtagtactcaaggttgtcgttggtcatgtaggccgccgggtaatagacgcgcccgattttgccttccttgcgaatctcgatcttcgaggcaattgggtgaatcgagctcgtagagtggttgatgtaggagatcgaaccggtgggcggcacggcctgcaggttctggttgtagatgccgtccttcaaaatcgcgtcgcgcaacgtctcccaatcggacacggtcggaatctcgatgccgtacttggcgaacagctcacgaaccttggcggtacgcggttcaagcgagcggcgaccatcggtgtacttgtcaaagtaattgccttggccggccggcttggcgtagtcggacgtagcgaagctcttgaacggatggccgtgttccacggcgagcgcgtgcgaggcgcggtaggcatggtaggccacggtcatgaagtacatgtcggtgaagtcgaggccttcttcggagccgtagtgaatgccttcgcgggccaggaagccgtgcaggttcatctggccgaggccgatggcgtggccttcctcattagcgcggcgaatcgagggcaccgcgtcgatactcgtgtgctcggccaccgaggtgagcgcacggatcgcggtttccacggtgtacgccagtccgccatcaattgccttggcaatgttcagcgaacccaagttgcaggagatatcgcggcccacgtgcgcataggtgaggtcttcgttgtatgcgctcggctcctgcacctgcaggatttcggagcacaggttagacatggtcacgcggccttcgatcgggttggcgcggttgaccgtgtcctcaaacacgatgtatgggtagccggactcgaactgcagctcggcgatggtggtgaagaacttgcgggcgtcgatgtaggtcttcttgatgcgatcgtcggccaccatctcgtcgtagtgctcgctgacggagatgtcggcgaacggcttgccatatacgcgctccacatcgtaggggctgaacagggccatctgggccttctgcttagccagttcgaaggtgatgtccggaatcaccacgccaagcgccagtgacttgatgcggatcttctcatccgcgttctctcgcttggtgtccaggaatcgcaggatatccgggtggtgggcgttgaggtacaccgcgcctgcgccctgacgtgcgccgagctggttggcataggagaaggaatcctccagcagcttcatcaccggaatcacgccgctggactggttttcgatgtgtttgatcggggcgccgagctcacgcaggttgctcagcagc

SEQ ID NO: 3644 - DNA, 10542 bp, Unknown
  R85_18m  MAG No. k141_38265
cgcgacgaccgcggccgcgcctgcgccgaccgtgacgcctcccgtgacgccgcgtccggcgagacctacgccgatcacgacgatttcgacgccgacgacacctcggactcccgccgttcgcgccgctcccgccgtctgaacgcccaggagcgccgtgcagccgccgaagtcgagcagattgaggaagacctcgagctggacgatatcgcctactcgccgattgccgaggaggagggcgacgaggaatccgacgtcacccgcacccgttcgcgccgtcgccgccgtcgtggttcacgcggcgaaaccggtgccaacggcgagcacgataccgccgagaacgatgccgaggatacgcgttcccgccgtcgtgacgatcgcgatgatcatgaccgtgatcgcgatgaggacgatgaggagcagaccgtcactcgccgtcgccgccgccgtcgtggcggcaagaacggcgagggcaccgacgaccagagtcagaacagcgaacagccgctggtccgccgctcccgcaagcagcagtacatcgacgaaatcaccgatgtggaaggctccactcgtctcgaggccaagaagcagcgccgccgtgacaaccgccgtgagcgcagccgccagagccagcttatggaacaggacttccttgcacgccgcgagaacgtggaccgcctgatggtggtgcgcgagaaggaacaccacacccagatttccgtggtggaagacaatgttctggtcgagcattacgtctccgacattcaggaagtacagaccgtcggcaacatctatcttggccgcgtgcagaacgtgctgcccagcatggaggccgcattcgtggatatcggccagtcccgcaacggtgtgctctacgccggcgaggtcaactgggatgccgctcgtctcgaaggtcagccgcgccgcatcgagctggcgttcaagtccggcgacccggtgctcgtgcaggtcactaaggacccgatcggccacaagggtgcccgcctgacctctcaggtcacgcttgccggccgcttcctggtgctcgtgccctccggtggcatgaccggcgtgagccgcaagctttcggagcgcgaacgcagccgtctgaagaacatcgtctccaagatcgccccgaaagacatgggcgtgattatccgcaccgcggccgaaggcgcatccgaagacgccatcgtcaaggatctcgaatcactggtccgccagtgggagcgcatcaacgccaagcgcgaggaattctggcacggcaagcgcccgaaactcctgcagggcgagcccgacgtggccatccgcgtggtgcgcgacatcttcaacgacgactttagcaagctcatcgtggaaggtgacaaggtctacgaccgtatcgaggaataccttgacaccatggcccccgacctgaaggacaagctggagaagtgggacccggccgagcacgaaggcaaggacgtgttcgacaaatggtccatcgactcccagctgcgtaagggcatggaacgtcaggtctacctgccgtccggcggctcgattgtcatcgatcgcaccgaggccatgaccaccatcgacgtgaacaccggccgctttatcggcaagggcaagtccttggaagaaacggtgacgcgctgcaacttggaggcgtctgaagagatcgcccgccagctgcgcctgcgcgatatcggcggcatggtgatgatcgactatgtggatatggtcatgcccgccaaccgcgatctggtgctgcgccgcttggtcgaatgcctggcacgcgaccgcaccaagcatcaggtggccgaagtcacctcgctcggtttggtgcagatgacccgcaagcgcatcggccagggtctggtcgaggcgttctccgaggaatgcccgacctgcaagggccgtggtttcatcctgcatgatcagccgaccgtttcggccgactacgacgatccctacgcgcttcgcggtggcgacccgttcgtcaaaaccaacaagcacggtcgcggcaccgctcccgctcccgaaccggctggttccagcgccgacgtcaaagccaaactggctcagattgccgccgctgccgtcgccgccaacaatacggcggaagagtaacaggtgtgtcgtgcttgacacgcgggcaaaaatcatttgatttagtccgcatggtggtgtaaatttgaaactcggtgtctgaccgcaggctcggtgcgtgttaggcaaggtagctttccaaaacataaaaggaacgataatgtacgcgattgtgaaggccggtggccatcaggaaaaggtcgaggttggcgacgtcatcctcgtgaaccgtctcgacgccaagaagggcgataccgtggaattcccggtctccctcgttgtcgatggtgacaaggtcaccctcgccgccgccgatctggccaaggtgtccgtcaaggctgaggttgtgaacgatgaagccaagggcccgaagattgacatccagaagtacaagaacaagactggtgttgctcgccgtaagggtcatcgccagaagctgactatcgtcaagatcacggcgattgcctgagttatagaaaggaccatgaatcatggcacataagaagggtgcgtccagctctcgcaacggtcgcgattctaacccgcaatacctcggcgtgaagaagttcggcggcgaagccgtcgtggccggcaacatcatcgttcgccagcgtggcaccaacttccacccgggccacaacgtcggcatgggcaaggaccacacgctgttcgccctcaccgatggctccgtgaagttcggtgtgcgtcgcgaccgcaaggttgtcgacgtcatcgcctgagcgatatagcgtcaagctttttcaagccgcgcccgtaaggacgcggcttttttgtaaggtaatcaatatgagtgattttgtggatcgagtaaccgtccatgtcaagggcggcgatgggggcaacggttcggccggcatccgtcgtgagaaatacaagccgttggccggtccgaacggcggcaatggcggcgatggtggttccgtggtgttcgtggccgaccgtaacgccaccagcctgctcgactatcgtttcatgccgcatcgtgtcgccggcagcggcaccatgggtttgggcgacaataaggacggctccaagggcgaggacctgattctgcccgtgccctgcggcaccgtcgtctttgaggcgcgcggcgaacagggcaaatccaagcatcccggcgcacagctcgccgacttgcgtcacgagggcgaccgctgcgtcgtcgcccagggcggtgccggcggcctcggcaacatcgccctggccaacaagacccgacgcgcccccggcttcgccctgctcggcgaactcggcgaggaacgcgacgtgattctggaactgaagtccatcgccgacgtggcgttggtcggtttcccctcggccggaaagtcgtccctgattgcggcgatgagttccgccaagccgaagatcgccgactacccattcaccacgctggtgccgaatctcggcgtcgtcatcgccggcgactctcgatacaccatcgccgacgtgccgggcctgattcctggcgcctctgaaggcaagggcctgggactggagttcctgcgccacatcgaacgtaccgaaatcatcgcccacgtgattgattgcgccacgcttgaaccggaccgcgacccgatgtccgactaccacgcgctggaaaacgagttggcactctacgccgacaagctcgaactgccattgggcgccatcccgattcccgaacgcccgcgcatcgtgattctgaacaagatcgatgtgcccgaggccaaggaattggccgagttcgtgcgtccggagttcgagaaactcgggctgaaggtctttgagatctccaccgcctctcatgaggggctgaaggagctcaacttcgcgttgtctgcgctggtgcatgagatgcgtgaggaagtggccaaccgcgagcaggccgaagaggagacgcgcgtggtcatcaagccattggagaccaagggccgccgtccgcgtcgcgctgacgagggcggcagtgcgcttgagttcacggtcgagcgccgcgaactcggcaatggcgaagtgttcttcgaggtgcgtggcgtcaagccggagcgctgggtcatgcagaccaacttcgacaacgacgaggccgtgggctatctggccgaccgcttggccaagctgggcgtggaagatgagctgcgccgcaagggtgcccaccctggtgacgaggtgcgcatcggtcgcggtgcccgtatggtcgaattcgattgggatccgaccatctccgccggtgccgaaatgctcgacggctccaacctcggtgcccgaggcaaggatctgcgtcttgaggaacaggacccgcgcacgcaccgccgctccaacgccgaacgtcgtgcccaataccacgagatgatggacgcccgtgccgccgtgcgcgacgcgatgatggccgaacgcaaggccggccactgggccgacccgaccgttgacgacgatcgccatgacgaaaccagtctgttcggccacggtgagtccagcgaagatggtgaaaccgaggaataaatgagcactccgagtcaggccgaggtgcggcgagccgtcgcatccgctggaaccatcgtcgttaaggtcggttccagttcgctgacgcagccgagcggtcacctcgatccaggcaagctcgacgctctggccgccgcccttgcccaaatacgactgatgggcgggcgtgtagtactggtttcctctggtgctattgcggccggcttcggcccgctgggctttgacgaacgcccggccgacgtggctactcagcaggccaccgcagcggtcggccaaggtttgcttatggctcgctacgagactgcttttggccgtttcggtattcgcgtcggccagattctgatcactgccgaagatacgattcgtgccacccagtaccgcaatgtggaacgcacgctggaccgattgctggaccttggtgtggtccccattatcaacgaaaacgattcgctggcgtccaacgagattcgattcggcgataacgaccgtctgtccgcattggttgcgaacctagttcgcgcggaagctttggtattgcttaccgacgtggacgcgctatacacggcaccgccttcccagcccggctcccgccgtgtggaatatgtgccgaacgttatcgatgcatttggcgacatccaggtttccggctccggctccaaggtcggcaccggtggcatggtcaccaagcttgaggccgcgcgcgtggcggccgtctccggcatccccacggtgctcacttgcgcctcgaacgcgggccctgcgatgatgggcgatccggtgggcaccgtgttcgcaccggttaaggcccgcggttcgtcgcgtcgtctgtggattggcttcgccgccgacccgcgcggcactattgtggtcgatgcgggtgccggccaggcgattcgcggcgggcgtgcctcgctgctggcggccggcgcgctcgaagtgcatggcgatttttccgccggcgatccggtctggatcgatgccgaaagcggcgaacacctggcccgaggcctcgccggcttcgattccgaagaaattccgcagatgctcgggcgtaacaccgcccaactcaagcgtttcctcggcccccagtacgcccacccactggttcatcgcgacaatcttgtacttgtgtgactgatgggatctgtcacacgacagatcccatcaccatagtgcggctctggcgatttttcgtgctgtaggtttagcatggaagccatgactatggcgcaatggcagactctttccgaccgtatcaacactgtggcaccgagcgctacgctcgccgtcgattccaaggccaaggccatgaaggccgccggacttgacgttatcggcttcggcgcaggtgaaccgaatttcccgacccccgcaaacgtggtcaaggctgcggcagatgcctgccttgacccaaagaattacaagtacacgcctacgccgggcctgcccgagctgcgcgaagcgattgcggctaaggtgctgcgcgattccggctacgaggtgtccgccgaccaggttgtggtgaccaacggtggcaagcaggccgtgtatgaatccttccagatcttgctcaacgatggcgatgaggtcatcatccccgctccgtactggaccagctatcctgaagccgtcaaattggcgggtggcgtgccggtcgaagtattcgccggtgccgacgtgaacttcgagccctcgcttgaggcgctggaagcggcccgtaccgagcgtacgaaggcaatcatcgtcaactccccgaacaacccgaccggagccgtctggaagccggaaaccgtggaagcgatcggtcgttgggccgtcgagcaccacatctgggttatctccgacgagatctacgagcacctgaactacgacgacgcgcgcaccacctacattggtgccgccgtgccggaatgccgcgggcagctgctggtgctgaacggcgtggccaagacctatgcgatgcctggctggcgcgtgggctggatggtcgcgccgcttgaggtggccaaggccgccaccaagctgcaggggcatatgacctccaatgtggccaacatctcccagcgtgcggctctggccgccgtggctggcccgctggacgaggtgcatgagatgcgcaaggcgttcgatgcacgtcgccgcgcgatcgtggctgctctgaacgatattgagggcgttaactgcccgactccgaccggtgcgttctacgcttttgcggacatcaccgctttgcttggcaagccgctggggcccaacggcactgtgtccgatacgtccgctgattttgccgccgcactgttggatgaggcccacgtggccgccgtccctggtgaggccttcggtgctcccggttacctgcgtttctcctacgcactggccgacgaagacctagccgaaggcatgcgtcgattcaaggaatgggctaactgagctaactgagaagagtcgtgtgccgcgcacatgccacgcgcgcgacacgcgatttgcgataatccaccggagccgttactataacaacttggcggtttcgccgtggcgaagcgttctctacggaatgcacgccgaggtggattttcacctagggaagtggcgcaattggtagcgcaacggtctccaaaaccgtaggttgtgggttcgagtcccgccttccctgccaagttttcaataatcaagcagctgacgcgaggtacagaatggctaagacgaacaacagcgaaaaggtagtcaagccgaatgtcttcatgcgtatcggtctgtttatcaagcagatcatcgacgagcttcgcaaggtcgtaacccctactgccaaggaactgttcttctggtctctggctgtgtttatcttcgtgctgctgctgatggccctcgtcacgggcatggacttcggtctgggcaagctcgtgctgtgggtgttcggctgatccgcacaacctaaggtgaataacaacgcatgagtgatgaactgaatctcgagaatctcgacgccgtgccggctgaggagcctgttgtcgaggcttccgaagctgctgccgatgaggcagctgccccggctgaaccggttgctgacctttccgcagaatctgacgcatccgtcgacaatgcagatgttgagtccgccgctccggccgcgactgaatccgctcccgttgcttccactcagaccgagaccgtttctctggatgaggacgaggaagaagtcaacgaatccgagcaggccgaggaaaccgatgccggtcagcaggccgttgacgaattctccaagtccctgcgttcccttgatggcaagtggtatgtgctgcacacctactccggctacgagaagcgcgtgaagaccaatatcgagtcccgcgtcgcctccttcggcatggaagatcagatcttccaggtcgaggtgccgatggaagaagtcgagaagcacaccgaaaagggcaagaaggtcatcacccgcgtgcgtgttccaggctacgtgctgattcgtatgtggccggatgagaacgcccgccgtatcgttcgcgaaaccgaaggcgtgaccggcttcgtcggcccgaccaaggatccagccccgctctcccgcaaggaagtcgtggcaatgatggctccgatgatcgcctccgaggcactcaaggccgctggcgacaagcctgccgccgccaagaagcgcaaggtcgaagtctcctacgccgttggcgatcaggtcaccgtcaccgatgggcctttcgccaccatggccgccgttgtttccgacgtggagcccaccactcagaagctcaccgtgctcgtgtccatcttcggccgtgatacgccggtggagcttggcttccaccaggttcagaagctggattaaccccaaactttgcagagcccgaccatagtggtcgggctttttgtgttgtccgggtggatttgcataataggaaagcttgtgtctggagggaagacccgctagcacagcacagcaatataagttgcgggaggagaccgaccacaggccgattgcctacagcatgcacggataagtaatgagtcaagaccgagcatgatagcaggcaagcggatctgaggacggcgaccattcgaaccgcgttatagaaagaagaaccataatatggctcccaagaagaaagtctcggcgctgatcaagctccagatccaggctggcaaggccaacccggccccgccgctgggcccggctctgggttcgcatggcgtgaacatcatggacttctgcaaggcatacaatgcccagacgcaggacaagatgggtcaggtcatccctgtcgagatcaccgtttacgaagatcgttccttcaccttcgttctcaagaccccgccggctgcagctctgctgaagaaggctgctggcattgagaagggtaccgagaacccgctgacccacaaggtcggctctgtcaccaaggcgcaggttcgcgaaatcgccgagaccaagatggaagatctgtctgctcgcgatatcgaggccggcatgaagatcatcgagggcaccgctcgctcgatgggcatcacggttacggactgataaggagaaggacagatggtaaagcgttccaagaagtaccgcgaagccgctgagcgcgtcgatcgcaacaacctctacaccgccaacgaggccatcgctctgctcaagagcatgcctgcctacaacttcgaccagaccgtcgaggccgtgttccgtctgagcgtcgacccgcgtaaggccgaccagctcgtgcgcggtaccgtcaacctgcctcacggcactggtaagaccgccaaggtcctcgtgttcgcccgtggcccgaaggccaccgaggccaccgaggctggcgccgacatcgtcggtgatgacgacctgatcgcaaaggttcagggcggcttcctcgacttcgacgccgtggttgctactccggacatgatgggcaaggtcggccgtctgggccgtgtgctcggtccgcgtggcctgatgccgaaccccaagaccggcaccgtgaccatggatgtcaccaaggctgtcaaggacatcaagggcggcaagatcgagttccgtgtcgacaagaacggcaacctgagcttcctcatcggtaagatgagcttcgatgagtccgctctggacgagaacttcaaggctgtggccgacgaagtcaagcgtctgaagccgtccaccgtgaagggccgttacctgaccaaggcgaccatcacctccacgatgaacccgggcgttccggttgacccgaacaccctggcctgaggctagcgagcttcaatagctactgaaagggacttcccgtaaagggaagtccctttttgcatatgcgatgaccggttgcgagaaggtgaacctggatggtcacgcaatcgaattcttgcaacacgccggtgaacgcatgaatttgttacgcatcggcaatgcaaaacggattattctggtatcagaacagcgcaaataggctgtttgcgacacgccgaaggaaccgtgtgattgcaacgattcctgaggcttttgcgcgccttgatttgcgtgaatccggacatgcgtgtaagttattcacctgttgccgctcagcgcggcgggttccttcttctggttggtttcctgtcttgctggtgtggtggtggtttgagaactcaagagcgtgtttgtactacttctttatagtcaatgattgccagttcattcctcgcctgattgcctgttgtggtggtcgggtacccgggagggtttgatgaggggtgaggttttttgagggcgtccttccttaaggacgtgctcgtcgatttttgttttgagagtcatctgtcgatgtctcttcgcattttttttgtggagggttcgattctggctcaggatgaacgctggcggcgtgcttaacacatgcaagtcgaacgggatccatcgggctttgcttggtggtgagagtggcgaacgggtgagtaatgcgtgaccgacctgcccca

SEQ ID NO: 3645 - DNA, 4472 bp, Unknown
  R85_18m  MAG No. k141_39053
cgccgaactgcatgtaccagctgctcgcgcacccgaatgaaatcggcatcgtgcgcgcatacattctgggcgatttcgacgtggacgacattgactacgccgacccgtatccggcgatgcgcaagctggtgtcgctggccaaatacgttcgcccgctcgctcccgcatccattgcccgcgtatccgccggcattctgagtcacggcttcaagaagccgccggtgcccgccaccgagggcccaagcaagttcgcccgcatcaagcgtggcctgatgccgcacaccgaaaaggccgattcggaaaccgtcagcttccactacgacatgtccaacgagttctacgccgacttcctcggcccctccatgacgtacacctgcgcgatattcgacaacgagcacatgagccttgaagacgcacaggccaacaaactgcgcctgattctcgacaaactggacttgcaacccggccagcgcttactggacatcggctgtggctggggttcgatggtcatcaccgccgcccgtcgcggcatcaaggcgctcggcgtcaccctctccaaggaacaggccgcgtacgccaacgaatggatcgcccgtgaggggctgcaggatctggccgaagtgcgcgtacaggactaccgcgaggtgcccgagcatgacttcgacggtatctgctcgatcggcatgatggagcacgtaggcgtcaagaactaccagagctacttcgaagagatgttccgtctcctgaagccgatgggccgactgctgaaccaccagatcaccatcagccatgacaagcctcacggcaagcccggcaccgacgaattcctcgaccgttacatcttcccggacggcgacctcggcgcgcccggcttcatcgaatcgtgcatccatgacgccggcttcaacgtggtgcatcaggagaacctgcgccagcactatgcgctcaccctgcatcactggaaccagaacctctccgagcattgggacgacgcggtcaagcaggtcggctttgaacgcgccaaggtatggggtatgtacatggccgcctgcgctctgaacttcgagctcgacggcatccagattcaccagttcctggctgtcaagccggatcgcgtgggccacccggacggcaagtggtaccctctgcgccaatggtggcaggcctgactccgtttctgtgggacggcacgcggtttttaccattgttcatctgccgtcccacagaagtgtgggatagcagatacatcaatcgtttgacgtatctgctatcccgcatgacataagccgagaaccgcagaatagagccgttctttgccctcagctctgagggcgttcttcgaacgctgtgggacggcacgtcgaaaatcggcaaaatcacgtgccgtcccacacgattcccttcgcacgcgcatttcgcaggtgctttttctgcaatactgactctatgagcgccacagccccagaaacggctggggcggacgatcgcaccgaccatgacacgcgcggataagacccacgtttctttatttaaccctaacccgatgttcgcattggtgctgttggcgtgcgtagttgcggcgaggaagacagttgttggcgaacgcgagcctttgcattgaccggccagcccgccggagtaggtacgtgacggatatgcaaaagccccgcacaaggcggggcttcattgtggtggctccgaacggcgtcgatccgttgacctagcgattttcagtcgctcgctctaccaactgagctacagagccatgaacagtcaaaaacccggataatccgggtttcataaccattccagcgaccccggccggacttgaaccggtgacctccgccgtgacagggcggcgctctaaccaactgagctacggggccattgttctcacttgcgtgaggcaacagatgtatatattactgaaattcgccggtcgtgcaaatttcggcgtgttccgcgtaatttcaaggtttttgctatcaccagcacacggacacgtctgccataaacatccacaaacgacgaagggcgcgaccggaaccccggtcacgcccttatgaacagaagcacttcacggcatccaccgcaaagcaatcgtcaatctcagtcagcctgcttccaggtgtcgacgtcgatgtggtgttcggggttggcctgccaggcatcccacgcggacttgacgatgtcttccacgtcgtacttggcgtgccagcccatctcctcgttgatgcgcttcggggagccgatcaggtgcggcgggtcgccggcgcggcgggccatgacagcctcggtgaacggcagaccggtgaccttcttgacttcgtcgacgatctggcgcacggaggtgccttcaccggtgccgacgttgaaggcgtcgtacttgcgctcgtcacggtcgaggtacttgagggcggcgatgtgggcgtcggccaagtcggagacgtggatgtagtcgcgcacgcaggtgccgtccggggtcgggtagtcgtcgccgaagatggcaggggccttgccctgcttgaggcggttgaacagcatcgggatgaggttcagaatagccgggtcttcgagttcgaccgggccgcagccggccacgttgaagtagcgcagcgcgcagaagcggatgccgaacggctgctcgcaggcgcgagccatccactcgccgaacagcttggtctggccgtaggggttgatcggcagcatcgggacgacgtcctcgggcaccacatcgaccggcggcacaccgtaggtggcggcggaagaggagaagacgagcttcttggcgttcttggactgggtcatgccggtgagcacgttgagcatgccgttgatgttctgctggtagtaccacagcggcttctccacggattcgccgacctgcttgcgcgcggcgaagtggatcacggagtcgacgccttcggcgtcgaggatttcggccagacgctcgccggcacccggagcggcgatatccatgccgtacagacgggagccttcgatgcgggtgggcttgccatagctcagatcgtcgacgacgacgaccttttcgccggcctgatgaagtgcgtgaacgacatgcgcgccgatgtagccgcagcctccggtgacgagaactgtcatagttgacctttccttatgcgggttgcaagtgtcggccgtgtggagttcagcggctgttcacttttggtccgctttgttaccttttgaaacaatttgagtatatcacacgaacataatcgcacaaaacggtggtgtcgtccggcaatatctgcattcattaggtcgatctggcgttcattaggtaggtcggcccggagccggcccgcacgaacaccgggtaaatggcttgatatggtggttggtatcgcacaccacccacctaatgaacgccaaatcgacctaacgaatgaacagcggtgcggcgcacaaggaaaatccgaggaatatatgaccgatcccgaatccacagcaatcgattccgtcgccgcgatggccacagaccacaccgaggcaccggcgcaccccctgcacaaggtgctttccttcgtgcgccgctccggacgtttggacgatcgcctgcagcgcgcctgggacaactatgccgacacatatctgttggacattgcggccggcaacctgctggacgtgcgcgaaggcgtcacgctcgaccgcgcgttcgtggagtcctcatggggcaacgacaatccgctcattgtggaaatcggcaccgggcagggagaaaacgtggcggccgcagccgcggcccatccggagacgaacttcctagccttggaggtctatgaccccggtgtggcccacacgctgctgctcgccggcaagcaggggctgaccaacattcgtgtggcccaggtcaatgcgcccgagctgttcaaggtcaccgcgcccggcaccgtgtccgaggtatggaccttcttccccgatccatggcccaagaagaagcaccacaagcgccgcatcgtgcaggaggccatggccggcgacattcatcgcgcgctggtcacagacggcgtctggcgcatcgccaccgacatcgaggactacgccctgcacgtgcacgaggtgatggacggcctcgatggctggaagaacctgggcagcataaccgtcagcctcccgctggagcacgtgggcaagggcaatgccgacatggccgccgacatgccgcacgccgacttcaccgaatccgagcggttcgagggccgcgtgctcaccaacttcgaaaagaagggcctggccgccggccgcgcgatccacgacttcacctatcaggccgtcaccctgaactgattgcgacacgccgaaatgccgtcgatttgcataaccgaacaacctcccgtaaagtaattcgagttgttcgcccccatcgtctaacggttaggacaccagactttcaatctgacaacgagagttcgactctctctgggggtacccaccggctccggtttcca

SEQ ID NO: 3646 - DNA, 13362 bp, Unknown
  R85_18m  MAG No. k141_39335
ctcatggggcggtatgccagaatggcttaattccgcggtttcacatatctttcaaaccgccccatgggcaagttaccgccctatgggtgttttgccgccccatggatacgccggtgtaccgcccagaagcaacaaaaaacggcgtccagccgtagccggatcgccgctttcgggcatcctcctcaaaccataggaggacaagtgttcagttattcgcccaatgtgaggacaagccccaatcagtcgatgtcggtgccctcgtcgcgggtcggctccttggtggggtcgaagccggagacgatgtacaccacacggcgggcggcggacacggcatgatcgccgagacgctccaggaagcggcccagcagcacgatatccacggtctgctgacgggtgatgtcatcggacagcgccagatcgaaggtctggtggtgcaggttgtccagcttgtcgtcggccaggatgatggcctcggcggtcttggcatcgcgatcggagagcatggccaccagctggtcagcggtgttgtccaggaagtcgatcatctcggcgaacaccggctgagcggattcgggaatcgcggcggccgggtaggtgcggcgagcggcctcggccacgtggcgggcaagatcgcccatacgctcgaacgtggaagccagacgcatggtggaaacgaccacacgcagatcggtggccaccgggttctgcttggcgagcagcttgacgcactggtcgatcacagaggactccagggcatcaatctcgatgtcgccgtcaatcacagtctgtgcggcttcaacgtcctgattcagcagggcttccccagcgcctttgatcgccttgcgcacgttctgcgccatacggtcgaggtcgtcagcaacctgcttcagctcctcgttgaaaataacgcgcatttctctagcctttcatgcttgcttattgcaacctgtaccagtgtattattccagtacttgttccccacttcaacgtaggtaatggcaacctcaagttgttctactgttcattgggttgttcacctgaaattcatgttaccggcgcgccggcaaaccgcaatcccagcgtgtggtgtgaaagaatgggggcatgacacagatgccgctcgtcgccgcgattgctcttattgtcgcggctgttttatttgtggtgggaatcatcacgctcatcgtgggatttgcgacacatcgagtgtccgtggaatcgccgctggccgatgatgacgacaatgacgatctgtccgacgacaccgccacgctgctgtccatgctgccgggtgcgtccgtggtggtcgacgagcacgacgaggtggtccgctgcaatcccgccgcctaccgcctgggtgtggtgtcagatgacgccatcgcccagcagcaggtgctggatgccattcacgaggcgcgcaagtctggtggcaagcgccagttcgacttgaccaccgatactccggagcggtacgtcgcagaccagaacaagggcgatcacgtcgccacgcagtccgtccaccgccccaactggctgaaggtgactgtagggcgtatcaacgagcagttcgtcatcgtgttgattaccgatgtcagtgacgtgattcgtttcgctcaagtgcgtgactcgtttattaccaatgtatccgagcaattgttgggccccactgaagctctggccaaactcgccgattcgctggagtccggcaatctggacgaacagcaggtggctgccgatgctcgccaggtgcgttccagctgcagcaagctcaaccatatggtgtccgatttgctgctgctcatacgcgcacaggagccgattacgccgtcttccgccaaccgactgaacgttatggaacagctcgaggccacggtggcgcgactggagccgcaggcggccgcggctggcgtgcagctgaacatcaagggcgacgatgatctagtcatcaatggtgaggcggatcagatcgacagcgccgtgaccaagctcatcgaaaacgccatcggctattccaaggaaaatggtgtggtcagtgtgtccgcatccaaagacaaggatggcgaccgtgcggtgattcgcgtgatcgaccagggcgcgggcatcgcgaagaaggaccaggcgcgcatcttcgagcggttctaccggggtgcggaacagagcaatcgcacggcggatggcgtgggccttggcttggccatcgtcaagcatgtggctctaacccatcatggcgatgtgaccgtatggagcgcgcccgggcaaggcagtacgttcagcctgacgttgccgttggcgcagtgaactttattactgtccgaggcggcggtagtcccagcggtcgaagtattcccaaatcagcagtagcaagccaataatgacaccggccacgcacataatcaccaacggcattacgctgtagcccacggccagcagaatcagcacgacaatcaacgccacaatccatagaccggtaccgatggcaaacaccttacgcaggtccacccgtacgggcttgggcgcgggtttgcggacggcagggtcaatgagaggcgcgaacttcatactcatgcactgtagtaagagtagggaggggcgtcaaacacctctccctacgatttattcaatcggtatcagttgagaccgatcaatgtgcatggcatatatggtcggccatgcgaggcatagaccgccatcacaggtgctcgaccacatagtcgacgcacttggtgaaggccatgacatcagccggttccaccgaggggaacacgccaacgcgcagctggttgcggcccagcttgcggtagccggcggcgtccacgatgccgttctctcgcaggatggacagtatctgggaggcctggacgcgctcgtccagatcaatggtgaccacggcgttcgagcgggcgtccgcatcgacgacgaacggagcggcgtattcggagcgctcggcccacgagtacaggatggatgcggacttggcgcaacgcgtggtggcccaggcgaggccgccgttgctgttgagccagcgaatctggttttccatcatgatcagggtggccacggcgggcgtattcagggtctgatccttgcgggagttgttcagtgccgtggtcagcgagaggaacggcggcacccagcgatgtgcgccttccagatgagcgcttgattcgacgcatgccgcacgatcgatggcttcgggggagaggatggcgacccacagaccgccatcggcaccgaaggccttctgcggtgagaagtagtagacgtcggtctggctgatgtccacgggcaaagcgccggctgcgctggtgccgtcgatgacggtcagggcaccggcttcacgactgccgggcacgcggcgaatcggggcggccacgccagtggaggtctcgttgtgagcccagcaatatgtgtccacgcccttggtgagctcaggcagacggtaagtgcccggctcgccggggaacagcaccgggtcttcaaggaagggtgcgttcgcggcggacgcggcgaacttggcactgaacgagccatacgtgccgaatgcggcgcgacgggtgatcagcgaagcgcaggcaatctcccagaacgcgctggcgccaccgttgccaagcgccacctcatacccttcaggcaggtggaagaactcgcgcagaccttcacgaatcgaagcgaccagttgcttgactggtgcctggcgatgtgatgtgccaagcagggtggtggcgccggcatcgagcgcggcgatctgttcggggcggattttgctgggaccggagccgaagcgaccatcttctggcttcagcgactcgggaatactcagtgtgatagtcatggtttcaagggtagaccagtgttggggaatatcgcggataatgctcggtgtgcgggattgctgcggggctactgcggaattccggggtgccgggcggtagtagcggcaatgcggaatgcagtgcagaatgtacgcagcacatcatggctacggtgtgtcggaatgacatgagttagtgattcttccgataaccggatagtgaggttcgtgaacgggcggaaacaaggcagtttttcaccctgccgcacggttacgtaaatcgtttgacatgcccggatggtgggggatcgcattgaggattgacctctgttcgttgtacagtactcaattgtgccggtcatacggggtcgttgaaaggaccccgccgaacccatccaaggagttaacgtagtatgaagcatgcttcgcataaagcgaccacggtctcgcgccagaagttcagcttagcgaaggcattgtttgcctccggcaagggttctcattccgttcgtgccgtgcgcgcggtgcaatccgctggcagcgacgccgttgttttggggcttgatccggccattgccgagaagatcaatgaaatcgctccccagactcgtcgttccattcgtgaggccgctcgtgccgctgaacgccgtagccatattcttgcctcggcctcactggccgctctggtcggcacggccgcaggtgctctcgcattttccaacaataaagacgccacgaactcgttcgtggctgatccggccacgacgaccacgcagattaagcgcatcagcgatgtgactgcggcttctcgttccgaagcacgtactgatctgagttcgtcctccgttaccgcacagtccaccaatgaaggcggttgggggctgagcaattcagacagcaccttggacgccaagctgatgaatcgcaataatgcgaacaatcctgtggtgtcggctctcatggatgccgatggcgatgctgtgccggctggcttcaacccgaaccatgccgttggcaccaactccaacaactatccgtggggtcagtgcacgtggtacgcgtaccagcgtcgtgccgaactgggactgccttccagcggcaacttcggcaatggtggcgagtgggcggcgtcagcttccgctctgggctattgggtggacaacactcctcgccatgtcggtgatgctgtggtgttcgctcctggccaggccaatgccgatggcacatacggccatgttgccgttctggaaaagatcaatgccgacggctccattgagatctccgaatccaatgccaagggattgggtgtgatttcgacccgtacgttcagcgccgccgaagccggtaagttccagtacgtccactactgattcatttcattggcttacattcggtgattactgttcggatgtgacgtcgccctatcggcaatcgttcgcgcgaaatgacatttcaagtgttgcgaccgcgtattagtccgaactgacctgtgccgacacgccgatatatcccaatagctccggggtgttttatttcttccatcctgtacgagttaatgcgcaccgtgtaaggtgatggttctatgaagaccaaaactgtagcttcttccattgttgccgcgattgtctcctgtgcttgctcgtttatgtttgttcctacagcgactgcagctgagggtgttactgtgacttccaccaagtccttcccctcgtacacccaggtgcgcaaagatctgacgactgaagccactgccacgaatgttgaggacaatgctgattggggcggcattgagaacctcgacgtgccgcagacggaatctcaggcggaaaaggatgccgcagcggccaagaaggctgccgaagaggaggccaagaagcagacggaggccgaggctcaggcgacccagaagcaggccaacgccgcgagccgtaatgagtctcgctcttctgttacttattccgatgccagtggttcggtttccgctggtgccggtgcctctatcgaccgtgcgtattctttgatcggacagagcatggactgcaccgcattggtcagtcaagcgttggcggcccgtggtattaacttccacggttggcctgaagagtacgtcaatgttcccggtggccacgtagttacagacgggtccctgcagccgggcgatattctgatttatgccaacaccggtggatggaatggcggcgcgcactacgatcatgtggcgctgtatgtcggcaacggtcaggcggtccatggtggctggaacggctacagcgtggctctcgctagcgccatgaccgaaaaactcaccatcgtggtacgtatcccgtgatgcagtcttattgattgatatattgcaggcctcggatgccaatcggtatccgaggcccgttgcgttctcctgccgagtgatacacccgcgacatcatcttcgaaaagacattcctgttatgaaatcgacccatgtgtgctaaggtaaggcgctgatgacgaacgttaagaatattatttccacatcagtggcggttatcgccacgggtgccatgtttgcatgcgtagccccgtttgcctctgccgattccgcgcagacgagtgctgtggtgtcctcacgctctttcccgaaggcgagttcggtgaagaagaatttgttcgccgaatccacctccacttcggttgacgagaactctaaatggggtggcatcgagactcttgatgtgccacagaccgagtctcaggccgagaaggaagctgctgctgcggcggcggctcagaaagccgctgatgaagctgcggcagcccagtccgctgctgctgctgcagccagccgctctgaacagcgtgcgtcgattccacaggttgacttgggtaaaatgactggcactggcgctgagcttgccagcttctcactgaagttccaaggctatccgtatgttgccggcggcaacactccggcaggatgggattgctccggttttgtacagtacgtcttctcccagtttggcatttccctgccgcgaacctctggtgctcaagccactgtgggtactccggtcgcaagcttggcggatgccaagccgggtgacattcttgcgaatggtactcatgcggccatttacatcggtaacggacaggtgatgaatgctatgaacccggtgcagggaacggcaataagcaacgtttccgtgttcggtggagctggatattccattcgccgcgtgatgtaacaagaattatgcggtaagcgaattcgtattaaggcacgtcctttgggatgtgccttttttcgtatacgcggatttctttttgagcggaggataccggccaaaccgagtgtcgcggggtattgttggaggtacgcggtattcgtgccacaataacttcaaggaggtcgtcatgattaacgacaaggccattctcgtcggcgttgacgggtcgcatgccagttacaaggcaacatggtgggccgcgaattatgcaaagcacgcggggctgacgctgcagattgtctgcgcatattccctgccgagctatgccgccgtttcgttcgatgcaacttacacggcgatgggggacgataacgccgcgcattccgatgctcaggagattctggccaaggccaaggccatcgcagacgagcagggcgtcgaagccgccacactgattgttaccggagacccggcatcggtgttcgtcgaattgtcgcgtaactacaatctgatcgtcatcggcaaccgtggcaagggcggtctggccgagcgtctgctgggcaccacgtcctcgtcgctgccggcatacgcctactgcccgattgtagtggtgccgtacaccgatgatgacggcaacctgatgcacctgaacaacacgattaccaaggtggccgtaggctccgacgaatccaagtggggtctgaaggcgctggacattgccgccgacttcgccacgtgctggggtgcggaactggacgtgatttccgctgtgccgaacctgaagggcgtggatggcgaggatgccatcatggagtcctacaaggacgatcttgaggtgcgtatcaagccgttgcaggaatcgcatcctgatctgaaaatcaacaagcagatcgtttccggcccggccgtcagcgcactgaccaaggccagctacgatcacgatgttgttgttgtcggctcccgtggtcgcggcggcttcaccggtctgctgctgggctccaccagccagggactgctgcagcatgcggccggcccggtgtacgtggtgccacgcaagtatgttgaggctgcggaatcgcgtctcgacaccgtgccgagctcgcccgccgaagtgcctaccaagtcgctggaggagattgccggcgtcgaggagattccggtgtccgcagccgagcctgaagtcgcccagcagatcgaaaagaccatcgatcccgacaggcagtaaagtccgggtatacaatgagctccctcatcagagggagctcaatttattagtacgtcggtttattagtacgtcagtgcttgacggtgacgttcatgcgcaccggggtctcctgtacgtaggtgtgcttgaccgtgcagcccttgtcgatatggcgggtgacgcgttccttgagcttgttggcatcctcctcggacaggctggcgtcagaagcatcaatcaccacctgctcctcgaaaccggtgtaggcgtcgttctcggggtcgtacgtgccatccaccacgatcttggcacccttgccctcacccagcgtatgttcgatggcgaactggctggacagcgcggcgcaaccggccagcgcgaccttcatcagatcgcccggcgtgaactggccacgatccttgccgaacttaatgtgcgcgccatcgtcgctgaacgcatcccacgaaccgtccttgttgcgttcaacccacagtcgcttacccatagctgctcctttattttcagccgccggcgatctggcccatcgccatgccagcgggggagcgcggcacctggccgctctcccgcatcatcggacttctctattatgcccctaagctacactggtgcacatggctttgaccgaagaacaactcgcagatattcgctcccgtatccccgcacgtcccgaaacggacattccgatgccctatgaggacctggtgcgcaagatcctgaccgaaggcacgctgaagtccgatcgcaccggcaccggcacgatttccctgttcggccagcagatgcgcttcgacctgtcgaagtacttcccgctgctgaccaccaagaccgtgttcttcaagggcctggcctacgagctgctgtggtttttgaagggttcctccaacatcaactggctgctggagcacaacgtgcatatttgggatgagtgggcggacgagaacggcgacctaggcccggtctatggcgtgcagtggcgttcctggcccgcaccgacccccgaggacccgaatcgcaccatcgaccagatctccaatgtgctcgacctcatcaagcatcatccggattcgcgccgcatgatcgtctccgcgtggaatccggccgaggtggagaagatggcgttgccgccctgccacgcgctcttccagttctacgtggccgacggcaagctaagctgccagctgtaccagcgttcctgcgacatgttcctcggcgtgccgttcaacatcgcttcctactcgctgctcaccatgatgatggcgcagcagaccgggctcaagccgggcgaattcgtctggaccggcggcgactgccacgtctacgacaaccacgtcgaccagttccttgagcagctgggccgcaagccctacccgtacccgaccatcgagattcgtaaggccgattccctgttcgactaccagtatgaggacttcaaggtcgtcggctaccagcatcaccccactattaaggcacctgttgcggtctgatgctgattaccatttcgtggacagcgaagactgtggaggtgacggaccccgagtcttcgctgtccactacactaaggcccagttccgcaatccaggaggagtaagcgaaatggagcatgacagtagccgtagcggctatcacgaacccgagcccggatctgccgggctgtctgccactgaagaagactggggtgacgattatcccaagaccttctcggtgaatcttatctgggccgaagcccgcgacaaggaaggtcgcgccggtgccatcggcctcaatggcggcatgccttggcactgtgccgaggatatgaagcatttcaaggagctgaccgtctcccatccggtgattatgggtcgtaagacttgggaatcgctgggggtcaagtaccggccgctgcccaaccgcgacaacatcgtcgtttcccacgatccgatgtaccgtgcgccgggggccactgtggtcaccagtcttgacgacgcgctcgatatggcccgtcaggaggcgattccggacgacggtctggatcgttcggagatttggatcaccggcggcgcccagctgtacgccgaggcgttgccgttcgcggacaaagcctatgtgactgatctggccgtcactgtggatgccgacagctatgcgcccgatatggcgtcgctggtcgaggccgggatgtggcgggaagccgaagtgggcgagtggcatacgcccgccaaggaggagtccggcatcgattcctatcgtttccgtatcttggctaaaaccaagtgagcatgcgaatccggcttatgccctttatagcggcatgagccggattcatattcattcgaccccaacaatacagtcgggccgtgtgcggcccgttgaagcccgattgaggatttattcaaagctatgagcaatacccagccctacaccgtaatgaccgtctgcaccggcaatatctgccgttcgcctatgggcgagatcattctgcgtcacttctttaatgagcgcggtcttggcgaccaggtgaacgtggaatccagtggtgtgtccgacgaggagtggagccacccgatcgacccgcgtgccgtgcgcgtgctacgcgaacgtggctatggtgatgagattccgcgtgaccacttcgcacaccgcatctcacgtgaggaaatcgaccgtaccgacctgttcctgccgatgaccgcctcccacatgcgcgccctactgcgcatgctgccgtccggcaagcgcgccgaagtgcacatgtaccgcagcttcgacccgaatctgcccaagccgaagcccggccgcgaagatcagatcgatctggtggacccgtggtacggcggcaagcacgagttcgaggtcgccatcgaccagattgaggaagtcgctccgtacatcgtcgattgggtggcgaagcagctgtaggaatcggcctgtggccgatgctgtgtgtttcgcagtcttacgaccgcgggtctctacctccgcttcgctgcgttcagcacctccctcacagagggaggtggtcgccgaaggcgaccggagggagagatcaacgaaggagaagccgagcccaacctcagaacaccagctgcaccagtagcatgtatacgatcgtgccgccggcgattgaaagcagcatactgcgtttccagacgtgcagcagcacgatgacggtgcaggcgatgagttccggaaggccgtgtgaaccggtcagaatcggggtgttgcgcagtgcgtataccaccagcagaccggtcatcgcatagggcaggactcggccgaaatattcgatgacgcgcggcggctgcttggattcgggaaataccaggaacggcagaaaacgggtgcacatcgtccccagcaccaccgtcacgatggtgagcgcgccttgccagatggtcatcgtcatcgcgtctgtccttccttctgctggttcgctgcgtggctcatggcacggtctgccgtggcttccggggcgtcggcggccggccgcaacacatccagatgcgggcgcaacgcgacgaacagtatcagcatggcgatcattgagggaatcatgaaatcattggccccgaatatcagcaggcaggccagcgacgtcagcacaccgatgacggcggacagtcgctcgcgatgcttgccggcgagccactgatcgaggaagatcaccagaaacagcgcggtcagtacgaaatcaagaccgtcggtattgaacggcagatgcgcgccaatcagcccgcccagtgtggcgccggtcacccaatacagctggttgcacagcgtgacccagaagtagaaccagcttcggtcgataccggcggggattttcgcggtggagttgatggcaaaggtctcgtcgcacatgccgaaaatcaggtacggacgcttccagccgagccccttgaatttgccgagcatggatagtccataaaacaggtgacgggcgttgaccatcagggccagcagaaagccggcgagtgggttgaacgcggagagcagcagattcaccgtgacgaattccatcgaaccggcgaagatgaacgcgctcatgcacatcggccatacaaacgagaagcccttggtgcccatgagaatgccgtatgaggcgccgagaaacaggaatcccaggcaaatcggtatggtcagcggaaacgccgctttgagcgccggcaaccaggcgttggtgttggcggtgtctgccatgtggatgatgttctccttgtgcaactggtctgccggccgatattcgccgataatgccatatgtggttatacacgcatggtgccgataaacgaggtgaggacggtgtcgggactctgtgcgcgaagtcacagtgtggatgatgtcacatcgtctacggtgggacagtccttgtggtgggcgtgaacacgtgctgagatgaaagcatgagcacatatcaaggtaacgaaccatcgcaaatcgtctacaccgctacggcgcaggttacgggcggccgcaacggccacgccgtgagccatgagccggaactggagttcgacctggacacgccggtcgccatgggcggcaagggtcagggcacgaaccccgagcagctgttcgccatcggctggggcgcctgcttccaaggagcgttggcgcttgccgccaaggagcagcgcgtggcggccaccaagctggccaagagtcaggtgcgcgccagcatctcgctcggtcctgaaggcgagtccttcggcctgaagggcaagattgaggtagttctgcccgatcttgacgatgaggctgccgccaagctcgtcgagcgtacgcaggagctgtgcccctactccaaggccaccgcgggcaacgtgcccaccgaggtcgttgtggtgaagtcgctggactgaagccttccgggttgaaacccgagtccaagcattcggcccgtttccttcagggaagcgggccgaatgctttcaggcctggtcccgcgaatacgaaaagacctcggtcgctatgaccgaggtcttcaaagaagtacccccagagagggggatacgaaaggcaattgcctcaagagcaaacggcaaatccttcaaatgtatatttacttattatcaatctgaattttaggtatagcaacgattcccgcctccttccagtagacacgcgagcggtgttgctcctta

SEQ ID NO: 3647 - DNA, 4941 bp, Unknown
  R85_18m  MAG No. k141_39546
cgaagccgacgcacaggaacaccatgttggcgaagaagttgtgctggccgacgacctgtccgtccagcaggaacgggaagagcgcggcgaacacgacgagtgcgcaggaggagaaggtcagcacgcgcttgcggccgatcttgtccgcgtacaggcaggacagcacgatgaacagggcgaacacgcagatggagatcatgagcatgagcaggtattcctggttggtgaagccaaggccgccgccgccttcgccctgctccttggtgccccaagcgagggaccaggtggcgagcgtgtagaacagcgtgtaggtcacggccacgaggaaggtggcctgcagcacctgacgccaagacttgcggaagacctcggtcagcggggacttgacgaccttcttctgctcctgagccatacggaagatcggggtctcctccatgtgaacgcgaaccacgaggccgacgatcaccaggatggcggacagcaggaacggcacacgccagccccaagccagcatcgcgtcctgattgttgaaggattcgagcacgaagtaggtgccgttggacaggaagaagccgatcggggcaccgagctccgggaaggagccgtacagtgcgcgcttgtcttcaggcgcgttctcggtggcgaccagtgccgcgccggaccattcgccgcccaggccgatgccctggatgaagcgcagcaggcagaggatggcgactgcgccaacgccgacctgatcgtaggtgggcaggcagccaatcaggaaggtgccgacacccatggtcatcaggctgacgaccagcgtggtcttgcggcccatgcggtcaccgaagtggccgaagatcagcgagcccagcgggcgggcgatgaaggcgatggcgaaggtcagcaagctcatcagcagtgcgacggtggggttgtccttcgcggagaagaagatgtgcgggaagtagtttgccgcggcggtgccgtaggcgtagaagtcatagaattcgatggcggtaccgaccatcgatgcggcgatcacggtcttgaccgaatcgcgtaccaaggtagcggctttacctgccgcctgccctaagccagtctcttcgactgctgcagtcattgttactcctgttttgctctcgttcactctcattggcgggcgattatttcgtctcacagggaggttgttgttctgttgctgtgttgttgccgtgtactgtccgctaccgtttccgtctgcgggattctgccgtaagccttgtgagcgcaacaaaaaaagccccgcatcttgcagggccttaccgattgtgtcagcttgattggccctgccttcgttgacggggcttcaagcatcaatgccgaattagtccgccagcgaagacgggctaataattcgtgcggatacaaacgcagaagcattgaatccagtcatcgcgtggcctcctttcggtatttcctcaggccgttcgacctgaactggaatgtaaacataggtttggctgtcttgccaatccagcaagggttcacattgtggacgccacgtcgccgagacgaacgcccccgccgcggggaggaacgccgccggcggccggggagccggaccggcccgtcattgcgcggactcggcggtgagggtgacgattccggccagcagcaccatgacgatggcggacgggaagagcaggtaatagccgaagctgtgctcgaaggcgttcaccagtagcgcgccgatgatggcggcgagcgccagtccgaccgaattggccagcgcatagatgccgagatcatgaccggcgttgcgcgggtcgggtagggcattcattaccagttcaaggcctaacgcatcgtagacgccgaaggcgaatccggagatcagcgcgaagagcagcatgccgttttcgcgtgccgtgccggtggaccagacgccgagcccccatgccaccgccacgccgatggcatacagcaggcaggatgccgccaccactgcagtggtggcgatgttccgttcctcgatcttctcggagatcggcccagcggcccaggacgcgagcgcagcaccgatgagcgttgccgcggccatgccggcgatgaggaggcccgcgggaatggtcaatggcgcggaagtgaacaccacagccttgccatacacccaaaagcgcacgagataccacagaaagaccccggtcagcccaacgcccgtcatcatgcacacgcgagcggcgaacacacgggcgaatgcaggcgcatgtgccggcggacgcagctggtcaaacacctggctcgactcgaatcgttgatgtggctgctcctggctggaaggctccttgggcagcatgatcacggtcaggatgccggaaaccgcaaacagcacggcggtgtaggcaaacggcgtgaaggagtcgaacatcacgccgagcgcacccatgcatacaccaagcgcttggccaagcatcacgccgataccgtgccagcgctcaatgcgcggacggaatttgtccggaacccgttcgctgatggcgctggccaacggcacggaaatcatcgcataggcaaactgcatgagcgcccagaagaaacacagccctacgaggcctgtgttccgccccagaaccagcgtgatcagcgcgcacagcacgccacccgccaccatccacggggtacggcggcccagaggaatacgtgtgcggtcggacagcgcggagaccaagggcatcgcgaacatggaggccaccacgccaacgaccaccagcacggccagaggcaccaccaagtcagtggcgacgggcagcggacggccggtggacggattgatggtgaccgatatggcagaagcggtgtcgtagtcgaacaaacgcgccacggcgttgggcatggcgatggtgttcaacgccgcccaaggcgcgccgaccagaatcgaagccacgaaaaagccccaattaagacgggaaatctgaacagcggtgggtcgctgaccattggcggcgaccatcggatcgcgcatatcgagatatgcagacgacagatcaggcgcaggggcatccacgctggccgcggcagcggcagcagccgacgaaccggcggccgccagacgcacggcctgggcctcgggctgatcggcggatgcctcgggaggacgccgacgatctttgatggccagtcgggccacggcatccttgtcttcgggactcaatgccttgtcgagatccgggcggtcgtcaatacccgggcgcacgtacggttccaacatgttgctgctctttctttgctctcatcaccggcgggaggtaccggccagctccggctgagcatgacccgcaaccccgtcacatgcaaaaccgcccgagcgcactagcttcagtgcactgcgggcggtttgttttccatggacccagcttacgccggacgcactacttggagcgcgcacagcggagtggcgtttatgggccaacggttagtcgatatcggcaatcggcgggttgctcagcagatcatcagtctcgtggtcaccggcggcatcggtccaggcgaggctggcgaccggagtggtgttatccgtgccgagtccgcggccgggctcgaagatgagggcggccttggtcttgccgtcggcagcgatccagcggaaggtgatggatgtgtcgccgtcggcttcgtagctgaactcgccattgaatgcaggcagttcgttgcggaacttggccagggcgttcagggccttcaccaccgggcgctcgaggttttcgtcgatttcggcggtggagtagtaatggcgattgatgtcacggccgttgttggtcttgcgcagcagttccatgtcgttgcggccggcgagcgcgcccacgtagtagacctgcggcactccgggcaggaagaactggactgcgcgggcggccagatagtgctggtcgttgcagccgagcgcggagtagtacgtgctgttgacctgatagaggtcgaggttgctggcggcggcaccggtggcggcctgggattcgccgtgggtgttggcgtggatggtgttgaccagattatcgacgtcctcgtcgggcacgaggcccttgaggctgcggtcgagctgatcggagccgatgtcgatcacgccgatgccgtcgtgcgtatcgagcacggtgacggcgttgttcgggcggatttcggtccagtggaccacgggttccacgtgaccggtgaacagcgagtgcaggagcagcggaggcagggcgaagtcgtagacgcggtccaccttggaggcgatttcaacctgcttcttgtagtagctatgcacctcaatgagaatttcgaggcctcgcttgacgccttcctcgcgtaggcgtgagatgagcttaaaggtcttgggggtcatgaagcagctggtgccggcctccttggcgccgtagcccacggcgtcgagacggatgtagctgacgtgggatgcggccatctgatcgaagatggacatgaggtattcccagcccttgtcggaatcggtgtcaatatcaacctgctgcggagtgaagctgacccagaccaggcgggtcttgccggcgaacttgtagtgggtgaacggcaggcccgggcgcgggcggtagatgccggccagttcctcttcggtggcgccgttcgggaagacggagctcatggtcagaaacatcgggtaatactcggattcctcacctttttcaagcacgtcttggaactgcttggattcccagctcatgtggttgacgatggcatcgaccatgatgccgtgggtcttggaaagttcagcgacgtcgtcccagctgccgagacgcgggtcgactttggtgtggtcgatcgggtcaaagcctgcatccgcaccatcgaacggagtgaagaacggcaggatatgcacgccgtcatacacgccgtcgaagcgggtgcgcaggatgtcggtcatcgagctaagagtgccatcgccgagacgatcggcgtaag

SEQ ID NO: 3648 - DNA, 9352 bp, Unknown
  R85_18m  MAG No. k141_40302
actgcgccgccaaggccggttacgcttccgaaaaccagccggaaaacggcggtttgccggacaacgacaacctcgagccgctgttcgaggccatcatctccaccatcccggcccccgaatacgaggaaggcgccccgctgcaggctcacgtggccaacatcgactcctccgacttcctcggccgactcggtttggtccgtatctacaacggcacccttgagaagggcaagacctatggtctgtcccgtgtggatggctctctcgagaacttccgcgtctccgaactgctgcgcacgcagggcctcgagcgcaccccggtcgagtccgcgggccccggcgacatcgtggccgtcgccggcgtcaacgacatcatgatcggcgagaccatcgtcgaccccaacgacccgaagccgctgccgctcatccacgtggacgatccggccatctccatgaccttcggcaccaacgactccccgctggccggcaccgagggcaaggaccacaagctcaccgcccgcatgatcaaggaccgtctggatcgcgagctcatcggcaacgtctccatcaaggtgttgcccaccgaccgccccgacgcctgggaggtccagggccgtggcgagctggcgctggccgtgctcgccgagcagatgcgtcgcgaaggctacgagctgaccgtcggccgcccgcaggtggtcaccaagaagatcgacggtgtggtcaacgagccgatggaaaataccaccatcgacgtgccggaagagtacatgggtaccgtcacccagctcatggccgaccgtaagggccgtatggacggcatgaccaaccacggctccggttgggtccgcctgcagttcaccgtgccgtcccgtggtctgatcggcttccgcacggctctgctgtccgccactcgcggcaccggcatttcctcctccatctccgctggctatgctccgtgggctggtgccatcaccattcgtcagaacggttccatggtttccgatcgtcagggtgtggccactccgtatgccatgcagcgtctgcaggcccgtggcaacttcttcgtcgaaccgcagtccccggtgtacgagggtcaggtcgtgggcgtgaacaacaagcccgacgagctggatgtgaacatcacgctggccaagcacatgaccaacatgcgttcctccaccgctgacgtgctcgaaaccctgaccccgccgatcaagatgagccttgaggagtccctggacttcgccaacgaggacgagtgcgtggaagtcaccccggagtccatccgcgtgcgcaagatcatcctcggccgtgaggactggtacaagtggcgcgccaagcagcgccgccagaacgccgcccagcagggtaagtgatctggtgcgactgtagccgaccattctctctggctcccctctctgaggggagccaagtttattcctcgccaagtcatatccccacctatactgaaacgcatgactgtgaagagcactactgaactgcgtccgtggtcgtatcgccagaacgcgctggtcaaatcgttgatcacgattgcggcgggcgtggcttccgcctttgtgggcacgttcgcccaccgtatgggtgcagaactgagtattccgtatggtctggtgctggcatttctgctgatcggcctatcgacatggtgcgcccgttcgcgcatgggcgcggtcggactggccctgcacctcatcgcctcctcgctgaccgcatggggcatggcactgaccaccacatccggcaaggcggtcatcgtcgccggattccaaggcgacatgccgttcttctcccagcatgccggctacatctggctgtacggcctgatactggtccaagtcgtcctgctcattcttcccgcccgctggttcgttattcccactcattctgaatcgcgcgcgtaactatatatggcggcacatttccgcgaatgcgtcgcgtatcggcgggcgtaggggattacggccgctaccatagaaccttatggcacgcatgaaactgttttacttgggcccggaaggcaccttcacccatcaggcggcaatgacggccgccgaccagttcgccacactcggcgacttcgacctcaccgccctgcccgacgtgcccgcgatcatgcaggccgtacagtcgcgccaaggctggggcgtcatcgcatgggaaaacaacgtcgaaggctatgtggtcccgaatctcgacgcgctgatcgacgcccccgacgcggccggcttcgcccggatcagtgtggacgtggccttcaacgccttcaccgtgcgcggccacagcatctgcgactgcaccggcaaccccgtcagcgcccacccgcacggcctggcccaatgcacccggttcatcgccgaacaccatttgcagcccgaacccgcatcctccaacgccgccgcctgccgcgacctgaagcccggccgcgtggcgctcggccccagcatctgcggcgaactctacgatctcgacaccctcgccgaacatgtgcaggatttcgatggcgcgcacaccgaattccttgtcatcgccccgcgtgatgtggtccaggaattcaacgcccgcgcccaccgcaatgacgccggcgacttcgaaaccatcatcaccttcatcccgctggtcaccggccccggcgtgctcgccgacctgctggacgtcctgcgtgatgcggggctgaacatgaccagcttcatctcgcgcccgatcaaaggccacgacggaacctacagcttcatcgccacccttgacgccgccccctgggagccaagattccgcaccgcactggaagagatcgccggacacggcgactgggcaaaaaccctggccgtctacccacgccgcgaacgcccgaacccgccggtcgacgcctggatgctgcccgagggcggcgtccacatcaccaatcgcgcgtcggaaggctggcagtacgccgagggagcaaggaaggaactgctgtggtagacacagtcggaatcgtcggactcggattgattggcggctcgctcgcacgccgcctgaccgagcgcggcgtacgcgtcatcgcgtggaaccatcgctcacacccctacgcccaggccgaagccgatggcattttctgcaagagcacgctctccgaactcatggatgccgagccggatgtggtcgtgctgtgcaatccgctcaaggcgatgccctcaatcctcgccgccctagccccgcttatgggcgaccatccgaacaccacgctcaccgacgtgggctcagtcaagggcatggtccgcgatcaggtcaaggctgccgcgctggggaagtgctacgtcggcgcccatccgatggccggcaacgaactgtccggctggcaggccgccgacccgcatctgtacgacggtgccctatgggccatcaccgtggacgagtccacggactaccgccgcttcctcgacgtcgccacgatgatcaccaaggacgtcggcaaccgcgtcatcgtcgtggacgacgagacgcatgacaaggccgcggcgatgatctcccacatgccgcatgtggtgtccaccgcgctgatcaacgaactggtcgccaacccggaccgcaacatcgccgccgcgctggctgccggctgctggagggacatgacccgcgtgtccctgaccgacccggaccgcacgcgcgcgatggtcgaggaagactcgctgaacgtcgaagtgctgctgcgccgcatggcggcacgtctgaccgatatggccgaccaactgcacgctggtgccgacggcgagcaggatgtgatgggattcttcgccgaaggcgaccccttccgccggtacaaggccgccgtgacgcgagccggcatcaccgctgcacaagctggtacggccaccgcgcagcaagccggcacaactgccgccggattcccggaacgcgagctcgccgtccccgaagccggctggcagcagaccttgctgttctccgcacgccggggagaagccatcaccggtttcatccatccgcgtcaggccatcgtccaactgcgccccgccatgtaactgcgccccgccatgcagcccgtgtgcaggttcccctcgccgcccgtcacgaagaaggctgcgcgagggggatgaagttcccgcttgttttcgtgagaagaccgtgtggctccgctgttcgaaagacccaaaggagtaaggtagtctgtaccgtttttcaggaaacgcatagaagttgatgcggcggatggctaaggggatgatgacgtatgacgttaccaaggcagattccggccggtgcccgcgtggtggtgcgcatcaccgacggcattgacccggtcgaccaccgtatgaagttccgcgactatgtggggcatgtggtttcctgggatggatacacgttggagatggtgcgtgacgccgccgccaatggttcgcgcccggcccagaacgtgaccatccatcaggaacagattgccacattgaaacccgtgccggagcggcgtaacacgccaccccggccgtaacccaaggccataaagaattcggaggagaacgagagtgtcatctacgcagttcgacggcgatatcgactccttcgtctcctatctgaagtccaaccgcggcctgtcagcgaatacgctcaaagcgtatcgcgcggatctcacggcatgcctgcatctgttcgagctgcgcggcgtgaccgatctgaacgagatcacgctggatgatctgcgcagctggatggcggtggaatcgcgcgatcacgcccgcagcagcatggcccgcaaaaccgtggccgtgcgcgggttcttcgcgtgggcctatgagcatgggctgaccaccaccgacccggccgccacactgatgactccctcgattcccagcacgctgcccgcggtgctcaccgaatcccaggccgagcaattattggatgtcgctgaacatgccgttgcaacaaaccagtacaaggacgatgggggagcggcagccgcgtccggcagcggcagcggcaagacagctgataagtcggccgataccgtaaaccgcagtgaggcacccgcccgtgcagacaagcgcgacaacgcccgagtcaccgccgaatcgcagcgcaacgccgcgattctcgaactgctgtatgccaccggcatccgtgtcgccgaactggtgtcgatggatatcgccgacatcgacttctccaatcgcaccatcaaagtcaccggcaaaggcaacaagcaacgcgtggtgccgttcggactacccgcccagcgtgcgctggagacttggctggaacaggggcggccggtactggcccgtacggcaacggatgcagtcaagtcccgtgctgccaacgccctgttcctcggcgcacgaggcggccgtatcgaccaacgcatagcccgtgacatcgtgcacagagcggcccgagaggccggcgtgccggacatcagcccccatgcgttgcgtcattccgccgccacgcacatactggacggcggtgccgatttgagggaggtgcaggagatgctcgggcattcctccttgaaaactacacaacgctatacgcacgtctccatcgagcagctcaagaaccgttacggacaggcctttccgcgggcatgaccactatgtggacattggttaacaaactcagcaaagactgaacctagccggcaagaacccctgaattttacatgggtgtaacaaaaaatacactgcttgtctcccaagtgcgcaaaaatgacaggtaatcagcaacggggttggattgttcgagacatcgtgagatgcaagtctcacggtgacggggaatccagccccgtttgcatgaggcggggctgagacgtcctgcaacctaatgaataggagaaatcatatgaagaagaaagctcttgctttcgctgccatggcctgctccgtggccatgctgctgagcgcctgcggcggctccaacagcaacgctgcctccggtaacaccgctggctccaacatcatcactgcgtacaactccgaaccgcagaacccgctgatcccgggcaacaccaacgaaaccggcggcggcaagccggtcgacctgctgttctcccgtctggtctccttcgacaaggacggcaaggcttccaacgaagtggccgagtccatcaccccgaacgatgacgccacccagtacaccatcaagatcaagtctggctggaagttcaccgacggcactccggtgaccgctgagtccttcaccaaggcctggtcctacgtggccaacgccaagaacgcccagaagtgctcctccttcttctccaccatcgccggctatgacgatctgcagaaggatggcctcaagggtgacgagcagctctccggcctcaaggtcgtggacgacaccaccttcaccgtcgacctgaaccagtccgactccgtgttcccgattaaggtcggctactcggccttcgccccgctgcccgagtccttctacaaggacccgaaggccttcggccagaagccgatcggcaacggcccgtacaagctggaccactgggatcacaacaaggaaatcgccctcgtcaagaaccctgactacaagggtaacgagcagcccaagaacgacggcgtgaccttcaaggtctacaccgacgactccgccgcttaccgtgacattcaggccggcaacctcgacgtgatggaatccgtcccggccgccttcaccaagaccttcaagaccgacaagaaggtccaggcttactccgaggtcggctccgtcatccagaccttcaccatcccgtcctcccttgatcacttcaagaacgacgaggaaggtcagctgcgtcgtcaggccatctccatggccatcaaccgtgaccagctcatcgacaaggtgctcaacggcaacgccgccgccgccaccgagttcacctccccgaagaccccgggctactccgactccctcaagggtgccgacaacctgaagttcaacgcctccaaggccaaggaactgtgggccaaggctgacgccatctccaagtacgacggccagctcaccttctcctacaacgccgatggtggtgccaagccgctttacgacgccgtcgtgaaccagctcaagaacaacttgggcatcgacgcggccaccaacccgatcccgaccttccaggagttccgtgacgccgtcaccaaccgtcagatgaagggcgccttccgtaccggctggcagcctgactacccgtccgccgagaactacctgtggcagctgtactccaccgctgctgctgacggcaacggctccaacgacggtgactacaagaacccggccttcgacgacatgtgcaagcaggccgccgccgcttccagcaccgatgacgccaacaagctgtaccagcaggctgaggaaatcctcctcaacgaccttccggccatcccgctgtactactccaacgcctccggcgcggcttccctcagcgtgaagtccggctacgccttcgattggcagaacctcccgacctacaccgagatgtccaagaagtgagtctgactcactgaacggataccgttaggcagttcggaaataaagggcgaggatcgcaagatccccgccctttttgttgtgtgaggggtgcttgctcacgccatcgggaaccaagttaaagtatccactatccgaccgcaaccatggacatatccaccagcattgcccaatctcaaaccttgcgttaacgcaaatttacatatcacagtccgggcatgcggtaaactgtcggagtatttatcgaccggcgggggcgtactataccctttctggccggtctaggaaataaggagcaaccgtatgggtaagtatcttctgcgacgcattctgcagatgattcccgtggttctcggtacgactcttctggtatatgcccttgtattcgccctgccgggcgaccccgtcaaggccatgttcggagacaagcctgtcaatgaggccgtcgcagcccagatccgcgcagaataccatctcgaccagccgttcatcgttcagtactttatctacctgaagaatgcactgaccctgaacttcggcgataccttcgccgggcagcctgttctcgacgaaatcgcccgcgccttcccggtcaccatccggctcggcctgatggcgttcgtgttcgaggcgattttcggtgtggtcttcggcatcatctcgggcctcaagaagggcaagtggtacgacaccgtcatcctgatcgtctccctgctgcttatttccgtgccgaccttcgtcaccggcttcgtcatgcaatatgtctttggtattcagtgggcgatattgccggtgacggcaggcgccgaccccggcttccttgatctgctcatgccggccatggtgctcggttcggtgtcgatggcctatatcatccgactgacccgctccgaaatctcctccaacatcgccgaggattacgtgcgcaccgcacgtgccaaaggtatgtcgaacggtcaggtcatgctgcgccacgtgttacgtaactccctgattccagtcgtcacttacctcggccaggacatcggcgccctgatgggtggtgccatgatcaccgagcagatcttcaacatccacggcatcggcttcctcacctaccagtccattctgaagggcgaggcaaacctggtggtgtccatcgtcacgttgctcatgctgattttcgtagtgtgcaacctcgttgtcgacatgctgtacgcggccctcgatccgcgtatccgttacgcgtgatagggaggagtgagtcacatggcaaacgaaaccactgaaaacgagctcaaccagaccggcgagccaggaaccgaatacttcatggaaaccctgcccggtcaggaccgttacgtagctcctctcgacgagaccccgttgcaggacgtcgattccgtcgacgaatccgcaccggcccccagcatgtgggccgacgcatggcgaaccctgcgccgcaacccgctgttcatcatctccggcttgctgatcctgttcatcatcgtggtggccatcgcccccggtctgttcaccaagcaggatccgaacgcctgcgatctgggcaactccttgagccccgcctccgccggacaccccttcggctacgacctgcagggctgcgacgtgtacacccgcgtggtctacggcacccgtacctcactgtctgtcggcgtgctctccacgctgctggtcgtgatcgtcggcaccctgatcggcgccgtcgccggcttcttcggcggttgggtcgacgcggtgctgagccgtatcaccgacatcttcttcgcgctgcctatgctgcttggcgccatcgtggtgcttcagatgttcaagacctccaagtccatctggaagatcgtgctggtgctgacgctcttcggct

SEQ ID NO: 3649 - DNA, 13020 bp, Unknown
  R85_18m  MAG No. k141_40514
cgagtcccagccgtacaacaaggaggcgctgaaggccgcgggcgtgccggtggtgtacacgggtccggtggaccgttacttcggttacgagcttggcgacctgaagtggcgcacggtggacttcaaggaggtccgttacgatgagggcgatcatttcggttgcccggtgatgaacttctccgacgcggacgtgccgtacacgagggctatcgagttcaagaacttcaatccggagcgccgggaccggcagaatccggacaagaccgtggtgtgggaggagtacagccgtttcgccgagcgcggcgacgaaccgtactacccggtgaacaccgatgcggacaaggccctgtacgcgcggtacgaggccaaggccgcggccgagccgaacaccgtgttcggcggccgcttgggcacctacaagtactatgacatgcaccaggtgatcgacaccgccctgaccgcctacgaggaacaggtcgcgccgctgctgaagaagtagaccgtcgtttcaccagaggattaacgatttagcttgaaaccgactgaatattgctgaggcaatagccggtttcaggcttttgtgttttttgggaagccaaatttcctggggtacttaaggctcgccacgaggagtacagttgtctgtaacgcacaatgtggcgcgtaagacgaggggcgtatctcgcaagtggggtgcgatgcagttgaaggagtgcatgtcatgactgatccgaatgccaatccgaacggccaggtgccggggcagcaagctgacgccaatccgactgagccgttaaatgcgatgacgggggaagcaggaaccgccgccaacaatgctccaacccaagcactcgcagcgggcgaacagcccactcaggcgttcactcctgttgagcagcctacgcaggcgtttacacctgccgagcagtccacccagcctcttgcgccggtcaatcagccggtaccgcctacgcaggctttgccaccagtgactcctgccgctgcgcccgcgcccgcaccgacagcgcccgcgcccgcgcccgcaccggcagcacccaattcgccctatccggggacggctccggcagcgtcagtgctccggtatccgggcggcggggccgtgcctccgcaaacgccctataacccgtatatgcaaggcggccaaccgaacggccagccgggatggtctggttcttacggcagtgtgccgcctgaagcgaaccagaagtacaacggcctggctattgccggttttatctgctcgttccttgtctcactccccggtctgatcctgagcatcgtgggcctcaaccagattaagaaacagggcggcaagggcaagggcttggccatcgccggcatcatcatcagtgcggcgggcatggtgatacaggtaatactggtcatcgcgctgatcgtcggcggtgtctcgtacaccagcaaggctatagatgaggcgaaaaccgattccttctatagtcagtcctcttcgggcaacggtgatagcagcgataagagcaaagctcaagataatcttgacgatgcgctggacgacacgttggacgaaacccatgacgatctaaccgacggcgattatgggctgtacgattcgattcaggatttcgtcgactattcggaattcaaggactccattgaatccgaagcggatacgtttgcagataccggcatcaccttcaactaccgtgtcgacggtgacaccttggtgtacgagtacgtgctcgacgacagctacgcctcgctaggcgataccgtcgcttcctcactggatgctatggacagcacctatcaatccaccgcgaatctgctgggctcgatgtgcaagacctccagcggcaaggcatcattgcgcgtcatcatgcacacgcaaagcggccagtcgctgtacgacaaaacctggaccgaaaagtagcaatcccagcgaacgtgcgttttggtcgattgaaggccggtatgcttgctccttggacggatgcttctgcggaaggaaccgccaaggagtaggcttacaggcatgagactcgcacgtttttctttgaatgattcgccgcgctacgccttcgtacaaaaggacgaaacggacggcaaggactacctcatcgaacttgacggccatccgctggccggcgaccaggtcaagcctaccggcaaccggtacccggtcgacggcgacggcatccgcctgctctccccggtcatcccctccaaggtttacggtctggccaagaactacgaggcccacgcccagttcatgcacgaggccggccactccgaaatcgcccacgcgccggaagacatggtgatcttcaccaagccgtccacctcggtaatcggccccgacgatccgatcgtgtacccggcctgctccaaggacatgaacttcgagccggaagtggccgtggtgatgggccgtatcgccaagaacgtgtccgttgaaaacgcgatggattacgtgctcggcttcacctgcgtgaacgacgtgacgttgcgcgacctgcagggcatcgaccccacgtggacgcgcgccaagggcttcgatacttcctgcccgcttggcccgtggattgtgatgcgtgacgacctcgactggaaggacgccaagatttccttcacgctgaacggcgaggatgtgccgatggcgtctggcaccaccgcgaacctgattcacggcatccccgagcagattgccgcgatttcgtcgttctccacgctgctgcctggtgacgtcatcatgaccggcaccccgaacgcctccggccacctcgacccaggcgacgagaccatcgtgcacgtcgagggcatcggcgatctgcgcaacgtaatcgttcgggcgtgattcgactgacgaacgcatggcccggtcattttcctatttgggggatgtccgggccttcgtgctttgtttcatatatttcatctatatatgcatctgtctaatgtacagatgattttttcgcgaaatctaagtgttgcaccaagctatatgttacacttatttcagttatgaaatgaggtatgtgcattatgactgcagtaatagaacgtgaacagcttacagaacgcgatttggatcaggcgaaggcgtgccgagagctggtgcaaaaaggctctgtactcgctgcaattttggatggcattattgacgataatgtactggtggttcgcaaggacgaagaattatcccctgctcaagctgctgagattcttggcgtgagtcggccctatgtgactcgtttgctgaagtcaggactgctcgaatctcatatggtgggcagtcatcatcggattacggtacttgctttgcggacgtacatggctaatcgtgatgcgggacgtaaggaatacgcccacgcaatcaattctcgggcaaaggatattgccgatgcggttgacgaagtcgctccggtgtctgagacaagtcgaaatcgtatgcgtgatttagttgcagagcatcgccgtgaagcgatcaaagcgagtagtgccgcagtttctcccgcagagtgaggattgtctcaggcgaatcgtagtgaatctattgtctgtgcgatttacccggtatgcgtcaagtcatgactattgctcaggcgtgtaattacgtctcagatactccttgacttccagtatgtcttggcaatcggggcatgcaggaagtcctgagtattcatctctggttggcacgaaccatttcccgcacagagaacggatgagggtgccttcaacatatgcgtcggtcagagtctctttgggtacgcgatgtagcatagattctggctcggtgtcgcctatcgtcttgtataacgattcggaatcatcgaggaagttcgggcttgtgatgcgcttgatgtcgtctggttccagcagcacgaatgctgacatagttgcgcgtctttgctgaccgtcgctgtatgtcttcaacgacgtttctgctggctgattggggtctttgggctggcagatggcgttaaagcatctcaagaggatgcggtgaagtcgggcgtatggagaactgttgtcctgttcctcgaccggaaaatcaagggtcaattcaacgaattgattgacagttgctgagtcgtcatcgtcatcttgctgaatctgaatactggcctttacgggggctcctgaaatctgataggggatatccagcgctgagagggcttcggactgggaagttgtttggcccgcataaattcctgcacgaattttgttaagcatctcctgaacgactcgtcgctcaaaatccagaaaatgctgacgttcttcttctcgtttccgaaccagataatcttcttcgctgggcatatagttgctggcgttggaagccttaatgattgatttgcaattgcctgaatggaaatccccatgcgatccgcaatagaccatccacgggtcgccatattggtcaagaatgacgatgcctcgccagccggtttgcttgttccttatttcatagactgggcgctttgccacagcgctaaattccgaatgcttggtggcagcgattttgtcaccagcgaaagcctgacgagccatattgagtagtgtgacgtcgaatgcggtgaaatcaagaccttcgaacggtgttactgcttccgtccgcatgttctgttcaatgagttgttgagggttctctgagttgaagagattattgtcaatcatgctcaacagaacttgaattgtagggcgaactggtctcatgatgattaaccatagtcggtgatgcagcttagtcagtgattgatatcacatagaagaagtattgctctttttggctcccctcgtgtctgggcccgtaattcccccttacgctcccggcagaagtgcgtgcagggcggtcatcaccaccaagctgatgatggccgtcactgtcagcgagaagccggcgagcttggcgttgccggttagcgaatcggtgaacttggttgagaagatcgtgataggggcgaacgagcccaacacgatgatctcgcgaatcctcatgtcgaatggcagtaggaaccaggcggccacggcgataatcgcgccgaataccatgcgccagacaatcaccttgcccaactccaccttgtccttgcgattgttcggaatctccatcatcagtccgatcatggccatcgcgcagaaggcgttcgcattggcgaacggggtgatgagcgtaacgatgggctgtgggatcgtgatgtgcaggaacatgaacaccagcatcagcatgtagatgtcgaaggaaatcgagcttaggaagtccctggcaatattgcgcagacgcaggatgagcggtagcgacttgaaattgtcatccatatgcagcagcgtgcgtgtgatggtcagtgacccggccgtggccacggtggcgttgccgatatcgagcatgatgatcggcagaccggcggacgggcccatgaacgtctgaaccacaggcaggcagaacgcgcccaggttcaggcccgaggcgttgagcatctggaaggcgcggtagttcttctcgtcgccgcgagaaccgaaatacacgatgaacagcggaatcgcgcaggcgaagaagccgaacaacacgatccacagcatgcgcatgtcgtgcttgttcgtggcgaacgacaggataatcgcacaaggaagcgtcagattgaataccagaccctgcacgattttgtaatcacgctcgccgaaaatgtggacatgtttgagtatgtagacaccgatgataacgagcagcagcgaaccggcctgaaaaatcatgttcttctcttatcccacaagcacccgccgcagcaccggcggcggtcaggcgcataacaaaccagccgtgagtataggagcgttcgcgcggcgctggcgcggggcggtgcatattgtggacagtcccgtaacgttgatatgccatgctggcgagatgaatatatccaataccaagtggagctcggcacgatagagaggtaggaaaacatggcagagcagacggtcaccgtaggcgttggggcattgagcatcgaggacgttatcgccgtagcgcgcggcggtgccaaagtggcgatttcggacgaatcgaagcatgagatggcgctaagtcgcgcggttatcgatcatttggccgacgacaccgtgccgcattacggtatctccaccggattcggcgcgctggcctccacttccatccccaaggaacagcgcgcgcagctgcagaaaagtctgatccgctcacatgccgccggtgccggaccggaagtggagcgtgaggtggtgcgcggcctgctggtgctgcgcctgagcaccctgtgcaccggacgcaccggtgtgcgcccggaaaccgcgcaggtctacgccgatatgctgaacgccggcatcaccccggtggtctacgaatacggttcgctcggatgctccggtgatttggcgccgctcgccgcctgcgctttggtggcgatgggcgaaggcgaggcccgcaacgctgacggccgcaagatcggcggcggcgaagcgctgcgtgcggccggcatcacgcccgtcgatttgaaagagaaggaaggcttggcgctggtcaacggcaccgacggcatgctcggcatgttgtgtatggccatcaccgatctgcgcctgctactcaagacggcggacatcgccgccgcgatgagcgtggaaggcatgctcggcaacgaccgcgtgttcgccgccgacttgcaggcgctgcgtccgcatcgcggccaaggcgattccgccgcgaacatcgtccgcatgctcaagggctccggtctgatcgaggccggccgcccgggctccaccgtgcgtgtgcaggacgcctactcgctgcgctgcaccccgcaggtgcacggcgccgcccgcgacaccgtggaatacgcggcctccgtggcgggcgtggaactcgcctccgccatcgacaacccgtgcgtcacgctggacggccgtgtggagtccaacggcaacttccatggcgcgccgctggcctatgtgctcgatttcctggcgattccgactgccgacgtagcctctatctccgagcgtcgtaccgaccgcttccttgacgtggcgcgcaaccgcggcctgccggcgttcctggctggtgacccgggcgtggactccggtttcatgatcgcccagtacaccgccgccggcatcgtctccgaaatgaagcgcaacgccgtgcccgcctcggtcgattcgattccgagctccgccatgcaggaagatcacgtgtcgatgggctgggccgccgcccgcaagctgcgccggtcgattccggcctttgcgcgcgtgctggccgtggaactgctgtgctcctgccgctccttcgacttccgcaagccgtaccgtccgggtgcggcgggcgccgccgtataccgcgtggtgcgccagtacgccaacgaaatcggccccgacgtacgcgatacctggaccaccccgcaaatcgaaggcgtagccaacgccatcctctccggcgaaatcctatccgccgccgaagctgccgtcggcctcctgaaatagatgtgagctccctcatcagagggggctactgttcaccctccccaccaaaatccaaaacttgagtcacctgcactcaagttttgggaatagaatgggttctaggtcggttgaccatatcagataacgacaagttgtggtctgcggtggcgcttgcggggctttcgaagcccgcgagccgctccgcgcgggccgcatgatatggaggaatacgatatggaacagaagttcaccactatggcccaggaggccgtcggcgacgcgattcagagtgcgtccgccgcaggaaacgcgcaggttgagaccctgcacgtcatggatgcgttgctgcgtcaggaaaacggcgtggtgcgctccctcatcgaggccgcgggcggagacccacaggccatcggcgccgccgtgcgtaacgctttggtcgcactgccgagcgcatccggctccagcacttcgcagccgcaagccagccgccagctgaccgccgccatcgcccaggctgagaaggaaatgcagcagatgggcgacgaatacgtctccaccgagcacctgcttatcggcatcgcggccagcaagccgaaccagtcggccgaaatcctggagaagaatggcgtcaccgcagcctccctgcgcaaggccgtacccggcgtgcgtggcggcgcgaaggtcaccagcccggacgcggaaggctcgtacaaggccctggagaagtactccaccgacctgacggccgccgccaaggaaggcaagctcgatccggtgatcggccgtgatcaggaaatccgccgcgtgattcagatcctctcccgtcgtaccaagaacaacccggtgctgatcggcgagcccggcgtcggcaagaccgccgtcgtggaaggcctggcccagcgtatcgtggcgggcgacgtgcccaccaccctgcaaggcaagaagctcatctcctttgacctaggctccatggtggccggctcgaagtaccgtggcgagttcgaggagcgcctgaagagcgtcctcaacgaaatcaagaccgcggacggccagatcatcaccttcatcgacgagattcacaccatcgtcggcgcgggtgcggccgaaggttcgatggacgccggcaatatgctgaagcctatgctggcccgtggcgagctgcgcctgatcggcgcgaccacgctggacgagtaccgcgagaacatcgaaaaggatccggcattggaacgccgtttccaacaggtgttcgtgggcgagccgagcgtggaagacaccatcgccatcctgcgtggcctgaagcagcgttacgaggcgcaccacaaggtgacaatcggcgatgacgcgctggttgccgccgcgaccctctcgaaccgttatattccgggccgtcagctgccggacaaggccatcgacctggtcgatgaggcggctgcccacctgcgtatggagctcgactcctcgcctgaggagatcgatgaactgcagcgcaaggtgacccgtcttgaaatggaggaaatgcagctcaagaaggctgaggatcctgcatccaaggagcgtctgggcaagctgcaagccgaactcgcggacacccgtgagaagctcagcggcctcaaggcgcgttgggatgcggagcaggccggccacaacaaggtcggtgacctgcgtgccaagctcgatgacctgcgtgtgcaggcggacaagttcacccgtgagggaaatctggctgaggcctcgaagattctgtacggagagattccggctattcagaaggaactcgccgccgcggaaagcgcggatgccgaatctgccgatgccggcgcggccaacccggccgatgagccgatggtcccggaccgtgtggacgccgactcggtggccgagatcgtctccgactggaccggcattcccgttggccgcctgatgcagggcgagaacgagaagctgctgcatatggaggactacctgggcaagcgtgtgatcggccagaaggaagccatcgccgccgtgtccgacgcggtgcgccgttcgcgtgccggcatctccgacccgaaccgtccgaccggatcgttcctgttcctcggtcccaccggtgtgggcaagaccgaactggccaaggcgctcgccgacttcctgttcgacgacgagaaggccatggtccgcatcgacatgtccgaatacatggagaaggcttcagtctcgcgcctgatcggtgcggctccgggctacgtgggctacgagcagggcggccagctgaccgaggccgtgcgccgccgcccgtattccgtggtgctgttcgacgaggtcgagaaggccaatccggagatcttcgacgtgctgctgcaggtgctcgacgatggccgcctgaccgatggccagggcaggaccgtggacttcaagaacacgatcctgatcatgacctccaacctcggctcgcagttcctcgtgaacgaggacatggacgccgacgccaagaagaaggccgtgatggacgccgtccacatgaacttcaagccggagttcctgaaccgtctggacgacatcgtcatgttccacccgctcacgcgtgaggagcttggcggcatcgtggatatccaggtggccggggtggcccagcgtctgaccgatcgccgcatcacgctggacgtcaccgactcggctcgcgaatggctggccaacaccggttacgacccggcttatggcgctcgtccgctgcgccgcctggtacagaccgaagtgggcgaccagctggcccgtatgctgctggccggcaaggtccacgatggcgacaccgtgctcgtcgaccagaccggcggcgagcatctggagctttccgcctgggccagcgaccagatcgtctccgacgacccggatgtgagcgtggacaacgttaccgaagataagtgacaatcactggctcccctctctgagcgaagctgactgaggggagttcgggcggtttcgcaacagtgatttttctctgcaaaatctcttaaacaggtgggtatggtagcagtcatacccactttttcgtctttgtgggtctatctcgatttcgaggggctgatttgccccctttcggaggtctacttccgtttcgaggggctgctcttctgccgaaccgcgagtatcagcggctttatggcaacgccattccgccattgttgcgccgtgtctacttggctaccagccccttgaaatggaagtagacctcctgcaacatcgaaatcagccccttgaaacggaagtatctgtccgatccgtctcaattgtgttccccaagagtggaagaaccgtggcatcaaggtgttcactgtcgcatatggtaggaaagtgagtgttaacggacgaagggagagccagtgaccggacgattggcgccgacgccgtcggggcgcatgcatatcggcaacgtgtacgccatgttgggtgcatggctttcggcccgttcgcgtggcgaccgcatgctgatgcgtatcgaagacgtggacaagccgcgcgtggttgccggtgcggaccagctcatgatggacgacctgcattggctcggcctcgactgggatggcgaaccgatgttccaatcccagcgcactgagcgctacgaatacgctctcgaatgcctgcgctcgcaaggtgtgctatacccctgtttctgctcgcgtgccgacattcgcgccgcctcggcccccaacgagggcgacggcttcatggtgtaccccggcacgtgccgccgcctgctgcacgaccatcccgacgaggtccgtgcccgtctgtctcgcggcgaccagcattccatccgtatcgccatgccgaaaccggcagcgggagaaaagcaacgtacagtgcctgacgattccgctgcgctgtcgggagccgtgccgccggaacagcagggcgatgccggaatcgttgatggtgtcgcatgctttaacgaccgtgtctatagtccacagcactacgatttggcccgcgaggtaggcgattccgtgattcgccgagccgatggactgttcggctatcaactggtcgtggtcgtggatgacctcgatatggatgttgatgatatcgtgcgcggccgtgatctgctgcgctccaccgcgctgcaaatgtggattcgccagtgtctgttggctggcggctttgagccggaatgcggcaacacggaaaagcctctcgccgagcaccccgagtatgcgcacctgccgctcatcgacaatgcggccggtcggcgtttagccaagcgcgaacgttcgctggatatgggagccttgcgcgcccgcaacgtaacccccgagcaaatcatcggatactgcgcctggttgctgcgtctgcaacccactccaatcccttgcaaacccgccgatctgctggcagatttcagctgggagccgctgcgtgccaaccacctggaccgcgcgctgaaaccggacgatccaaccactccacaatggctggcagaagcgttaggctagaggtagcccaacaggaaggattccaatgtcgtcgaagctctggagaaacgtggcgatggcaggcgtggccgccgccggtgctgccgtgtgggccgtggccccgcgcacgttcaatgacaagcgtcgtaatttcgtgccctccattccgaaggtatggtatgcccatcgtggcttgcacgatgcgggttctggtttggtcggctataccgatatcgctgattatggtggggataattcggtcagcgcccaagccgataccactgagcgatccatcgccgaaaacgatgattatgtgtcgcttgcccgtcgcatggctgtcaaggccggctacggcagtgcggatatgaccggtccgatcgctcctgaaaactcgctggccgcattcgccgccgcctgcgaggctggctatggcatcgaactcgacgtgcagcttacgctcgacggtcaagtggtcgtggtccatgacgccgatttgctgcgcgtggccggcgatccgcgccgcatcgaagatctgacgtacgacgaactgacccgtattccgctgttcccgaacggcaagtccggtgacttgaaggccgaaccgttgccgggtgccgacgcgaacccgccgctggtggtcacgccgtccgccgcgccgaaggggtactaccagcatgtgccgctgttctccgatgtgctggacgtggtggccggccaggctccgctgattgtggaatacaagttcagcgacaacaaggcttgggatgagcgtagcgaagagctcatggaaaagggccacgccttgcttgaggcgtatgacggcccgtacgtgatcgaatccttccatccgggcgcggtgaattggtacaaggagcatcaccctgaggtgtgccgcggtcagctgagctggccggcgaagctgagcaagaatggtgcggctgaatgggccgccggcttactggcgttcgactggctgtctcgtcctgatttcgtggcctatgactggaccggtggcgcttcgccgcaagtcaggctcgctcgttcgatgggtgcgatgccggtttcatggaccgtgcgcagc

SEQ ID NO: 3650 - DNA, 12787 bp, Unknown
  R85_18m  MAG No. k141_40809
tcacggcatctggagctcctacgagtccttcgtccacgtgatcgactccatgctgaaccagcacgccaagtggcttgaggctaccgtccgcgagattccgtggcgcaagccgatcgcctccatgaacctgctggtctcctcccacgtttggcgtcaggaccacaacggcttctcccaccaggacccgggtgtcacctccgtcctgctgaacaagtgcttccacaacgaccacgtcatcggcatctacttcgccaccgatgcgaacatgctgctggccatcgccgagaagtgctacaagtccaccaacaagatcaacgccatcatcgccggcaagcagcctgctgccacctggctgaccctggacgaggctcgtgccgagctcgagaagggtgccgccgcttgggattgggcttccaccgccaagaacaacgatgaggccgaggtcgtgcttgccgccgccggcgatgttccgactcaggagatcatggctgcttccgacaagctgaaggaactgggcgtcaagttcaaggttgtgaacgttgccgacctgctctccctgcagtccgccaaggagaacgacgaggctctgaccgacgaggagttcgccgacatcttcaccgccgacaagccggtgctgttcgcgtaccactcctacgctcacgacgtgcgcggcctgatctacgaccgtccgaaccacgacaacttcaacgtccacggctacgaggaggagggctccaccaccaccccgtacgacatggttcgtgtcaaccgcatcgaccgctacgagctgaccgctgaggccctgcgcatgatcgacgccgacaagtacgccgacaagatcgacgagctcgagaagttccgtgatgaggccttccagttcgccgtcgacaagggctacgaccacccggactacaccgactgggtgtactccggcgtgaacaccgacaagaagggtgccgtcaccgctaccgccgctaccgctggcgacaacgagtgataacacctccacggtgttgttagttcgctaacgccaaagggctcgggattcgtcccgagccctttgcttattcataagccccctctgacgaggaggctgtcatgcgaagcatgactgggggagagaaaagcggaagcgaaggcgagagccaagactgaaaacagcccataaattccccaccccaactaatccttaaggatgacaactccccatcaattcaatcctgcgcatgatggaaaccacgccattcctccataggcttggaaccagtatccgggcgcgaggctcggagccagccatgggggagagcacatgcagaaggatcagcagcagaccgcaatcatacaaccgttggacgctaccgacaccgtggaatcaagtgtcgacgcccttgcccaaggcgaggcggagaacgcggaagtcgccgaattcaaccgattaatgcgcgaacgtgagacgcgcaagaaaaagcgcgtggtgcatcgcatcatcgccgtcgccgtcgtggcggtactgattatcggctttatggtggtgcacgcgattattaccccgtcagatgggggcgtgtctccggtatccacggcaacggtggaacgtggccatttcgtcgaccaagtcagctccaccggttccatagaacccatcaactccaccgtcgtcgccccgcagatcgacggcaccatcggcgaagtcaaggtgcaggaaggcgcaaccgtcaacgccggcgacgtactgtttaccatcaacaacgacaagctcgatagcgacgtgaatcaggccgatctggctctgcgagcagcgaactcaaaccttaatgccgcccagcagcaggtgaaccaaatcaatgcgaccataggtcaggcacgtaatcaggatggtgaggaaggccaagccgctgccgatgatgcggccggacagctgcccgctgcacaaagcggcgtggagagcgcgcaggtcgccgttcagcaagcacaagccacctatgacgaggcggtcgcccaagccaacaagcgtacggtcactgctccggtctcgggcacggtgctgaccatgaacgcggtgcccggtgccgccatcggagcttcctccgatggctcattcacttccgccggcgcagacggtaaaccattgtgtcagatcgccgacctgagtcagatgaaggtcaatgtcaacatcaatgagctggatatcactaaagtggccaaggaccagagcgccaaagtcacgttctccgcggtgccgggactgacgctcgatgccaaggtggataccatcgccagcaccacgtcgcagttggctgattcctcggcaggcgggcagagtggcaacggcggcgtgggatacgccgtgcgtctcatcattcccgcccctgatccgaaactgaagccgggcatgacggccagtgtgaaaatcaccatgcagagcattgacaacgttttgatggtgccgctcgccgccatcgtggatgagggtaaggagagcagcgcggtcatgctcgagaccaacgccgaaacccatgagttcaagcgggtgcgagtcacggtcaaagccaagaacaacaccaaagccgttgtggaaggcaatgtgagcaagggcgatgtcatcatgcttgatggcgcttcggctgccgacaatactggcgatgctgcttcttccacctcgcaaaccgcggcttcggacgaaagggcacgctgatatgttcccgtttcgttccgacgcgagccgggcaaatcgcggcaaacggcgtaatgagaccattgccgtgcccaccgccacagccaacgtcatcgaggttgaaaacatcaaccgcatcttcgagacaggcgacacctacacccatgtgctcaaaggcatcaccatgaacgtgcgccaaggcgagttcctcgccatcatgggaccatccggttccggcaaatccacgctgatgaacacgctgggcctgctcgaccgcccatcatccggcacctaccgcctgtgcggcatggacgtgcagaatctgagtgatgacgaacgctccgaactgcgcgggtggctcatcggcttcgtgttccaatccttcaatctgctgccgcgcaccagcgtgctgcgcaacgtgatgctgcccctggcctattccgactgcccggtgcgtgaacgggaagggcgtgccatcaaagcactccaatcagtggcgttgagtccggaactgttcgaccgcaaaaccaatgaactctccggtggtcagatgcagcgcgtggccatcgccagagcgttggtacaggacccgccgctgattctcggcgacgagccgaccggcaacctggactccaaaaccggcgatgcggtgatgcacacgttcgaacagctcaagcagcaaggcaaaaccatcgtgctcatcacccacagccccgaagtggccgaacgcgccgaccgatgcctgcacatgcgtgacggcgtactgcgtgaagggatgtaccgatgagaacacgggatctgctggcggaaaccggctccgcactgagggcgaacaaaggcaaaagcgcactgaccattctcggcatcgtcatcggcattgccgcggtgattaccatgacctcactgatcggtggcattcgagactctctggtcggcgaactgggtatgaacgcggcgcgcacgatttcgatttacacggacgtcggcacccttgacgacgaacagatcactgcgatgcgcgaggaactgaccgactacgagtacttctcgccgacgaactatggtgccgcctcgtcaatcgccgcgcccggtaccaccgacaaggtgtcggcgagcatcaccggtgtcgacgagcatttcttcgatgtatccggagtgacgattggtcgtggacgggccttcacatcgagtgaagcaacgagtggtgcaatggtggtgattctcgacgggcagggcgtgcagaagctgttcggcagcgcggacattgacgccatcggcagaaccgtcacgcttgacggcaatgaagcaaccgttgtgggtgtggtcgagtcgtctggattgatgggcggcatgggcggcgacagcgtgaatatctatatgcctgccaccactgtggcgctgcggtttgcgtcctcgaacatgggatacatgcagatctacggactggccaaggacggggttgatatcgaccagctcacggaacagacgaagaccgttgtcgctcgcatcatgcgtatcccaaccgaacagatcgaccagaatctgtcggtcgtaagcgcccaatcctccatcgaccagctttccagcttcatgagcgcattccaggtgctggcgggttcggtggccggggtctcgttgctggtgggcggcatcggcattatgaacatgatgctcaccaacgttaccgaacgcatccgcgaaattggcctgcgccgggcattgggtgccactcggcgtgacgtgaccgcgcagttcctcgccgaatccattgcaatcacagtgcttggaggtcttatcggcacgttgatcggctacttgctgtcgttgggcgccgctggattggtgtccggcatcgccggtggcatgagtatcgcgccagcagtttccgtgcagtccatcggactggcagtgggcatctgcatcgctgtcggcgtgattttcggctactatccagctaggcgcgcggcaaagctcgacccggtcgaggcgctacggcatcaataatcgcgtagcaccccgaaatgcagtagggcattgcgcacaccgtcgtggtccacgtcgtcggtgatgtaatcggcggcggcctttggctcggcggtcgcattgcccatcgcgaccccgatgccggcgtaggcgagcatatccgtgtcattgccgccatcgccgaaggccatggtctgcccgcgcgtgatgccgtaatgcgccatgaaccgctggatgccgcgcggcttgccgccatcggccggaatcagatccgtgaaatccggatgccaacgcaccccgcgcacattgctgcacagtcccaccagttcggcctccaactcgggtccgacaaagggactgatctggaaagtctcatgatccagcgcgcgggtgcgcgggtcctcaaaataccgggtcggtgcggttttgcccagtttgctccacgtggcgcgaagcagatcattggactggttgaagtacacgtaatccttctcgccgaaattgcacaccacatcggggtgacggtccagccagtcgagaatcacctcaatatcagcagtatccaaggcctgcgaggcaaagaagccggtgtcatcaaagcaatactgcccattgaacgccaccacgccatcgaacgtcaccggcatggtatccagcaccacgtgcatctgtgaaggcgcgcggcccgtgcaaatcagcaccttgacgcctgcggcctgcagccggtgaatcgcctcgattgtggaatccggcaccgtatgggtcgtgaaactggtgagcgtgccatcgatatcgaagaatacggctcggatatcggcattggcagtatcggtagtcatagcttccattgtcaaagcccctctcgacgtgctttccggcgtgttcgacacgcctatagcgggttatcaaacgcacgaatcccggccattgcatgcgcgccataaaagacacctatacggcaatcggccattttccgtcactttcgcggttcaagcgcgttatggtgttacccgacatcaattttggagagaggaaatccaatgacagcagcaacccagtcggcaactccggccgctcctaacaataacgagccggtgcgtgtgaaccacaccgtccgcaacgtcatcatcaccatcgtggtcgtggcgattatcgccgtggccgcgttcttcggctaccgcgcgtttgccggtgccaacgagtcgtccgccaagggcagcaagggcaacccggtcaagatcggcgtggtcggcgctaccaaccccgaatgggtcaagttcaagcaggacgccgagaaggccggcatctacgtcgacatcgtcgacttccaggactacacctccgaaaacccggcccttgactccggcgagctggacctcaacgaattccagcacctgctctacttggccaactacaacgtgagcaacaagaaggacctgcagcccatcggcggcaccgccatctacccgctcggcgtgtactccaccaaggtcaaggacatcaaggacctgaagcagggcgacaccgtcaccattccgaacgacgaaaccaaccaggcccgcgctatcggcgtgctcaaggccgccggtctcgtgacgctcaagggcgactggaccgccttctccactccggccgacatcgacgaagccaagagcaaggtcaaggtcaccccgctcaaggccgaacaggtggccaccaccctgaaggacccgaccatcgccgctggtgtgatcaacaacgactacgtggccgacgccggtctcaacccgaaggacgccatctaccaggatgacgccgaatccgaagaagctcgcccctacatcaacgtgtgggtggcccgcaaggcggacgtgaacaacgagacctacaagaagctcgtttccatctaccagcagaaggatgtgctcgacgccctgcaggagaactccggcggtaccgcggtgttcgccgacaagttcagcgccagcgagctgcaaggcttcctgtccgacattgagaaggacgccaaagcccagcagtgagccgtggctgatacgagtgcacgactaacctgtccatagccattaccaccaagcggagcgagtacccgagccaacaatcgggattcgctccgcttccgtgaccggacatcaacaaccagcatcagggagcactatgagcgaccccatcatcaccttcgaccatgtcgtgaaggaattcaaaacacgcggacgcggcgcgaacatcgcacgagccgtggatgacgtcagcctgaccatcgatcgcggcgacatcttcggcatcatcggctattccggtgcaggcaaatccacactggtccggcttatcaacgcgctcgaacgacccacctccggcaccgtgaccgtgctcggcaccgatatcacctctttgagtgagaccaagctgcggcccatccgccagaaaatcggcatgattttccagcagttcaacctgttctccaccaaaaccgtggcgcagaacatcgcctacccgctgcaactcgatcactggcgcaaggactatcaggatcgtcgcgtcaacgaacttctcgaattcgtgggccttagtgagcacgcaaacaaatacccctcgcagctgtccggcggccagaagcagcgcgtcggcatcgcccgcgcactggccactaatccggagattctgctcgccgacgaagccaccagcgcgctcgacccggaaaccaccaccgaagtgctggccttgctcaagcgtgtgaacgaggaattcggcatcaccattgtgcttatcacccatcagatgaacgtggtccagcagattgccggccgcgtggccgtaatgagcgccggacgcgtggtcgaatccggcgacgtatacgacgtgttcgccgcgccccagcagccggtgaccaagcgattcatcgccaccgccctgtccggcctgcccgaggaagaccgggtcgagcgattgcaccacgaatggtcgggccgcatcgtcaccgtgctcatccgccaaaaggacgtttccggcagccatggccacgaactcaaggcatccggacagaacatctccgaactcatcgccaaatacggcgtcgaatccagcctgctctacggcggcatcgacacggtcaaggggaccgccatcggtgccatcacctacgaattcaacgggcccggctggcacgtggacgaattcctgcgcgagctcgccgccaatagcgacgtcattgacttcggcaccgccgcaaagcccgtggcttacgccgacgcagttgccggacatgcctcctacgccgaagaccgcgcccatgacccactggcggccgatactgccaccgcgcccgctgtatccgccgccgcacatgaaggagacaacgcatgatcatcctcgccaactcgcgtagcgactggaacgtgctgcgcccactattgttcgaatccatcggccagaccctgaccatggtgctcgtcacccttgtcatcggcggattcctcggcctgatcctcggcgtggtgctctatggcacccgccccggcaacctgttcgagaacgcggtcgtctaccgcatccttgacatcatcgtcaacatcgtgcgcccgattccgttcatcattttcctggcagccatgcagccgctcaccatcgtcgtggtcggcacgtccatcggcaccgtggccgccatcttcccgatggtggtcatgtgcaccttcgccacttctcgtctggtcgaacagaatctcgtgccggtcgacccgggagtaatcgaggccgcgcgttcgatgggtgccggcaagctcaccatcatccgcaccgtactcatccccgaagccctggcaccgctgatcctggcctacgccttcctgttcatcggcgtgcttgacatgtctgccatggccggctacatcggcggtggcggtctcggtaacttcgccatcgcctacggctaccagaagttcgaccagaccgtcacctggacggccgtgatcatcatgatcgtactggtccaggtggtgcagggcatcgccaacgccatcgccaaacgactgctcaaacgccagcaataacaaggcatactgaccccatagatcgcggccctcgccaatatgaagcgagggccgcaatatattcttcgcgctactagaatcgggaaccatgagtgaacatatcgacatcgaccacgaactcatcaccatccgccactacctgcacgcccatccggagcgtagtttccgtgaattcgacaccagcatctatctgaccgaccagctcaaggcgcacggcatcgagatcctgcacaacccgctggagactggtgttgtggggctcattcagggcgaggccggtcccgggccgcgtatcgggctgcgcgccgacatcgacggcctgcccatcgtggaagactccggactggagttcagctccgtcaatgaaggcgtgatgcacggctgcggccacgacctgcacatgaccggtctgctcggtgccgccttctggctcgccgagcaccgtgacaagttcgccggctcaatcaagattctgttccagccgagtgaggagaccggccaaggcgctcgcgccatgatcgacgccggactcgtggatgacgtcgaagccattatcggcacgcacaacaaccccaactatgcgtccggccagctggccatcggcgtcgagccgatgatggccggctgcgtgaaattccgcgtgaccctccacgcccaaggcacccacgccggctacccgtacaagggcaccgggcccatcgaagcgctcgccagtattattctgagcctgcagaccatcgtgagccgcaacgtcacgcccttccacccgctggtgctgtccgttaccgaagtgcacggcggccatgtgtggaacgtggtgcccgccgaagccggattccaagggactgtgcgctatttccacaagtcggatggcaatctggtcggccgtcgattcaaggaagtggtggaacacaccgccgaggcatacggtatcagcgccgatgtggtctgggatgatttccaagacccgctggtctccgatccaggtcttgccaaggccgtggcggcggatgtcaacgactacgcgcagctcgaaccgatacgtcagtcgatggcgggggaggacttctgcgaattcgccaaggtgacgttgccggtgttcgcgttcgtcgggtcaaacggccaggaaggttgcgccgactggcatagcccgcatttcgtgggtctcgacgaatccattcccaccttcgtcaacttctacgtcaacgccgccctgcgcgtgctcaacgagctgaggtaaatccttttttggctcccctctggaggctgaggcgttaggcagacagcccaatgggctgtctgcagccgaaggtgaggcgacagccgaaccagatatgcgcgggcctcgcccgtccataagtgcaggacgagctatcagcgaagctgactgaggggagtggcattcgttcattaggtcgattcatcgtccattaggtcggtgaacggcgatactggttgttggaatcgcgccattgcaacgactgatatctcattgcagtgacctaatgaacgcaaaaacgacctaatgaatgacgccaagccggaagaacaggcaatccgacgccatacgcggctacactaagaagctatgacacagcttcgcttcgcactcgcccagatcgacacctgcgtcggcgcgctcgatgccaacgccgccaaagtgctcgactactcccgtaaagccgccgcagggaatgcccaagtggttgttttcccggaaatgaccctcaccggataccccatcgaagatctggccctgcgccgcaccttccgccaagccgcatgggacaaggccaacgaactcgccgcccagctcaacgacgacggcctcggcaatctgttcgtggtggttggcaccgtgggcactgatcgtaagacctccaagccgcgcaaccgactggtggtattgcatcagggcgtggtctgggccggctacgacaagcacttcctgcccaactacggcgtgttcgacgaattccgtatcttctccgccggcgaccgttccgtgaccctcgacgtggatggtgccaccatcggcgtggccatctgcgaggacatctggcaggatggtggcccggtggccgacctggccaccaagaacatcgacctgctgctcaccatcaacggctcgccgtatgaggaaggcaagaccaacacccgtttcgagctcgcccagcgtcgtgccgccgaagtcaacgccccggtcatctacctgaatcaggtcggcggtcaggacgacctggtcttcgacggtggcagcttcgtggtcgatgccgacggcacgcttatcgaacgcggcccgatgttcatggaaaacctgacgttctgggacttcgattccaccgccgaacatcaggtcaaggccgagatcgttccggaactcgacccggacgaagaggtatacactgcctgcgtgctcggcctcaaggactacatggccaagaaccacttcaccggcgtgacgctgggcctctcaggaggcatcgactccgcactggtagccgccatggcggccgacgcatgcggcggcgagaacgtctggggcatctccatgccctccatgtactcctccgatggttccaaagacgacgccgctgacctggcctccaacatcggtgcccattacgaggtccagcctattgagctattgttcaacgcctaccaacagcaacttgaccttgatggcgtctccgccgagaacctgcaggcccgcatccgcggtgtgatcgtgatggccagttccaattctcgcggcctgctcgccgtggccaccggcaacaagtcagagctcgcctgcggctactcaaccatctacggcgatgcggtcggcggctacgcacccatcaaggacctgctcaagacccgtgtctgggagatcagccgttggcgtaacaaggccgcggccgcaggcgtcggtatcggcgggctcaagatcgtgggcaacgaggacggcaacgccggcatcccgttgaaggacggcgtgatgattccggtctcatccatcgagaaggctccctcggccgagttgcgccccgggcagaaggactccgactccctgcccgaatacgcgctgctcgacaaggtgctcgctgcatacatcgagcacgcgcacggccgcgccgacctgttggccgacggcttcgaccaggccaccgtggacactgtgatgcgattggtggaccgcgccgaatggaagcgccgccaatacccgttgggaccgaaggtcacggccctcgcgttcggccgcgaccgccgactgcccgtcaccaacgcgttcagggaataaacatatattgctcccgccagcgggagcaagtaataccgttgaggaggtaccaatgacagacgataacaagaagcagtggtatttcaacaccgtcaagaagcaggccgagctgggcatggtctcaccgattgaacagcgcatgggtccgtacaagaccaaggaagatgccgaacacgcctgggacatcgtggtggaccgcaacgccagatgggaggaggagaactggcgctggaagaactacggtgtgaaatccgcgcaagcgaacgatgaagactgacggccaaaacagacggatacggttctgctgtcaatctcaagaccgaaccgctcaccaagccgctcatacgaacatcacagtatgagcggtttcccatatctggagacgtgcaatagccccatcaatacctagaaaccattggaatggtagcgttcacaaaaaacaatgtgagatagctcactcccaatttcggcttttcccaagcaagtgccaactacactgttgaaccaagggttccgtgaagatgcgaaacctacaaccccatttaaggagtgacatgaccgcagtagaaaatgcagctgtctcccaagaggagctcgacgccaaggcgtgggccggcttcaccgagggcaactggcagaaggatattgacgtccgcgacttcatccagaagaactataccccgtacgagggcgacgagacattcctggctcctgccaccgagaagaccaagcacctgtggaagtacctcgacgacaactacctggccgtggagcgcaagcagcgcgtctacgacgtggaca

SEQ ID NO: 3651 - DNA, 5591 bp, Unknown
  R85_18m  MAG No. k141_40954
aagcgcggcgcttggctatgacgtgccgctgatggcccagctgccgctggaacccgaagtgcgcgagatcggcgaagcaggccgtcccgcggtgctggatgtcgatggcgccttgcgcacggatggcgtcggtcaggtcttccgagggttggctgaacggctgttggcagtgtgagcctgcgcggcctcacacttttgtaggcggcgctggcgtttaagtccggctcgctgctggtgggcgaatcgcttgaccacagcacccgcgacctggtggtcgaggcagtggagcgcactgccggcgtggataggctgcattaacctgcaggccattcacatggacgaggacgccgtgccgcgctgccttggtatgaatgggggatctacgtcgagcccgatgtctggcgggcacctcgcggtaaatagcggcatagcgcattatcggtgcgatgctaagaggtaatggcccatgagcggttccaatcggcgagattgcgttgccgggacaccacgacatgggccatctcgataaaacgatgccgcgtgtcggctgttctcaggtcatccgcagtgacgagaatggcgatccagccgagcagttgcaatgcgtttcgctttgccgcgtcaattcgcatttgtgccggatcggcgtgataggctccctgatattcgaacgcgacgcggcagtccggatatgccatatccaatatgacgtatgagttgccgatattcacgcgatagttggcggtggggcatcccaagcccgaatccttcagcatcccaaacagcgtgttttccggcggagaatccgtgttctctgtcatgtagggcagtgcctcgtggcatttgttacgacctatgaaccgcggactgatttccaagtaagtatcgaaatccttgcgagtggccattctgcgccgtttatcgcggctcatcaaagaggctccaatggccgcaagttcctccaatgtggagtattgggccatctgagcccacatcatgaccggcgaggcaatccagaaatgttcatagtcctttttgcggatatccagttttcccttaaacacatggaagaccacgcctttgattcgtctgcgtttgttggcactggaaacacaggcgtgcacggcatcaacagatagcgtgcaatgtcgggggatgggcgcgccgtagtagttggccgcattgatgtatcccaccagcaatggaccttttgaacggcgcgcagcatcattgcaacgttcacgttctgctcggcgtcggccgacaatatcctcatgcataaaagagctcatgatgcgaccgtaaagctgatttggacttgaatgcaagccaggcagggcaatgtggttccagcttatggagttatccacattgtctatttgcgcagagaacggttctcagtagtatctgtgcgctcaaatgaacaagaacataacaatctcacatcatcgcaaatggcgacatggcagtgattagggcatattccatgtgcgcttcgggcgtagagaagtgcgcacggatattattgagaaccgttctctgcgcgcctactctccggtggagcctctggccacgacctcggtgggcaggaacaccgtgcgctggaacggtcggccctcgatctggtcaagcactagggtggccaagctgacgccgaatgcgtccattggctggcgcacggtggtcagctgcgggtgcagggctgtggcgtcggcgctgtcgtcgaagccggcaatggcaatatcgtcgggcacacgcacgccgcggtcgagcagataattcatggctccagcggcgatgcaatcactgccgcatatcagcgcgtcgatatgatgctcggcgaggagctcgggcacgctggcgtcggcgccggcaagtcggctacccgacggctcagccagcgagtccagcagccgcacgacggcgttgcggccatcgggccgggtccagccgtcggaccgaatgaccagtgccgggtcgaaatcgccggccatcgcatcctggaatccgagcagtcgttcgtcggaacatggcaagtacggcggtccgatgatataggcgattcgccgatacccgcgccccaacatatgctcggtgagcttgcgtgaagcgagtcgattgtcgatatcgacggtggggaaggggatggcgctgccatagccgacgccggaaatggcgaccggcacgctgatattggcgaatctctgaaatagcgggtcatctttatggaacgtgttgagaatccatccgtcggcgaatccgctggaggcgagtctggcgatgcgtgcgccggccgcaggggagtcggagatcagcgtgatgagttgataatcggcattgccgagcgtctggttggcgttgagcaggatggtgttgatattggggtcggcgattagcgaatccggctgcccgtgcaccacgaacgccacggtttgcgtgcgttggcgtaccaatgatcgggcggcgttgttcggcgtgtagttcacctgcttgacggcggcggcgatgcgctcggctgccttggccgagacatgcggattgccgttgagataacgggagacggtggcgtaggagacgccggatgccgcggcgacgtccatgatagtggccggcttacggggtatggccatgcccgtctccttcctgtcctagggccgttcacagtgattgtaccgcgcgattttcctgatgattccgcatggcccatgtccggtgcctgtggattgccgtgccggcgtatgaaagtcggtaaacattctctgccgtaagggtgtacgaagtaaatagtaaaagagatttaccgatattaagtgaagtacgacacgcacatgatatttgtaaacctttacgtgagtgttatactccttctcgtaaacgtttacaagaaatcaccagtcaatggagacggccagatcaagcgagccgcaacggttcacaactggacgggaaggaacatcatgaagcagcagcacaacgtacgccccgccatccgcagggtgctccaggccacggccatcgtcacggcagcggcccttaccctcgccggatgctcgatgggcgcaccatcctcggacaccggttcgagcgatggcaagctcaccgtctgggtcatgcagggcgatcaaagcgaggccaccatcaaggccatcaacgaccagttcaccaaagagaccggcgtcgaggtcaacatccagaaccagcagtggaaggacatcagcaccaaaatcaccacggctctgtccaccagcacccccccgacgtgctcgacctcggcaatacgcaggtcgccggcttcgcggccagcggcggcctcatggacctgaccgaccacgctgacgagttgcgccagggcgtcacctggctctccggtctggaagagcctgccaccgtggacggcaagctgtacggcattccggccctcggtgccgcccgcgcagtggtctacaacaagaagatctgggccgcggccggcatcaacgagccgccgaccacctacgccgagcttgaagccgacctgcagattctcaaggacgcgcaccaaggcgaggacttcaccccgttctatgtgccgggtgccgattggaagaccgccatccagtgggtgtgggacgccggtggcgactacgccgtgcagaaggacggcaaatgggtcagctccctgtccaccaaggaatcggtgtccggccttgagcagtggcgtgaattccagcacaagtggtcatccgaagcctcccgcccgctcgacaccgatagccccgacaccagccagctcatggccgaaggcaagatcggcgccgtaatcggcaacagcgcctccatccgcgtgattcaggaatacaacaaagacatcaccgccgacgaactcggctccttcccgatgcccggcctgagcggccagaaccagccgtcgatgatggccggctccgtgtggggcgtggcccagaagagctccaagcaggatctggccctgaagtggatcaagatcgcctccagccctgacatccagaacgactacgtgttcgccaaggacggctacctgcccaacaacgtcgaaggactggacaaggccatggcctccgacgacttcccgaccgccctgaccggcttcttcgaggccgccaagcgcaccaaggccacgcccgcctccccgcagtggaccaccatcgaaagcgacggctcgctgaccctgttcaaggacatcgccaccgacaccagcaaggccgaggcctccgccaagaagttcgacgaacacgccaacgagctgtatgccaagtgatgggttggaccatgacaagctcaacgcaactcgcgcacggcgaggccccggcctcacggccggctaagaaacgcggcaatcgcgccccggcgtttctgctgacgcccgccggcatcgtcatcatcgcactggtggtcatcccgctgggattcatgatcttcacgtccttcacggatttcagccagcgcacgctgttcaccggcgaattcgacttcgtcggcctcaagcaataccaatccgtactcaccgacccggccttctatgcggccctgctacgcaccttcggcttcaccgcagccctcgtggccggcagcgtgctggccggcatgggagtcgcccagctgatgaccaaactcggcggtgtgatgcgctacctggtcatcttcgtgctcatcttcgcgtgggccatgccgaacgtcgcatcctcggtggtctggaagtggctgttccagcccggttacggcgtcatcaactggctgctcacccagctgcacgtcttcggcgacatgaccaacacctcctggatcgacaacacctggctcgcatttctggagatctggctgctcgtggtctggcaggccgtgccatacatcgccatcacgctgtacgcggccaccacccaggtcgaccagtcctgcatcgaggccgcccagctggatggctgcagcaagctgcgctgctactggcagatcgtcgtgccgctgatctccccgagcatcatggtcatcaccatgctctcgattatctgggacttcaacgtgttcaaccagatctggctcatctcgcagggcggcccacaggacacgaccgccaccatcggcatcttcacctataagaaggcgttcgtcagcttcgaaatcggcaccggttcggccgcctccgtgctcgtgaccatcgtgctgctcgcgctgacctccgtgtacatccgttacctgctcaagtcaggagaggacctatgagtacgtcaatgagtgcaagtcctgcacaggccgtatcgcaggccgcagcgcagtccacatcaccccgccgccgaaccaaccccggcaagatcgcgcgccgcgccggcaccactatcctcgccctgctgttctgcgtcgtatggttcttcccggtctactggatgattatcaccgccgtaaagcctcgcgatgagatcatgaccacgacccccgtgttctggcccacgcacctctcgttcgacaacttcatcgttgccgtgacccagacctcgttcctgaccaacctcaagaacagcgtggtcgtgaccgccatctcgatcgtcctgtcgatcatcgtcgcgttcttcgcgtgcgcg

SEQ ID NO: 3652 - DNA, 7984 bp, Unknown
  R85_18m  MAG No. k141_40985
aagtcctcgaaggcccgtaagaaccgcctggcaaagcgccatgagtatgaggagctgaaggcaccgaccatcggcggcgttcgcatccccaacggcaacggtcagaccatccgtctgcgtcagggcgcttccctggccgatctggcggagaagatcaacgtcaaccaggccgcgctggtcaccgtgctcttccacctgggtcagatggctaccgccacccagtccttggatgaggagaccttccagattctgggcgaagagatcggctggaacatccagctcgtctccgcagaagaggaagacaaggaactgctccagcagttcgacatcaaccttgacgaggaagaactgcaggatgacgaggatctcaagcctcgcccgccggtcgtcaccgtcatgggccacgtcgaccacggtaagacacgactgctggataccatccgcaagaccaacgtcatcgcacgtgaggccggcggcattacccagcgcatcggtgcctaccaggtcaccgtgaaccttgaaggcgaaccgcgcaagatcaccttcctcgatacccctggccacgaggcgttcaccgccatgcgtgcccgtggtgccgagctcaccgacgtcgcgatcctcgtggtcgccgccgacgatggtgtgatgccccagaccgttgaggccatcaaccacgctcaggccgccaaggtgccgatcgtcgtggccgtcaacaagatcgatgtgcccggtgccaacccggagaaggtccgcggccagctcaccgagttcggcctggtccctgaagagtatggtggcgacaccatgttcgtcgacatctccgccaagcagaacctgcacgtcgacaagctgctcgaagccgtgctgctcacggctgacgctgagctggacctccgcgccaaccccgacatggacgcccgtggtgccaccgtcgaagcccgactcgacaagggtcgtggtgccgtggccaccgtgctggttcagcagggtacgctccacgtgggcgatgccatcgtggccggcacttcgtacggccgcgtgcgtgccatgctcgacgagaacggtcagccgatggaagcggccggtccgtccacacctgttcaggtgctgggcttgacctccgtgccgaccgccggtgacctctttctggtcgcctccgatgatcgtgccgcccgccagattgctgagaagcgtcaggctaccgagcgcgctgctcagctggccaagcgtcgcaaggtcgtctcccttgaggacttcaagaagaagttcgccgagtccgagatcgacatgctcaatattgtcatcaagggcgattcgtccggttcggtcgaggcgctcgaggattccttgatgaagatcgaggtatccgacgaggtcggcatccaggtcatccaccgcggcgtcggtgcaatcacccagaatgatgtcaacctggccacggtcgacaaggccgtcatcatcggcttcaacgtacgcccgaaccgtcaggtggcggacctcgccgagcgcgagggcgtggagatcaagtactactcggtcatctaccgtgcgatcgaagacatcgaggcatccctcaagggcatgctcaagccggaatacgaagaggtcgtcacctctcactccgagatccgcgagattttccgctcctccaagttcggcaacatcgccggcgttatggtgcaggacggtgaggtcaagcgtggtacgaagtgccgtattctgcgcaatggcgtggccacggtcaacgacctcgagatctcctcgctgcgtcgcttcaaggacgacgttcagtccgtcaaggaaggctacgaggctggtatcaacctcggcaccttcaacgacattgaactcggcgacatcatcgagaccttcgagatgcaggaagtcgagcgcaagtagtcattgttaagccctctctgacgagtgggctgtcagccgcaggctgactgggggagagacatggtagttccatgaattttctctcccccagcctcactgcgttcggcagcccctcgtcagagggggctcaagtctagaaaaggaaattcctatggcaggaaccaacccgcgcgccgcacgtattgcggccttgattcagcgtgtcgtcgcctcctccattgagcgcgaactgcatgacaagcgactcgccagcatcaccgtcaccgaagttcgtgtgaccaacgatctgcagatcgccaaggtctactggacccagctcggccacgaaggccacgaggaaggcgaacgcaagcgcgcccagcaggcgctcgatcaggccaagggtcacctgcgttctctggtgggccacaaggctggcctgcgcctgactccgcagctccaattcgtgttcgatgaagtgcccggcgaggctcacgagatcgaagacattctcgccgtggccaagaagcgtgacgaagaactcgcccgcgcccgcgccaccgcccagtacgccggcgacgccgatccgtacaagcacgacgacgaggccgaagccgagggcgatgagttcgagtccgacgaggagtagtgtgcttcatacaacacccagcggcctactcatcatcgacaagccgcaaggcgtgaccagtttcgacgccgtcgccgccgtgcgcggcgcgttgcacatcaagaaggtcggtcacgccggcacccttgaccccatggccactggcacgctggtcatcgccttcggccacgccacgcgactgctcaacgccatcgtggcgcatgacaaaacctacgaggccaccatacgcctcggcctgcgcaccactaccgacgatgccgaaggcgaggcgcttgtcgatgatgaagcccgctcccgctggcaaacgctgtcagcgcagctgactgagggcggccagagcggcgaaccaacggcgtcaccaactgcctcatggcaaaacctgctcactcgcaccatcgccaccaatttcaccggcgatatcgaacaagtacccaatacgttctccgccatcaaaatcaacggccagcgtgcctacgacttggctcgcgaaggcaaggatgtggaactcaagccccgcctggtgaccatcagcgaattcaccgtgctggatatccgcagcggattcgtagcaggggagcaggccgctgaaccattgcgggaagacgcgaacacgggaacgattcccgcacttgatattgacgtgcgggtcagctgttcatcgggcacctatatccgcgcgctcgcccgcgacctcggcaatgaacttggcgtcggcggatacctgacccgtttgcgccgtacgcgagtcggccgattcgcgttgccggacgataccagcggacttatcgcctctgaggcgatgcttgacacgcgaacccataccgtcaccgcacataccgatcagaagacgttcactaatcgggaagggcaaaccgtcacgcgcaacaagtgcgtattgaacactcctgaaggccttgccggtgacgagcgccgcaactggctgcttgaccatgccctcaccatggaacaggccgctcgaggcgcgatgccggcgcttgacatcacacctgaggaagccagcgaattgcgcttcggccgccgtatcgagcgtacaatcagcgagcccactgccgccattgtgccgcaaacgcatgatgtggcggcgattatcgagcgtgccaacgctcatcaggccaagccggtcaccgtattccccctcgcgtaaagtagacgcggtgaaaagtgcagcttgatacaggccgcgcacaacaacgcctatattgcatgaataacatcgcacggataaaaggaacagcacactgatggatatcacgcacctgacccctgacgccgaaggttcgattgaatggccctcgttcagtaacgacaagaaggccgtggtgacattgggcgcatttgatggcatgcacttgggacatcaggcggtgatcaagcgtgtggtggaactcgcgcaccagcatgatgctttttccgtggtgattctgtttgacccgcgccccgcattcgtgcacggctgggccgcctcgcaccatggcgaggaacccgcggtgcagaacgtggatgccgaagccttgaccagtgtggatgatcgactgcaccgcatggaacagttcggcgtggaccatgtgttggtggtgcactacacgctggccttcgcagccatgtcatacattttcttccttggcagactcaccggcaagctgggcatgcgtacgctggtcctcgggcaggatgccgccatgggcaaggggcgagaaggtgatgtgaagcatatcgccaatcttgccgccgccaccggtgtattcgaacttgatgtggtcgatgaccgtggcccgggtgaagtgcgcattccgcgcgatttcaagccggaagccccgagcgaatggggagagcccgtcgacccgctggccaatgccaccaaggccgagcgccgcgcatggagcaagaagaaccaggccaaggcaatgcgcgcctggagctccaccaatgtgcgctacctgctggctcatggccgaatccaggatgccaacgccattctgggtgctccgcacgccatcgaaggcgaagtggtacacggtgaggagcgcggccgcaccatcggattccccaccgccaatcttggctccgacattgcaggctacattccggtcgacggcgtctatgccggttggctggtagatggtgagaaccgctggcctgccgccatctccattggcaccaaacccaccttcagcgagaaaacaggactcaacgaacgcgtggtggaggcctattgcatcaccgatgagtggattgatctgtacgaccataaggttcgcgttgaattcgtcggtttcctgcgcccgcaggtcaagtttgatggtcccgaccaactcgttgacgaactcaagcgcaacgtcgaagagaccaagcgtcttaccgcctgaggcatatctcagggctatttacgcactcccaaggcatctaaggcgtcggacaatgtgttggactccaccagccgaagtccctcgacatgcaccggcttgcgcagcggaggaatgactgccgttgtaaagccaaggcgcgcggcctcgcgaaggcgatattccatacgcggtaccgggcgcacctgaccggtcagggaaatctcgccaatggcgcacgtggctcgcgcaatgggttttgacgtggcggcgctcgccagtgccgccactatcgccaaatcggaaccgggctccttggcctggcccccggcaatagtggagatatacaggtcgttggacagcaggttgagcttgctgtgacggtagagcaccgcgaccagcatggcgatacggctggggtccacgccattgaccgcacgtcgaggtgtgggcagcaccgacgtggtgaccagagcctgtacttcgataggcagactgcgatgcccatccaatgtgaacgtcacacaggtgccttccatgggtgccgcgttggccgcatcagggccgtctccagacaggaacaatccggcgggatcggtgacctcttcgatgccctcaccgctcatgtcgaaacagccgacttcatcggtcggaccaaaacgattcttcaccgctcgcaacattctcagcgcggtctcgctgtcgccttcgaattggcagaccacatcgaccagatgctccaatgtgcgcgggcctgcaatcgaaccgtccttggtcacatgaccaaccagaaataccggaatgtcaagcgtcttagcggtatctatcagcgcgcttgccacttcgcgcacctgagtcgaaccgccggaaatgccatcgacctcctgcgagacgatggtctgcgccgaatccacaatggccaaggccggcttgttctgttcgatcagccccaatactgtggacagatcggtggtggaggccagtaacaagttcggctccaccgcgttgatgcgggaagcgcgcaaacgaacctgcgcctgtgattcctcgccggaaatgtacagcacggtattggcatgtaccgacggtgcgttgccctgtaccgacaccgtgtttgatgtgccgccctgcgcccggcccgactgttgggcagaccgctgaccggctcctcggaatgtactgtctcccgccacaacgcgcgcgatattgccggccgtctgcaacagcaatgtcgacttgccgatacccggttcgcccgctatcagcgtcactgaacccggcaccacgccaccgccgagcacacggtcgaattcggaaaacccggtaccgagccgctcgacgctttccgtgcccacttcggtaatcggacgggctgcagatctggcgttgtcggcaaccgtaaccgactgcgtgcgtgatgttcggccgggagcggccgtgcgagagcctgccgccggccgagcctcgtgaaattcctcgaccgtgccccactgaccacactcggggcaacggccgtaccacttcggcccgttccaaccgcattcggaacatacatactgcacacttgatttcgccatggtctcaccctaacccaaacaccagcggacggtaaatttttaccgttcacaagagtttcacgcggcttgcgcacaacgactaagattacggccgtctagcgtcacgcggctgtgagagaatcggggtatgactaatagtgagaactcctcgaccacacaatcccatggcaagttgattgcagtggtggttgccgcagctgttgtgattatcctggcagtgctttcggcctttgtgtggccgggttgggccatccagaagaatgatggcacctccactaccacccaaaacagccagcagaaaaccgaatcatccgagccgatcaagccgaccatcgacgccacagctttgccggatgatgccagtgagctgttgaaggccatgccggacagcgtgctgaattacgcgcgtaccaaggcggatgcctccacgacgtggaattccgcatcgccgctcgaggagtacactctgacctactccactggtgatgccgccaaggatgtcacgctggtcgccgcgcagtggtcgtcggcggacaatgccaagacccagtacgatgcgttggtcgctgcgcagaccggcgatgagtcggcatccggcaacgtcaaggtttccggcaacgtcacgggcgcgtacgtggtgaaggccgatgcctccaacagcaagaacgccgctgccatctggcagaacgataccgtggtcttccaagctaccggcaccaaggaagcggtcgatcgcttctaccagaagttcccgatgtagtatctagtatcggctgtcagctgctgcacaaacttatgaacgttggggcatccacattgctgatgtggatgccccaactgcgttcagggcatatgcggactatcgacaacatactggtttcctctgtctggcaacacgtgtattatggtgcaagttgcaacttttacgattaatcgaaatggaggcttcagatgggttctgtcatcaagaagcgccgcaagcggatgagcaagaagaagcaccgcaaactgctgcgtaagacccgccaccagcgtaagtagtcttacctgcaatcaaggcattagaaaccccgtgatcgttatggtcgcggggtttctctttttggctcctttgccttgttcgggcaacagtaaagcccgcacctgcgatgtacagatgcgggcttggaaaagttcagtgatgtgagacgatcacttgttggcgttggtcaacacgcgcgggccgttcgggtcgccgacgatgaccttgtcgaccatgttgaggaacaggccgtgctccaccacgccgaccgtgttgatgaggtcttcggccagctcctgcgggtgatcgatgcgctccaggtgcaggtccaccacgaagttgttctcgtcggtgcgcacttccttgccatcggcgtcaagacgaagcaccggcttgtagccgcggtcctcgaacttcttgatgacgtggccagcgccgaacggaatgacctcgaccggcagcgggaacttgccgatggtgtccacaaccttggact

SEQ ID NO: 3653 - DNA, 4426 bp, Unknown
  R85_18m  MAG No. k141_41150
gccaacgccggctactgggccgagctcgccggcggcggccaggtgaccgccgaagtgttcgaccgccacatcgccgccctcgaagacgagctggaggaaggccgcacggtcgaattcaacgcgatgttcatggaccgttacctgtggaacctgcagttcggctcctcccgcatcgtgcccaagaagcgtgcttccggcgcgccgatcgacggcgtggtcgtctccgccggcatccccgagctggacgaagccgtggccctgatcgagtcgctgcaggcggacggtctgccgtacgtgagtttcaagcccggcaccgtggaccagattcgccaggtcgtgcgcatcgccaaggccgtgtcccccaccaccatcatggttcaggtcgagggcggtgaagccggcggccaccacagctgggaagcgctggacgacctgcttgccgccacctacgccgaagtgcgcgcctgcgacaacctcgtgctggtcgccggcggcggcatcggcacccccgaacgcgcggccgactacatttccggccagtgggcccacgcctacggcctgcccgacatgccggtcgacggcgtgcttatcggtaccgccgcgatgaccgccaaggaggctcacaccagccccgaagtcaagcagctgctcgtcaagacgcccggtattccggccgacgccaagtccgacgacgtgttcgccccgcaggccgcccactgggtgccgtccggcaagtccgtcggtggcatgtcctccggcctgagccacctgcacgccgacatttacgagctcgagaacgactccgccgaatgcggccgtctgctcgtgcgcgtcatgaagcaccccgaagagctcgactcccgccgcaaggaaatcatcgaagccctgaacaagaccgccaagccttacttcggcgacctggcctccatgacctaccttgagtgggcgcagcgcttcgccgaactcgccttcccgtgggtcgacccgacttacgccgaccgcttccagcacctgctgcagcgcatcgaagcccgtgtgaacgacacggactccggcgaattcacctccaagttgttcgccgctgatggcgtttctgctgaagaggcagctgccgctggcctgctgacccacgacgacattctcgccgacccggcccccgcgctcgaaaagctcgcactggcctacccgcagaccgccgaactcaaggtggtcccaaccgacgtggcttggttcccggtgctcgtgcgcgaataccccaagcccatgccgttcgtacccgtcatcgacaacgacctgctgcgttggtggggtcaggaccagctctggcagtccgaagaccagcgctactccgccgattccgtgcgtgccatccccggcccgatctccgttgccggcatcaccaccatcgacgagccgatcgccgacatcctcggccgcttcgaaaccgccgccatcaagcgcgtgcaggacgaacagcaagccgccgatgccgctgagaacgacgatttcgccgcacttggcgaggccaccagcgccgaagacttcatccgcaagtccccgaacatctcctgggtcggccacatcaccgacaacccggcctacggcaccgccctgggcgaccagtactacgaaatccgcgcgtttgacgccgcggccggcaagtacgatctggacatccacctcgacacctactgggacaacgacccggacggcggcacctccaagcacgccgtgcgcgatatcgtcatcccgctcatcgtggaaggcaccgagcccggccgtgtgccggtcgtggaccgcgaacgcctgattccggacgtctacgcgatgctcgccgccaccgcaggcatcggcaacaccgccatcaccggcgacaagctcaccgagatgccgcagcttgacgacaagacctctgacgagcgtccgttcggtaccgcaaccgcaacctacaccctatccgccaacctcggcttcgaccacgaagcggccactggcgccgctctgccgaccaccctgcagcccagccgcatcgcccccgatgcgctggtcggccctgcctggccggcaatctacacggcgctcggctccgtgtacgtcaagggctacccggtgattgaaggcctgctcaacgccgtccacctcgaccacctcatcgaacttgaggtgaacgaggaggacctgctcaagcacaccggcgaaaccatcaccctgaagtcttgggccgaggattacttcgagtccgcctccggccgcgtggtcaccatccacgtgacccacaccgccgccgacggcacgccgcttgcccgcgaaaccgagcgtttcgcgatccgcggccgcgtctactccgatgctttaccggccgacgcccccgagtatggtggtgccctcctgaataaggaagcggatggctccgtcgccggacagtccactggactgtccgcctcctcgcgcggcctgcaagtagtgcaggccactccgcgccgtctgctgcgccgcgtgaaggtcgtcgccccacacgacatgaccgccttcgcccgcacttccggcgacttcaacccgatccacacctccactcgtggcgctcgcatctccggcctggccgccccgctcgtgcacggcatgtggctgtccgccaccgcccagcacgccgtgcaggcgaccgacgagaagggtgcccactacgagattgccggctggacctacaacatgtacggcatggtccagcttgacgacaccgtcgaaatctccgtcgagcgcgtcggcaaagtgcgccacggcggcatgaccctcgaagtcacctgccgtatcgacggccagctcgtctcccgcggcaccgcactggtccgtgcgccgcgcgccgccttcgtctaccccggccagggcatccagaagcagggcatggttctggacgagcgtgccaagtccgccgccgcccgcgacgtgtgggagcgcgccgacaagctcacccgctccaagctcggcttctcgatcctgggcctcgtgcgtgacaacccgaaggaactcaccgccaacggcgtgacctaccgtcaccccgaaggcctgctcaacctgacgcagttcacgcaggtggcgctcgcgacggttgcttttgcccagaccgcccgtctgcgcgaagccggcgccgacatctggcccgcctacttcgccggccactcgctcggcgaatacaacgcgttgtccgcgttcgccgacgtgattccgctggaaaccgtgctggagctcgtgttccaccgtggttccaccatgcaccacctcatcgagcgtgacgcacagggtcgctccaactaccgcatgggtgcccttcgtccgaaccagttcggtgtggacgacgcgcacgtcaaggaatatgtggaatccgtggccaagacgtccggcgaattcctggagattgtgaactacaacctcgccggccagcagtacgccatcgccggtacgatcgccggactcaaggccctgaaggccgattccgcccgccgcgtggccgcattcggtggcaagcccgcgttcatgctggtgcccggcatcgatgtgccgttccactccacgctactgcgcaagggcgtgccggaattccgcgacaagctcgacgcgctgcttcctgcttacatcgactaccgtggccgtctggtggaccgctacatcccgaacctggtggccaccccgttcgagatgaccaaggaattcgccgccaagatcctcgaagccgtgccgtccgaacgcatcaaggccgtgctcgacgacccggccgtgtgggattcctacgccgccgacgaccagaagctcggccgtctgctcttgtccgaactgctctcctggcagttcgcctccccggtgcgttggattgaaacccaggcgctgctcttcggtcagcgcgaacagggcggcctcggcgtggaagaatacgtcgaagtcggcctcggcaacgccccgaccctggccaacctcggtaccaagaccctgcgtctgcccgagttcgccggcaacgatacggtcgtctacaacgtcggccgcgatgaaggccgcgtctacatgaccgacaccgattcgctggttcccgacgacgagccggaagaggctgcggcctcggccccggtcgaaaccgctcctgccggtggttccgccgtcgccaagcttggctcgggtgctgctccggcaaatgccgcgactgaggctgctcagacaacggatggctccgtcgccggacagtccactggactgtccgactcctcgcgcggcctgcaatcagggcaggccgctgctggcgcaccgtctggttccgccgtcgccgacctgcccttcaaggcttccgatgccatcggaggctttgaagggcaggtcggcgacggcggcaccggacggggcgccggcgggagcggcagaaaccggagcggccggtgcgggagca

SEQ ID NO: 3654 - DNA, 19032 bp, Unknown
  R85_18m  MAG No. k141_41209
cgcgtcgggcaacgcggcatcctgtgaaacgcgaaccaagcgacggcgtaagccgtgtgagtcttggagctggcctcggcaacgaggccatgcagatgacttcgctctagcgacaagctaaaacaaagtcatctacaacggttgcaggaataaagaattcctccctgcaagcccatcaccgagacgtgcgttagcactccatgccgatttcggtgaatcagtgcaccacagtcaccgtgcattcggcgaagttcacgatctgacgggacaccgatcccaggaagtgcgcgtccagaccggacaggccgcgcgaaccgaccaccagatggctggcgtaccgagatgccgcaatcagccccttggacgcgggaatatggaaggcattcgcgctgaccttgacaccatcgggaatctcggccttggccatcagcccggcgagaatctcctcggcgcggcgctgaccgaccttcaccggtgccacggcgttctcatagcccggaataacgcccaaatccttgagctgccagcagaacatcacatgcagcggcgcgtcgtgcagtcgtgccttttccagcgcgaagtcgaacgcgcggcgggaagtctcggaaccatccacaccaaccaccaccgggcggcgagcctcctcgaccaccggctgaggctgcgtgtagtggaccggctggtctcctggcgtcagggcattggcgatggcatcggtcacggtctcatcctcgctgccggcgatgcgcaccacggtcaccggcacttcggcggcctcggccagcgaagcggacagggaccccatgaaccagcgggccacacggctcagcgagcggcggccgaccacgatctgctgcgcatcatggccgatctgcagcagggccgaagtgccggaggccttcaccgaggtgagcttcagattcgccggatcgaagtcgatgcctgcagcggccttgtcgacccacacacgcagctcgttggcgatgtcgtggcggaccttggcccaggcctcgtcgctgtccggttcggaccccatatcccaggaatgcgtccagccaaacacggcgttgacgctctgaccggttaacgaagcctcctcaagcgcccacttcagcgcggcaaaggattcatcggaaccatccacgccgacaacgatgtcgggcttggttgtcgcttcactcatttcgagcctccttgtaatcgactacgggtgaatctagaaccagcatatcgttttcttatcctcttacggcgcaattcatggaatccgatgaataaacgtcatcgtgaatcggtagagtaagacggaatgtcaattgaggaaggacaagcatgttcgaacggtttaccgaccgtgcacggcgcgtgatcgtgttggcgcaggaagaggcgagggcccttcagcacaactacatcggcaccgaacacctgctgctcggcctgatccgcgaaggtgagggcgtggccgccaaggcgctcgcctcgaagggcgtggagctggatgccactcgcaagcaggttgaagaaatgatcggcaagggcaacgcggctccgaacgggcacatcccctttactccgcacgccaagcaggtgttggagttctcgctgcgcgaagccctgcagctgggccacagctacatcggcaccgagcacatcctgctcggcctgattcgcgaaggcgaaggcgtgggcacccaggtgctcatcaagatggacgtcgacctgggtgagctcaggagcgcgaccatcgatatgattcgcggcaactccggcaccggcaccggtgacggcaagggcgatctggccaacgccggcggcgtgacagacaagcagaacaagtccggttccgccattctcgatcagttcggccgcaacctgaccgtcgaagccgctgaaggcaagctggacccggtcatcggccgcaccaacgagatcgagcgcgttatggtcgtgctctcccgccgcaccaagaacaacccggtgctgatcggcgagcccggcgtgggtaagaccgccgtggtcgaaggcttggcccagaagattcaggccggcgacgtgccggaaaccctgaagggcaagcaggtctactcgctggacctcggttccatggtggccggttctcgctaccgtggtgatttcgaggagcgcctgaagaaggtgctgaaggaaatcaagacccgtggtgatatcgtgctgttcatcgatgagatccacaccatcgtgggcgccggctccgccgacggcgcgctgggtgcctccgacatgttgaagccgatgctggctcgtggcgagctccagaccatcggtgccaccactaccgacgagtaccgcaagtacatcgaaaaggatgcggctctggaacgccgtttccagccgattcaggtgcacgagccgaccatcgccgagaccatcgagatcctgaagggcctgcgttcccgttacgagaaccaccaccacgtgaccatcaccgatggcgcgctgcagtccgccgccgagctgtccagccggtacatccaggaccgcaacctgcccgacaaggccatcgacctgatcgatgaggccggtgcacgcctgcgcatcaagcgcctgaccgccccgcctgagctcaaggaactcgacgagaagatcgccaagatcgccgccgacaaggacgaggccatcaagggtcaggacttcgagaaggccgccgaactgcgcgacaagcaggagaagctggaagccgatcgcaagcagaaggaagactcctggcgcgaaggcgagtccgacgtcaagatggtcgtggacgaggacgtgatcgccgaggtcatcagctccaccaccggtatcccggtgttcaagctgactcaggccgagtccaagaaactgctcaacatggaagccgaactgcacaagcgcatcatcggccaggacgaggcggtttccgccctgtcccgctctatccgccgtactcgcgtgggtctgaaggacccgaagcgcccgtccggttcgttcatcttcgccggccccaccggcgtgggcaagaccgagctggccaagacgctcgccgaattcctgttcgacgatgaggacgcgctgattcgcgtggatatgtccgagttctccgagaagtacgcggcttcgcgactcttcggcgcgcctccgggatacgtcggctacgaggagggcggcgagcttaccgaaaaggtgcgccgcaagccgttctccgtggtgctgttcgacgagatcgaaaaggctcatccggacatcttcaacacgctgctgcaggtgctcgatgacggccacctgaccgacggtcagggccgcaaggtggacttcaagaacaccatcatcatcctgaccaccaacctcggtacgcgagacatcgccaaggccgccaacacgggcttcaacctgggtgccaacaacgagtccagctaccagcgcatgaaggaccaggtcagctccgaattgaagcagcagttccgcccggagttcctgaaccgtctggacgacatcatcgtcttcaagcagctcaccgagccgcaggtgcgccagatcgtggatctggacgtcaagcagctcaacgaccgcctgttcgaccgtcacatgtcgctcgaactcaccgacgccgccaaggacctgctcgcgcagaagggcttcgacccgctgctaggtgcccgtccgctgcgccgcgtgattcagcgcgacatcgaggacgccatctccgagaagattctgatgggcgatctcgaagacggtcagcgcgtgattgtggatgcggaaggcgagggtatcctcggcgaattcaccttcaagggggagaagttcgaggagccggccgccgccgataagcccgccgaagacggtgccgccaccgatgccgaaacttcgtccgaagccggtgcctccactgatggcgagactccagccgacgccactccggccactgaaccagccgaatccgctcccgccgattccggtgacgctccgcagaagtagtccgtttcgatagcgtagctagcgcataccagcaaagctccccttgacaggggagctgtcagcgaagctgactgaggggtagacctacgcacacatgatgtgcacgtttttggtctacccctcagttgcctctggcgatagctcccctgtcaaggggaactactgtttgttgtcgggttattgcagcagggcgagtccggtgtcgatggtctcctcgcgggtaaacagcgtgcggccggcgcgcaccgaacgcaataccgagcagcgctcatacacggcgttgaacacactatcggcgtccagcacaatgaagtttgctggcttgcccgtttccaagccgtacatatcgcgcaggcccaacgtagtggcaccgttgatggtcaggaacttcaacgcatcgtcgatttcttcaaagctcatcatctgtgccaaatgcagcacataatcaagaatgagcatcatattgccattgcccagcgggtaccacgggtcctgcattgaatcctggcccaatgacacattgacacccgcctcagtgagctccttgactcgcgtgatgccacggcgcttggggaaggtatcctgacggccctgcaaatacaggttctcggtgggggcgcaggcgaagttgatatgcgccgccttaagcagcttggtcaggtggaagaagtaggcgttgtccgccgatcccagcgaacaggtgtggctggcggtgaccttcgggccaatgccagccttatatgccaacgccgaaagcagctccacgtaacgggaattcggatcatccgtctcatcgcaatgcacgtcgatgagcttgtcgtatttcgaagccaactcaactaccgtgtgcatggaatgctcgccaaactcacggcactgttcgaaatgggggatgccgcccacgcagtcggcacccatcttgagtccttcctccaccagctcggcccccgattcgccatgcgggccctcgtaggagtacatgccctcctgcgggaagctgacgatctggagagtgaccgtatccttcaattcctccttaagctccagcagcgcctttaatgaggtcaggttcgggtcggtcacatcggcatgggagcgaatgagctgcacgccatgcagcatttctttcttaatgccgattttcgcgcgctgcttgatctcgtcgaccgtcaagtcggacttggtctcactccatcgctggatgccctcaaacaaggttccgctttcattcaccgcaccgggcttgcgggccgtgaatacgtaatcaaggtgcagatgcgtatcgcagaacggtgggcagacaagtttgccgcccagatcgaccacctcaatggccgccagatcaccaccctgagcctcatattgttgcgcgagtccggggccgaatgcggtgaacacgccatccgtgacgagaatgtcctgcaatggcagggtgcttgcagccgtgctgccgggttctccggtggcgatatgtgcgttggtgaacagtgtggtagtcatcgtcgctccttcaactggtgtgttgccgaacggttacgtgaaccgactgcccgcgtaaccaactgaggttattgtcaacagcacgctttgcggtgaggttaaccggaacgaccggtgttccgcgggggaatggacagattgtatgactgtatcgattcgcagtgcgcttcataacacgcagttcaaacgagccgatcctgtggtggaggtcgaaggcaaagacctcgatacgccagtgcgatgggtgtttaccaacgagcgagaggatgtctccagtttcctttcgggcggtgagatgctgattatcgagggtaacgctctgctcgccgccgattggcacggcacgttaggacaatatgtagcaagcctggcacaggctggtgtcgccgctctggtggtcgaactggtggagggtgtggtgcggatgccggacgaactggtgtctgcggccaggctgcatgggttgacgttgattggtctgaaatctcgcgtaccttttgtcgacatctgtcagagtgtcaataccgctatcgtgcacgaacagatgcacttgcaattggaggtggacacaatgtccacttcattacgtgagggattgtcccgtaccggcaatatcgaggctgtggccgaaaccattgcgtcgctgttcggcgaaagcgtcgccattttcgatggtgacggtctgttggccgctcgagcgggtcgtgcgttcgatgccggcaacgaatcgagcgccgtcatcgcccttgaaagtcgctcccggccggtgggagcattggagatcacgcaacgcaccatgactttcgacgccacgatgcgtcgggccatcgccaccatcgtgtctccggtggccgccctctatattgacggcggcgcgcgcatgggcatgatgcatcatctgagtatgggcccggccgacggcgtgcacgtcaatacatttgaggcgcaggaagcgcatgcgatgctcgacgcgctgggttttgccggatcatgcatctatatgccattcgcttttcggttcagatcggtggtggaaggcatcaaccatgtatcgacgatggtcgaacggttcgaagaacggtcgggatgcgccgtctcctgcatgctggaaggtgacttgatggtcggatggtgctccaccaccgattcctcagacggtgcggccgcattcggacgccattgcatggatgcgcttgccgtactggaaggcgacggtgtgtacgtggtgcatggccgagtggcattggacacggtgacgctggtcgacgggttcgcggtattgcgtgacatcgccaatcaggaaccggcatacgggcgaatcgtaagtaccatgtccgcactcgtcgaccgtttcgtcgcatcctctgatatggacaaggcgatgcgcatgctcgtggtgcagaccatcggattcgaggtcgccgcctctccgttgttgctggacacactgtgcgtctgcttcgacaacctcgatagcaaaaccggcgcgtgcgagcaattgggtatcagacggcaaaccctgtacaaccgactggacaaagtgacacaaatggtcggcgtcgactataacgacaaaccgaactggtcgatgctgctattcgccgccaaactcacgaaatcatggcaagaacggcatggtgaataatgcgccagcaccactgggcaacctgtccacttctacgccgaacgggttaatcgacgattcacgtttcagcaaatactcaagggcatagtcgaggctatcgcggcgctggtcgacctgctgcgaaacgaattcccacttgaatcccattcagtcacacgaacagcacatccttgaaaggacggtgacatcatgagttccgcaacgattactacatctgcacgactgatgaatttcacccctcaaactgaagaacaggccatggtcaggaaagtcgcggtatcttccttccttggcaacttcatcgagtggttcgactacgcctcctattcgtacttcgccaccaccatcgccctggtgttcttcccaaccgacaatcacaccgtcgccatgctgcagaccttcggcgtgttcgcgctatccttcatcctgcgtccaatcggcgcactgttctggggtagctacggagataagaaaggccgtaaagccgcattggcccactcgattatgttcatgtccggtgcgagcttcctgattggctgcctgccgtcttactcggtgatcggcgttggcgcgccgattctgcttctgctgctgcgcatggtgcaaggcttctccgcttccggtgaatatgccggtgcggccacattcctcggcgaatatgcacccacctcaaagcgtggcatctactgctcgctgattccggcgtccaccgccatcggtctgctcgctggctccacgctggccacgctgatgaccgccaacatgaactccagcgcgatggtcggttggggatggcgtgtgccgttcctgctggccggcccgctcggcctgattgtgctgtacatccgtaccaagctctccgattcccccgtgtaccagtcaatgaacgatgctcttgagtccaagagcgccgcctccgctgacggccaagtcgtttccaagagcggcatgttcgccccgctcgccgaactcttccacaaccatctcaaggccctgatcatcagcttcggagcctgcgtgctgaatgcggtcggcttctacaccgtgctcacctacctgccgacctatctgtctgacaccgtcggcatggacgccacccagtccggcaccatcaccaccatctgcttggtcgcctacgtgttcatggtgttcggcatgggccacatctccgacaaattcggccgcaagaaggtgctcatcggtgcttgcgtggcgttcatcgtcctcaccgttcctgccttcctcatcctcaacacctcccagttctggcccgtgctgctggttgagctggcaatgtgcgccaccctgaccgccaacgacggtaccctgtccagctacctgaccgagacgttccccacctccgtgcgcttcaccggattcgcgttcagcttcaatctggccaatgccatcttcggtggtacggcctcgttcatcgccactggcctgattgccctaaccggttcatccatcgccccggcctggtacatggtgggtgttgcggccatcgccttggtcgcgatgattctttcccatgaaaacaccgacaaggatctgaatcacatctgatctcctcagctccggctcctttcccgagggagccgggcgcattcattgaccatccaatccaccaccaacccaaaggagtactgcaatgggtagcaaccgccgtatggaccacatgacctggccggaattcaaggaggtgaagactcatcccgtcatcgtgccgatcggttcgaccgaacagcacggccagcatctgcccatcggtaccgacgcggtactcgccacgcgggtcgccgaagatctggcggaacgcatcgacggcaccgtgctgcccaccctgagctacggatacaagtccaagccgctctccggtggcgggccgctgttcccgggtactatcgacatgaacggcgtgacagtgatcacccaaatgcacgacgtgctgagcgaactcatcgccgatggcttcaccaagatcgtcgtcatgaacgcgcattttgaaaacgaggcgttcatcgtcgaggccatcgacctggtcacccgcgaaaccgggggagtggccaccatcgtggaaaccaattggtgggacccggttccgcagtcggttatcgacaaggtgttcgatggattggtgttccccggctgggcattggagcatgcggccgtcaccgaaacttcgttgatgctccactacgcgccggaactggtgcacatggaccgtatggtcgaggaagccggtgccacggcgaaatcctatgtacgctacccggtgcgccaaggtgacgttcccgctcacggcggactcgccaatccggccggctcaagcgccgaacgcggccgcctgattgccgaggcgtgcgtggatgcggtagctgagatctgcgtcgaggaatttgccgagtaatctccccttgccgacgcattcgtagtgacacgggttgcaaaggcctgaccctgatagtacggggtcaggcctttcccatcccaagacgccgctaagaattcacctgagagtcgccttcctaggcatggccgttcaatcgacgatcctaacgtgactggtgtgagcaggaatatgaagaaccggcggtgggccggcaagcgatcggggatcgcttttggtgcagtagcgcttatccttacggctctggtggttccttatgcttgtgcgggaaccacgggagccgttcctttttccggcgataatccatcttccggcacccgtacggtgaccatcgccgacatcactgattttcacgggcatatcgaacgtggtgcggacaacgccaccgccttcaccgtggccgacagccataatcccggcaatatgatcccggtatcgaccggcgatttggtgggaggttccccgtatgagtcggcggtggagaaggaccaacccacgctggacatggccaaagcgtggggattgacgatttcggcggtaggcaaccatgagttcgaccgcggtgtcgccgatttcaacaatcgcatcgctgatcccagcaatggcatcgactggctgtgcgccaacacgtctgccgccagtaagtcgcctgacggactgctgagccatgtacgtgactctacgattcgaacggtgaacggcaagcggatcggtttcgtgggcgcccttactgatgcgctcggctcggtagccactccgcagattacgcgtgatgccgatcttgacgaacgggcggtggacgcgatcaatcgcgtggcccgtgaactcaaacgctccggaaaggtggatgcggtggtggccttgctgcacgccgatgcctcagccgccgccgatattgggcgagatgttgatgtggtatacaccggccacaatcacgcgatcaagcgtggtacgaccgctggtggcgcgcctatttacgaggcgggcagcttcgggcggaatatggccgtgcaggatttgatcatcaccggtgccgggcgtcgcgccacggtgcgagtggccgatgtggacctcggcaatggcaccagccatacggcggttgacggcgtgctgggcgtggaagggcttaatgcgcatccggcgcaagccgcttggatgtctgccggtgctgaggcgaacgatgaggtatcgcgcgctcagcatatttaccaggcggcggcaacatattcgaatcatgccggcaacgcggtgattggcaccttggcctccggcgtgaatttcgacaaacaaggttcggataagcacgggaatacggtcggtgtgctggtggcggacgcgaaccgcgagtcaatcatgaagcatgtgtatgccggaaatcgtttgccggtaatcggattttcgaataatggcagtctgcggactccacggcttgatatgaatggcgatggcaaagtcaccgtgcgcgaggtggatagtctcatggccttgcagttcaaggccgcgcatgagacgctcaccgggcgcgatgtgaagagagtgctcgccgagcaattccaccgtgacgatgggcgactggagcggcgctggctcggcatctcctcgaacgtgacgtatcggtatgccgaatgcggtacgaccggtgggagcggcaatgccgatgccgccgctgataccaacgctgacgctgacgagtgtgctgccgacgaacatgcggcggttcgtatcgtgaacctcgccgttgacggtcgaccgattgcggacgatgacctggtgattatcgcatccaattcatatctgcttcagggcggcgacagttaccccgccttccgtgccggaaccaattacggcgagctgaatatgccatacagccagccgttgcatgaatatctggccgcacatcaagggctcacggcaattgttgcagcaccggtagggactcaggcgtaagacaccaattgctgggtgactgaggaactatggggtggagttatgagtatagggcagaagaaaacggcataaatatgacgaagctcccctcgctgaggggagctgtcgccgtaggcgactgaggggagcttgcggtataaccgtaaactcccctcagtcagccttgctgccggcttccctcagaggggaacctggcacgagacccttacttgatggcgttcagccactgctccttggtggccttctcggcttcgagcttggccttcttcttcgggtcggattcggccgcgatcttggcgtcgagctcggcgagctgggcgttgagctgctcctcgaagctggacttgcgggcgtcggcctccgggtcggtctgcttccaagcggcatcctcgatggccttgatctgcttgtcaacggcgtcgagacggttctcgatgcggcgcatatcgtcacgcggcacgtaaccgatctgatcccactcttcctgaatcttggccagctcctggcgggccttcttggcctcggcgtcggtcttcaccggcaccagagcctcggccttgaccagcagagcctccttggcagccagattctccttctcggaggagttgatctgatcgcgatcagcctgacgagcgttgaagaaggtgtcggcggcttcgcggaacttggcccacagctcgtcgtcctcgttacggccagcgcggccggccttcttccaacggtccatcagatcgttgaacttgcgggaagtctcaccccaagcggtggaatccttgagctcattggcctcggcgataatcgcttccttggcttccttggcggctgtacgctcgttgtcgcgagcctgagcccacttgcggcgagcctggttgaaggtggtgcgggcggcggagaagcgcttccacagcgcctcggcctccggcttgtcgatgcgcacggtggtgcgctggtggttctgccactcgtcgaacaggttacggaacttgtcggcggtggagcgccagttggtgttgtcgcccagggaggccgccagagcttcggccttctcgacgatggcggtgcgctcggcgacggccttggcctgagcggccttgcgcgcttcggcgatctcggccttcttggcctcgccggcggccttcagttccacgtaacgggccttgagggccgcgaggtcgcccaccaccgccggttcggcggtttcttcgcccagcagcttcacggactcgtcgatttcacgggccttgatgttcggggaagccagacgggtggccagcagatcgagcttggccttgagatccaggaaacgacgggcgtacagtgccaacgcctcttccttggagacatccgggaactggcctacctcgcgctcggcgtcgccatccttgacgaagacggtgccgttgtcatccacgcggccgaaggcctcggcggccttgacatcagcctcggaataggtggcggtggcggcggccggggcggcagcgcgcggcttggccgacgaagtcttcttggcgaaggcggcgggggagggcgcgtgcggtttcggcatggaagcgggggacggagtcggcgccggcgtggccgcgctggcttcgggtgcgggtgtcgttgcctgctcttcgggcgcagcggtgtttacgggttcggtgacagtttcgtcggccatggccagctccttaaagcgtagaatgcataagcgggagcgtctcccatcccgggcgaaccaggaagttttgacgcaaccctcacctattatattgatttcgtggctaaaggtgcatcaatatcaggattcccggagtggctcccctccgaacgtgttgtggagcagcgtgttatcgatacgcttcgtaaggtttttgagctcaacggcttcatcggcattgagacgcgagcggtggaaaccggcgcttctttgttgaaaaaaggcgagaccagcaaggagatctacctgctgagccgtttgcaggaggtcggtcatgaatccgacactccgattgaagagcgtttgggcctgcatttcgatctgaccgtgccgctgagccggtatgtggtcgagcactcgggcgcgttggcgttcccgttcaagcgctggcagattcagaaggtgtggcgtggcgagcgtccgcaggaaggccgcttccgcgagttcgtgcaggccgacatcgacgtgatcggcgccggcgacctgcccgaccactatgaagtggaactgccgctggtcatggtctccgcgctggaagagctgcgcgcgtatggcctccccaaggccaccgtgcacgccaataaccgcaagctgtctgaaggcttctaccgcggccttggcctgacggacgtcgaaggcgtgctgcgcgagatcgacaagctcgacaaaatcggtgccgatgaggtggcccgactgctcaccgagacctgcggcgccaccgaagcacaggcacgcgcctgcctcgaattggccgagctcaccgcctccgacggtgctgagcttgccgccaagttcgatgcgctgtgcgagtctcacggcatcgccaaggattccgaggcatacacgctggctcgtcagggacttgataccctggccatgatcgtcgacgaggccgccgccatccgccccggttccgtcatcgccgacctgaagatcgcccgcggtctcgactactacaccggttccgtctacgagaccttcctcgacggtgccgcatcactcggttccatctgttccggtggccgttacgacaatctcgcctcccagggcaaccgcaagtacccgggcgtgggcctgtccatcggcctgagccgactggtcagctacatgctgcacgctgccggcgcgcacgccaaccgcgtcagcccggccgccgtgctggtcgctgtgtggaatgaagaggaccgcccggccgccaaccgtattgcgaaccaactgcgtgcgcgcggcatcgccaccgacgtggcacccaccgcggccaagctcggcaagcagatcaagtacgcggacaaactcggcattccgtacgtgtggttcccggccaccgctgccgaaggtgcggaaggtgcagagcccgctggcgacgaggtcaagaacatcgtcacgggcgagcaggttgccgccgattgcacgtcgtgggagccggatactgtggttgcccagcaaaccgtcgaaatctgacgtattcgcgcgaaaaatcgaggagaaacaagataatgagccagacggcttacagaacacatcatgccactgaagtgaccgaggccctggtcggccagaaggtcaccctcgccggttgggttgaccgacgccgtgatcacggtggcgtggccttcatcgaccttcgtgattcgaccggcctcgtgcaggtcgtcatttacgacgaggatatggcccgcccgctgcgcagtgaattcgtgattcagattaccggcgaagtgcgcctgcgcccggatggcaacgagaacacccatctggccaccggcaagatcgaggttgtggccgagaccattgagatcctcgccaagtccgacgccctgccgttccaggtttccaccgctctcgagaatgagtccgagaacaagctgccgggcgaggacgtgcgtctgaagtaccgttacctcgacctgcgccgtccgtccatgcagcacaatctgaagctgcgttccgacatggctaaggccgcccgccacgcgctggaagacatggacttcaccgaggtcgagaccccgaccttcattaagtccaccccggaaggcgcccgcgacttcgtggtgccggcccgtctggtgcccggttcctggtacgccctgccgcagtccccgcagctcctcaagcagctgctcatggtctccggtgtcgagcgttactaccagctcgcccgctgctaccgtgatgaggacttccgcgccgaccgtcagcccgagttcactcagctcgatatggagatggcctacgtggaccaggaagatgtgatggccatgactgagaaggtcatcgccgccatctggaagtccgccggctatgaggtccagctgccgctgccgcgcatcacctggaaggatgcgatggacaagtacggctccgacaagccggacctgcgcttcggcaacccgctggtggaactgaccgagtacttcaagaacacgccgttccgcgtgttccaggccccgtacgtgggtgccgtggtcttcaagggcggtgccgccacgccgcgtcgtcagttcgacgcttggcaggattgggctcgtcagcgtggagccaagggccttgcctacgtggtcttcggcgaaaacggcgaactcaagggccccgtcgccaagaacctgtccgatgaggagcgcaacggcctgcgcgaggccgtcggtgccgaggaaggcgacgccgtcttcttcgccgccggttctcgcgagtccgcccagctgctgctgggtgccgtgcgtgtggagctcgcctcccgcgaaggcctgctggatccgaagaagttcgctttcacttgggtcgtggacttcccgctgttcaagtccaccgacgatccggatgatgacgatgtggctgtcggccactccaagtggacctccatgcaccacccgttcaccatgccctccaaggattggatcgacaagttcgacaaggatcccgagcacgccatgtccgattcctacgacattgtctgcaacggtgaggagatgggcggcggttccgttcgtatccaccgtgacgacatccaagcccgtgtgctcgatgtgctgggcatcaccaaggaagaggccgacgagaagttcggcttcctgcttgaggcattcaagtatggcgctccgcctcacgcgggtctggcccttggctgggaccgcaccgtgtccatcctggccggtgctgactccatccgcgacgtcatcgccttcccgaaggccggcggcggccgcgacccgctgaccggtgctccggccccgatttccgacgagcagcgcgccgagaccggcgtcgactacgacccggacgccgacgaaaactaatctacggagcgtataccgcctttcctcagcactcgacgcaccttagtgcgccttcggcttcgaacggcggtctccgcatgcgtagattaattttcgaggagtaatgctccggtgctattagccgcaaatggcccttggaataattccaagggccatttgctttttgcgggtggggcccaatgtgccaaatacctgccaaggggtgccaaatactccgcccgatggcacctccgccatgcggcaaacctcgcaccatgcggtgtcccccttggcgtttgccgattatccccccatggggcggtaacttcctcatggggcggtaaacaacccatggggcggtgaaaaccccatggggcggtaggtcaaaatggcttaattccgcggtttcacaatttcttcaaaccgccccatgggcaaattaccgcctcatgggggaattgccgccccatgagaagtaatcgcaactccgtatttgatcaatgttgtgaggctttgttgtgttttgcttgtttccgcctcctgtattcccctttgcgcgcattgatggtaaggctgccgtctattaatacccggcatgaaggttgaggacggccaggaagcggtatttgcatcgcggtggcaacctcttgtgcgaaggcacgttgtttggcggtattccacaggtcatcggcgaacacctcgatgacggtccagcccaattgccgcagacgtcgacgtttttgctggtcccgcacatattgtttgcggaagcgacggtgatgatcgccatcatattcaatagcgactttgtattgtggataagccatgtcaacggtgtaggtgtatccgttctctgaatcggtaatgccatattgtgtttgcggtatgggcaggccgaaaagcataagcgccaagcgtgtacgagtttcctgaacggaatccgatggttttacgagcttcagcgccgcctcacaacgcgcacggccaataacgcggtgaaaggccgttagtcgttgagtgaattgttcaatggcatatccataacgtctgatgagcgcttcagccagcaccactaattcagtgaggttgagatattgggcaaactgtatccacgcatccatgggatgcatgcaggttacgccgtttgaaaaagcgatactgctgaactttgcattccatatgcgatagtcgacattgtccaatgaagagcgggtccctttgctcctcaccgtcacataaaaatccttctgcggcaacgtgctgtgcctcggcaactccacgccgcataattccaatgcggtatacagcgagaaacacaacgtgcgtttcgtgcgcactttgcccagcagattccaacaggccgtgttcttggccgtggctttggcgtcaagatctttgcgcagatagttgttgatttcgccattgtgcggcgcttcgttgtatccgttcatgcgccgagcgtagcgcattccacggtggcacaggggcaaaaccgaaaaatggggataacttaagcggcgcgaaccggttatccaccggcatatcgtgtgccgcgcccggttatccaccgcgcttcgggagtgtcgtccaccgtataacagcactcatcgtgtgcgaacagctagccacgctcaaaatgcctagcacatttatacgaatacgacatgggaaacggcgagaccagccccacacaatacaaagtgaccgccagccatgcgcccgactgcggcatacacggcagcaacgccaacgacaccaaggccaaacatggaatcagcagataggacaacacgtgcccgctttgccgtcgcagcaacgtctcagccgccacgcagcaggcaatcagcgcacagcagacgccgagcgatgtgcgactcagcgagaatgtatgccgatgcccaatgccgccttcacgatgtctgatgcggaaatgagacatcgactgagcaactgtgtggacatactgtgaacacgttggaaacgtcggtgtgttatcctcccactcatgtctgaaacgaacaatgaaacagcagtgcgttcgcgcacgacaagcacaacatcaccaagcaaggccaaattgaccccgctggttcccggcaaagaggacctgaaccgtccgctagtcgaactgacccacgtcgaaaagcacttcggtgctttgcacgtcctgaaggacatcaacctgaccgtcaccaagggtgaggtgctggtggtcgtgggcccgtccggctcaggcaagtccacgatgtgccgcaccatcaatcgcctcgagaccatcgattccggcgacatccgcatcgacggcaagcccttgccacaggaaggcaaggagctcgcgaacctcagggccgaagttggcatggtgttccagtcgttcaacctgttcgccaacaaaaccattcttgaaaacgtgacgttggccctcatcaaagtgcgtcacatggacaagaaggaagccgagcaactggccatggacctgctcgcccgcgtgggcgtcgactcccaagccagcaagatgccctcccagctctccggcggccagcagcagcgtgtggccatcgcccgcgcgctc

SEQ ID NO: 3655 - DNA, 5216 bp, Unknown
  R85_18m  MAG No. k141_41567
gggttgtggcgacaactatatcccggttctgacagcgcgccgattctttcggtgatcgagggaatgtgccattgtttttatggcattgccgacgaaaccgaagtgaagcatatggtatccgatatagtgcggcgatatatcaatccggacaagacctttgagaccctgtttccgaattggccggccgggtgatcgaatcccgacataccgagactaggcggcacccaccatccacatgtcccgtgcggcggccggcgcgtcctaagcgtatcccggggctgagttcctcggccatgtcgatgagcatgttcgcgaaccggtcgcgaatccattgctcgtctatatcgacgttaatgggatgtgtcatgcgatgctccttgccaaactgtgttggtggcttgggtgagattcgaattcgcgagagagtgtcggtgtttactcccggtcacgctatcccagcgcgaccggttaggcctctaccgtacgcaagccgtggcatgcgcggttggcttcgatccaacgacctgcggttttggagaccgctgctctacctgctgagctacgcgcataggtgggtatgagtaaagcccctgagatgtatgtcccagaggctttcgcacttatcctgatacggagtataccacggggtggattcaccactactcctgtctgtgttttgttttttcaggcggcttggatggtgaggcgtccgccgagggcgtggattaccttggcgatggtctggaagctggggtttccgtccttgctgaggcttttgtagaggctttcgcgccccacgcccgcgtccttggcgatctgggtcatgcctcgagccttggcgacgttgccgagtgcggcctgcatgagtgcggggtcgtcgtattcggctatggcgttgaggtaggcgatgatgtcctgttcgttttcgaggtattcgctggtgtcgtagtcggtgaattcggtgctcattgtcgttgttccttgtagtcgttgaggatgtcgtgggcttgtctgatgtcggtctgctgggtgcttttgtcgccgcctgcgagcagcagcatgagcacgttgccctgcatggcgaagtagacgcggtatccggccccggtgtggaaccgcatctcgctgaccgggcctcccacgggtttgatgtcgccgaatggcctgcctgcgagcttgcagacatcgagccgggcttggatggcggccttcgctttgtggtccctgagtttcttgaaccacttgcggtattcggcggattgcttgatttccatacctctattgtatcctacagactacatcatgtcaagccgaatggccgctggagcccatagccaacgcaagaatctcccgtatgttgaactcccggtagccgtcatcgacgggtctcgagctggggagtttgccccggttgagccagttgctgatccgcttacggctgacctcgtacccgtagtttcccttgagccattggctcatgcctgccggtgtcttggtcaggtggattgattcggcctcggcttggctttgctcgcgcagctcggccacgttgacggggtcgccgcatttgcacaggcgcagcgcctcgcccttcgcggccatcacttcgcgtccgcattcggggcagacgccgattatcctgcgggtgcgcggcctgcggtcaaccttggcagagcgtccatggtgcctcgacctgctggctgccgcagtattggcatgggttcggtggtgatgactgcacacgttgtactgtagggaaccatgaaagtcgtattgcaacgagtatccgaagcgtccgtggacgtggtcaatgaattgggcacgctggatcccacgttcgagccgcagcagattggcccgggattcatgattctggtgggcgtcaccgatgaggacggcgacaagcagatcgcctggttggcccataagattctgaatctcagggtgttcgaggatgcgcagggcaagatgaaccgttcgatccaggatatcggcggcgagattctctccatctcgcagttcacgctgttcgccgacgtgcacaagggcaatcgcccgagcttcatcaaggccggcaagcccgagcatgccgatttcatgtggatcaagttcgacgaggcgttgcgctccgggggagtgccggtgaaggaaggtcgtttcggtgcgcatatgcgggtcggactggtcaatgacgggccggtgaccatcgtcatcgacaccgagcatgacatgcctgacggaacacgctgaattgcgatagtaatttgacatcatatcccgttccctccaatatgttactaaagcgctttagtcttctgcgggcgagggcgcatgtcgatatgtttcccatgaacgggcagcacaatgatgtggccgcacaagcggcagagataaggggagtgaacagcagatgttcctgaaacctgaacagcaactggagcggtgcaagcgcatagtgcgccagcgcgtggaccctcatatccacccatcgatcgcacagcttgcggtggagtcctttgacattcccggagagccgatgcccactgacgagttcttcgagaagctcaatcgaggtgacatcgacttcaagccgtttacgctcggcggtgaatggggcaccacatggggcacagtctggttccgcctgaccggtaccgtgccggccggctacccgaaaggcaagccgctggagctcatcctcgacctcggctggtacccgcactcctgcggcggccatatcgagggcctcgtctaccgtgccgacggcaccgccatcaaagccgtacacccgctcaactattgggtgccgttcatggatgctgagggcaacgcgcaagtgccggtcgccgaagacggcagcttcaccctgtacctcgaagccgccagcaacccgctgctgctcggcgtgcctccgttcgttgagaccgaactgggcgaccatgccaccggcaagccggacgagccgtacgtattcaagtccgccgatctggccgaattcgatgaacgctacgagaactactccgtcgatctcgacgtggtgagctccctgatggaattcgccgacaaacagtcgccgcgctactggcaactcgccaaagcattgcagcgttcgctgaacgcctacgacgagcgcaaccccgaatccgtggaagccgcgcgcgcagcactcgccggcgtactggccaagccggccaatgcctcggccatgaacgtcagcgccatcggccacgcgcatatcgactccgcatggctgtggccggtgcgcgagacccgccgcaaggtggcccgcaccgtatccaacgcattggcgctgatggacgccgaccccgacttcaaatacgcgatgagctccgcccagcagtacgccgggctggaagaggatcatccggacatcttcaagcgcatgaagcggcgcattgaagaaggccggttcatcccggtcggcggcatgtgggtggaagccgatggcatgttgcccgccggtgagtcactgatccgccagattgcatatggccgcaaatacttcaaggaacatctcggtgtggagcccaagggcgtatggctgccggacagcttcggctacaccggcgcatggccgcagatcgcccgccgtgccgggtacgaatggttcctcacgcagaagatctcgtggaacgataccaccaagttcccgcaccactcgttcatgtgggaaggcaccgacggctcgcgcatcttcacccacttcccgccggcggatacttatgctgcttggtgcaaggtccaggaactcgactacgccgagaagaacttccaggacaaggatctctccgaccgctcgcttctgctcttcggtttcggtgatggcggtggcggccccacgcgcaacatgatggagcacctgcaccgctacgagaacctcgaaggcgtctccaaggtgagcatcgaagagccgaatgacttcttcgacaaggcgcatcagcagcttgcagagaacgccggcccagaaatgcccgtctggaagggcgagctgtatctcgaactgcaccgtggcaccttgacctcgcaacaggacatgaaacgcggctgccgccaagaggaatcgctgttgcgcacggtcgaatacctgggcgcagccgccgtgttgtccgatccggagtacgtctacccgcgcgaggagctggaccgcatatggaagacgctgctgctgaaccagttccacgacatcctgcccggctcggccatcgcatgggtgcaccgcgaagcccgcgaggactatcgccgcgacctgaagcgtctcgctgaaatcgcccaagacatgtgcgccgtgctgcgcaaggccaacccgcaggccgacttgctcgccgaggcccgcatcagccagttccgcaatgacggcgcgtcttggcatgccaaccgcatcaacgaaccgaccgacgcgctttccgtactgacccagacattggacaacggccgtgtactgctggccaacggcgtactgtccgtcaccatcgaggccgacggtacaatctcgtcactgcttgacgaggagcatggccgtgaactggttccggccggcacccgattgggccaatacgaactgttgaaggacgaacccgccgtttgggatgcctgggagatcgaacgcgaatccctgctcatggcgaatgccatgaccggatcaatcgaatcggtcgataccgaaaacggtgcggcacgagtccgcgtgcgtaccgccgacgatgacaccgtcatcaccaccaccatcacgctgcacccgggttcacacacgctcgatttccacgccgacattgactggcacgaacgtgaacgcttcctcaaagtcgatctgccgctgggtatcgtggccgaccaagcgacatacgactgccagtatggtctggtccgccgcccaatcgtcaaaaacaccgcatccgacgaagccaagtatgagagcagcacgaaccgtttcgccattatcggcgatgccggttacgccgcggccgtcatcaacggatcggtatacgggtccgatgccacgccgatcgccgggaatgccgccgaaggttgtgactcgggcaccatgttccgactgtcattgctctccgcgccgaccttccccgacccgcgcaccgatatcggtgcgcatgagttcgactggtccgtggtggccaacgccacggtgggccgtgcgcttgacgccgcttgcgcactcaacgcaccgacgcttcatgaca

SEQ ID NO: 3656 - DNA, 12166 bp, Unknown
  R85_18m  MAG No. k141_41729
tggccagcgacaccagcttgcgcatcgccggatacgggtcggcgtagtcaatgtcgtccacgtcgaaatcgcccagaatgtatgcgcgcacgatgccgatttcattcgggtgcgcgagcagctggtacatgcagttcggcgtggcgattttgaccttcaaatccgcgtctgccgggccgaaatgcgagccgtcgaaagcgtcgatacgaacgggagtggtggggttgagaaacagggacgccatctcgccgaccgtcatagccttgccatttgccattagctacctcattctcttatgatgatcaccccaactgtcgaggtatcttagtcctcttcaggagactgaaaccgttgaatacaccatctgacgaaccagttcgcgttcggctgatgaagcacgaatggaattaggcatctcgcatattgattgcgctacgcgcgaaataagcggatgagagacgagtttcccggagagcgtcagatgactccggaaacggtcttatcgttgagatttcgggcgatggaactggtttggtcaatggacaataattcgacaagtgcggaattccgccatttcttgccattattttcagtgttgttctttcagcgtgttttcaggtgaatgctcatccgcggagtagactggggaaccgttggaccactcaaagacagagtggaccaccagttaagacacgagctcaaaaggagagtcccctatggtgtaccgcatgattttcaaccagactgcatacttcggacgtggcgcgatcaaggaaattccggccgtcgccaagcagcacggcttcaccaaggcatttatcgtcactgatccggtactgctggagaccggcaccgccgagaaggtcaccaaggttctggatgaggccggcctgccgtacgaggtgttctccaacgtcaagccgaacccgccggtagagtgcattaaggacggcgtcgccaagttcgccgagtccggtgcggacttcctgatcggcctgggcggcggctccccgcaagacacctgcaagggcatcggcatcatcaccgccaacccggagttcgccgacgtgctgtccctggaaggcgtcgcggataccaagaacccgtccgtcccgatcttcggcgtgccgaccaccgccggtaccgcttccgagacgaccatcaactacgtggtcaccgataccgccaacaagcgtaagttcgtggctgtcgacccgcacgatatcccgatcgtcgccttcgtggacccggatctgaccgactccatgccgcgcggcctgaaggttgccaccggacttgacgccctgacccacgccatcgagggttacattaccccgggtgcctggagcctgtccgactgcctgtccatgcagaccattcgcatgattgccaagaacctagccaagtccgccgacggcgacattccggctggcgagcagatggcgtacgcctcctacatcaccggtatggcctactccaacgtgggcctcggcctggtgcacggcatggctcacccgctgggcggccgtctgggcgtggcccacggtgtggccaacggcattctgctggccccggtcatggaatacaacaaggactacacgggcgagaagtaccgcgacatcgccgacgcgttcggcgtcgaggacgcctacaccggcgacctggagaaggtgcgcgaagaggccgtgcaggccgtccacaagctgaccgtggatctgaagaacccgaccacgatcagcgaggtcggcgccaccgaggctgatctggaaccgctggcccacgacgccttcaacgacgtgtgcacccccggcaacccgcgtcaggccaccgaagaggacattctcgcgatttacaagtcgctgatgtgattcgtcgatgacgccgacgatgccggtgggttcccctcgtcgggaacccaccggcatcgctatctctcgtgcttttcgtcgtagacttcgtcggtgggggtctcgtcgtacagctgcttgccttgcgcctccgccagtttcatctgctcgttgatccacgcggcttcagcaggattgatatccgcggaattcagcactttctgccacaccgggtagaacatatgcatcgccggatacatggcggtgaacaacacctccggcttatgcgtgcgcgtatgttgcggatgcgcatcaaacgtattcttaaaacgtcgcatgtagttcaggaatgaactcagcgacgtgtccatccgtcgcgcgctcatcgcggcgatcatgcgcggcgagtacacggttttcagattcttgcccatcagatgcagggaaatatcgatatcctcgtgcatcacatcggccttatctcggcagacctcattcgcgatctgatgccaggccgaagcgcgcaaggccatattcgagccgaacagcagcggctggccgccatcggcacggtagattcgcttgcgtaaggaattgtcgcctttcaacccgaaatgacgtgagggcatgtcgtaatacatcaccggaccagtggcacccatcgcggccgggtcttcggtgaagatgccggagaccacctccacccagtcaggccggatcatacagtcggcgtcaaaacggcccagcacatcgccggtcgcggcgttcaggccaaagttgcgggtgggaatcagcccctgttcatcgttctggtgcaacagtttgaccggggcctcgggatgttcggcgatgaactgttcgacaatcgcgcaggtgttgtccgtagaacgattgtccaccaccagcacctcatgcggcatgatggtctggcgagtggcgttcagcagacagtcgcggatgcgttcggcttcgttccacgctgggatgatgatcgaaacgttgagcataacatcaacaatagaaaagcgggtgtacgccgccggcgtatccgagcttcaaacccctcgctacaatggggagccatgagcgaacgcgcgcgaaacataaacagcaccgacacgtcgagaagcggtgccgcagaagccggggcagacccggacgacgagaatcgtatcgactttggtactttgttccccgccaagggagattcccgcaggccaccggaatggttcggccgcgcgctgctgtatgtggccctcgccgtcatcgtattcatgttctgctggcgctcgtggggcgacatctcctatctggtgttcgacatcatcatctcgctgttcctggcgctggccgtcgaaccgctggtggtggcgctggtggctcatggctggaagcgtggcgtggcttccgccgtcagtctggtgggcgtggccgtggtcgtgggtgtgctgctcacgctgttcggcaatatgtttgtacagcagatgattgccatggtccgcggtttgccggcaatgtatgggcagattcgtgagttcgtggaccagcacgccacgttcaagatgccggaaatcagcaatcttggcatggaaatcttcaacaatatccagacctcgtgggtcaccgatttcgccggcaccgccatgagtacggtgggtggcctgttctccttcctgctgaacctcatgaccgtggtaatgaccacgtattacatctccgccgccggcccaaagctgcgccgctccttctgccagtggctggcccccaacacgcagcgtcgattcctgctggtgtggaccgtggcccaaggccagatttcgtccttcctgttctcccgttcgattctggcgctgatcaacgccacctgcaccgccatcttcttggagatcctgcatgtgccctactggctgccgttggccctgttctgcggcgtggtatcccagttcatccccacggtcggcacctatatcggcggtgcgctgccggtgctgttcgcttggggcaaccgcgggtggacgtacgccgtggcggtgctggtgttcatcatcgtctaccagcagatcgagaacctgattctctcgccgaggatttcgcagcgcacgatggatatcaacgcggccgtcgccttcctctcggtgctggcgttcggctcgctgttcggcgcattcggcgcgttcctggcgctgccggtcaccgcatcgctgcaggccatcttccgtgcgtacaccaagcgctatgagctgattgactcaccgctgatgaacgatccgactccggagaagaagtccaagatcgtcgaggcgtccgaggcgttcggcgagcacgtattgcagccaatcggcgagcacatgccgcgtgcggccaggggatccaccaaccgcgtgccgatgaatgaggaactgcgtttgctgcaggaacagatttatgcgattccgtcgcacgagacgaaagaatccgatttggacgattccgccaccgtggcgattccgaagaacgtgctatcctccagcgctcgcaagggattacgcggcactgagccggatacggcggcgattccgcagcgtggtgccgcggatacgcagcagtctgagcagcccgagcagcctgagcggtccgccgaacagcctgagcagcccgagcaacgcaagcaaaccaagcagtctgatcaatctgcctccagcaatcctagggcagggtggcgctgatgactctgctttccgtactcgatattcttctgatgatcgtcggcggtgccggcatgatatatcagggactgtgcatcgtgatgtccctgttcgccaagcccgtgcgcttccccgacgccccgatgaccaaccggtatgccgtgctgatctccgcgcgcaacgaagaaaaagtgatcggcaaccttattgggtcgattcgcgatcagacctacccgtccaacctcatcgacatctggctggtggccgacaactgcaccgacaacaccgccgacgtggtgcggtctttgggctgccatgtggtggaacgccacaatcttgagctggttggcaagggatatgcgctgacgtatctgttggggcatatgctcgacatcggtgtggccgatgattatgaggcctacttcgtgttcgatgccgataacaagctggacaagcactacttcgaggaaatgaacaaggcgttctgctccggattcaagattctgaccagctaccgtaattcggtgaatctggcggataactgggtgtcttctggttctgcgctgtggttcatccgtgaatcgcgattcctgtctaactcgcgtatgattctcggttcctcttgccatgtgggcggtacgggattcatgttctcccgcgaggtgatgaagcggaacaagggatggaagttccatctgctcactgaagatcttgaattcactatggattcgattctgcatggcgaccgcatcggctattgcggtactgcgattctctacgacgagcagccggttaccttctcgcaaagttggcgtcagcgtttgcgttggagcaagggattcctgcaggtattccgttattatggctcggcattgctgaaacgcgcggttcgcgaacgtgatttctcctgcatcgacttcacattgatgctgtgtccgtttaccgtgttgggcgcgattcgcgcggtgatgggcttgctgttcgccgcgtgtggcttcgtgagttggccgagccagctgcaatcgctggccagttggtccagtggcatcatcatatcggtgttgggcctgatggcattggctgcattgaccatcattgtcgagcgcgaccagatcggtgccacgaacaaggagctgctcgcctatgtgctcagcttcccgatttacatactcagctacgtgccgatctccttccaggccctcttctccaaagcccagtggaagcccatcgcgcataagggttgaccgagtccgctagtccggagccgctcagcggggcaatccaacagcaacccgggggtttgcttcgctgagggttggctggtggggtagagtggatgtatgagcttagacaatactcaaaggaatgtcggatttcagccgccgatgatgccagctgccgcccccgcgcctgcacagccgtcgcaaccgcagccacaagcatggccgccgaatccgaatgcggcggtgtccattcgtggcctgttcaagcacttcgaccggaagatcgccgtcaacggactcgcgctcgatattccggtcggctcgttctatggacttgtaggccccaacggcgccggtaaaaccaccacgctcaatatggtgaccggtctattggtaccggacgccggcaccgccatgattttgggccatgacgtgtggagcgacgtgaacacggccaagcgcatgatcggcgtcatgccccagcccgaccagatcttcgaccgactgaccggtttgcaattgctcgtctactccggcatgctgcgcggcatgagccgcgatgagaccacgcgtcgcgcccaggacctgctcaatgctttcgacttggccggggccgccaacacgatggtcaccgattattcggccggcatgaccaagaagatctgcctggcctccgcgatgattcatagcccgcgcattctggtcctggacgagccgtttgaatccgtggacccggtgtccagcgccaacctcaaagacatcctcatcgaatacgcgaagaccggcggcacggtgattatctcttcgcacgtgatggcattggtcgaaaagatgtgcacgcatgtggccgtaatcaacaacggtctggtgtgcgcggccggcacggtggacgaggtcgccgccggcgaagaactcgaagaccgcttcctgcaactggtcggcggccgccacgaagccgcccatctcgcatggctcgacggcgggcaagcccaagcccaagcaccaacttcggtccagccggtccagcccattccgcttacaaccgccacgcccgccatacccaccgatgaggcccgccgatgatcagcagcgccatcaccctggtccgcctgcgctggacgctcacgctcgccaccctgcgaaaatcggcgtggcagaccgtcgcctatgtcttttccgccgtactcgcggccggcaccatcatcggcaccggcgtgctcgcatggttcatcggcatactgccgcccttcaccgtgaacgcggatggctttccgctgaacatccttggttccggaggcatcgtcaacatagtcgtcgtgctggtcggcgcgaccatgaccatcttcatcggcttcatccagctcatgatgcttggcgaaggctccatcatgaacccacgcaaattcgcgctctacggcatcgccgaccgcaacctgcaattcggcttgctgctttccggcctgtccggcatccccgcccttaccggcgtggcctcactgatgctctggacactggcctatcggcatatgggaccagccgtaatcatcagttccctcctcgccgcagtgctggccgtcatcaccatgatgagcatctccaaactgctcatcgccctatccaccacgctggtgaccagcaaacgcggcaaaggcgcgttctatatcttcatcgtgctgacgttcgttatcatctgtcagttgccgaacattctggtcaactccggcgtggccttcagcctcaacaccgaaacctggggcgcggcgaccaccatcgtcgcatggacgccgttcggcgcggccttccaactaccgttcgacgcgcttaccggagcctgggcggtgctgctcgcccgcatcgccatccttgccgtcacatggattgtctgcttcgccgtctgcacctggtgtctgagacatgaacggctcaccatcggcgcaaacagtccgtccgagaccgccaaaggcatcggcgcattcgcatggatgcccgattcggcatccggcgcggtttccgcacgcctgatcacctatctcaaacgagacccccgccaagccatgaccttcgccatgccggtcctgttcctgatcatcttcgccttccaggcacacggcatcagcgcggtcgtctggcagtcgctgatctggtgcggctggttcatgtccgtcgtggaaagcaacgggctcgcatatgacggccgcggcttcaccatggaagtcatcgccggcgtgcgtggccgggccgacagaatcggccgcgtacgcgtctacgtcggcatcatggtcgtctacatggtgctgctctatctcgccggcatcgtgctggtcggcgcactgaccggacgctgggcgcagcccgatgacctcgctaccggcctgatcttcctcgccacgggcatgggcatcgccttgagcggactgggcgtggccgaagtcacctcctgtgtactgatgtacccggtcgcctcaatggacaagccgttctccgcgcctcaaggccgcgccatggcccaaggcttcttcccgttcgtctacatgcttggcagcctgctgctcatgctgcccactggcatcgtggcgctggtcatgctgctgacaggagccgaaggcggcatgtggctggcgattattccggtcgcgctggccaatggcatcggcattctggcactcgggacatggctgggcggtaagctgatggatgcgcgaatgctctcgattgtggcaacactcgactcgttcgcctcattgcagaaatgattgccttggcataaggagcacgatggtatctacagcggtatcacgccgtcagcgacgtgaagcgcaacggcggacccaacgatcgcatcgccgaacactgaccgtcatcatttccgcactgaccaccatcgccctgttcgcggggtactgcgccgccgacatcaccgacgtggcccccggattgttgacgttaaaacctgtcaccgcacctgttttcgccaatccggccaccgccaaatcaggcggcaccatcgccggtgccctgaacgcgaacaaggccattgattccacggccgcttctgcactggtcaacgaattgctgtccgcgcaaggcgtgggaaacgatacgtcggtgatcattgaagacgcccaaggcaccgtcgctgccgaacatgagtcgaacactccacgcgagcctgcatccacactgaaaacgctgaccgcgctcgccgcctcatccaccctgaacatggcatccaccttggatacccaagtgttcctgacccaatccgatgacggcaccaatacgttgaccctcaaaggcaatggcgacatgctgctgtctgcaggcgattccgacgcaaaccataccaacggacgtgccggtctgaacaccttggccaaggccaccgtggccgcgctcgcccagcgaggcatcacttccgtcaatctcgagtacgacgacaccctattcggcgactcacgcattcccgcaggtctgtcggaaggcggcgcggtcttaagcgactacaccgtctacttcacgccggtctcatcaatggcgattgatggaggccgccaatacaccgccgatacgcctgcgccggccgaccctgatgattcggccggatacccggaactgtcccagcacaccgccagcgacgtggccacgaaattcgccgaactgctccaatcgaacggtgtggccgttaccggagacgtgacggcaaacaccgctccatccggcgaaacgcctttggcctcggtgagttcggcaacactgtccgaaatcatggcatacacgttgcgacattcggacaatacgctggccgaggagttcggtagactcaccgccttggcgaaatcagcgacaaacagtcctgaaggcggcacggaagcggtcaaatccactctgaacgatctcggtctcgatacatccggtctgaccatggccgattgctccggcctgtctcccggctcccggctcaccgtacgcacgctggcggccgtccaacaacgtaatctgaccaccgagagcggcgcggccggcgcggaaggtctatccatcgcgggattggtgggcacggcgcaggatcggtatacggatgatgccgtggccggtctgctgcgcgtcaaaaccggcagcctcggcacggtcacgtcgatggccggcaatgtgtcccgtaccaatgggggagcgttgtcgtttgccgtggtggtcaacaatcctgaggattatgccgccgcgcgtagcgccatcgactcgttcatcaccaagctcgcggggctgtaaaagaggcatcaagggccatcaagggctacaaaggccgtaaacgtccataaacgcacgagtgcctataaccagaaaagggtggtgagtacatggcatattccgcacgattgcgcaaggccgtaggcgcggtccgaacaacgctgagcgccgtggaactatgcgatgtgcaggctcccgaattcgcgcagcatggggaccatgccgttgcctccgatgcaccactcgtgctcgtggcctgttcaggcgggcgcgattcgatggcgctggccgcggtaagccatatcgtatgcacgtccatgggcgtgcgttgcggtgtcgtgattgtggatcacggcttgcaggagggttccgaacaggtcgccggcgaggccgcggatcgttgccgtgcgttgggactgggcccggtcatcgtgcgcaacacaaccgtgcaggcacgcggtgagggcctcgaagcggccgcacggcaggcccggtacaacgagctgtgcaccgcggcgcgtgaatcaggtgccattgccgtgctgttggcccacactatggacgatcaggcggaaaccgtattgatcggactgctgcgcagccgtggcgtggatgcgttggccggcatgccgcaggtcttcacacgcagtggcgtgacttttgcgcggccgctgctgacccttactcgagacgaaaccaccggcctctgtgaagacttgggtgtggaatattgggatgaccccaccaatggcgatgcggtagacggcgagttgccggacgactatccgttgcgctcgcgggtacgccacgacctgctgccggccatcgaacgattcgctggattcaatgtcacccgccatttcgccgaaagcgcacagctggccagaatggacaaggagtatctggatcagcgatccgacgaggtgatgggggaggcggttacggcagttgaccggccggcatcgtcggcagcggtatcgaccgatacgccacgagcctgtgctgcagacgataccaacgattcgggccatggcatcggcctgatgatcggcgtcaaacgtattgcacgtgagccagaggcgattcggttgcgggtcatcgctcacgcgctgagccaggccggtgtgaacgccagtgccgcccagattgccgccatcgaccggctggtcgtcgattggcatggccaaggcggcgtctcacttcccagaggttattcagccaatcgcaagaaacacgtcattcgcgtgtgccaagatggagcgcatgcgaatcgctgacgttgaggaagatattgaccacgagctggtcagcaaagaacagatcgatgccaagatccacgagatggccgctctcgcgagcgaggattaccgcgataagaatccgctgctcgttgcggtgctgaaaggggccgtgaatacgctggtcgcgttcacccaggccatgagcattcctgtacagatcgacttcatgagcctttcgagctatggctcgggcacagtgtcgagcggtgaggtcacagtcaggcaggatttgtccgccgatgttcgcggacggcacattttgattgtggaggatattgttgattcaggacgcacgctcgcgtggctggtcgcagaactgaaacgtcgtggtgccgcttccgtggaggtcttcgctttgctgagcaagccttcccgccgagaagtggacgttgatgtgaagtacgccggctatgagattccggacgagttcgtcgtcggcttcggcctcgactttgacgagcgctaccgcaacctcgattcgatcgcggtcctcaagccgtccgtctaccaaggagtgcaagcatgagcttcccgcaagggccgggtaacggcaataatccgaacccgaacaacaaccgtaacaacggcaacccgttcaccaacccgttcaaccgtggcaataacgggaacaatggcaaaggcaacaacaacgagaaccgcccgatatggcagtccccttggctatggggtgccgtgctcgtggtcatggtcgtgctgatgttccagatgttcgccggcggtggcaccaaaaccatcgacaccaaagatggtttcgcgctgatcaatcagggcaaggccacgtacgccgagattacggacaacaagcaggtcgtccgccttaagctgaagaacgactacaccaagaa

SEQ ID NO: 3657 - DNA, 5615 bp, Unknown
  R85_18m  MAG No. k141_42185
ggtcatagccctgggccgcaaggctgcgttccaagtcaagtgtcggggtaatcatgcgcggctcccatcgtctcacaatggttaggattcagacggtccaggttcaaatggttcaggattcagacggcccggaactcaatcgttcaaagactcacacggttcaaaaaagactcaggaatttgagccggaagcgtcaggcacgtccttgaagacttcgtggtggtcatcaatcgcaccaagccggtcaagcggccagtatctcgcgattccgactccgaccacatcggagatgggaaccaagccgcgatcgccgtcatcctgatgatagcgggagtcggcggaattggcgcgattgtcgcccatgacgaacacgtggtcctcggtcacggtcaccgagaacgggaaggcgctcgggtccacgccggggcgaatgtaggaggtctcattgatggccacgccgttgatggtcaccggctggcccgcgcccttgcattcgaccacgtcaccgggcaggccgatcagtcgcttgatgaggtacccgccaccgggagcgctgctctgctcctcgttcaaccagttgttgggatctttgaataccacgacgtcgccgcgctgcagatcgaagatcttgggggtgagcttgctggtcaccacgcgatcgccgggcaccatggtgtccatcatcgagcgcgaaggaatctcgtaaaagccgacggcgaaaatgcgaatcagcagcacgataagcacgggaacgccgcaccacaggaaaaagtcgcgtagggtgaagtggtcatcatccatcgatgatgctgccgcggcattcgcgccagcggaagaagcggcgtgcgccgggcgcgccggtgccgggggaaccggggacggggcgatgccgtggtcggcgacttggaacgtacgggaatcgcgggcatcggcctcgtcatcatacgaggtctgattgctctccggattgtcggaaatcgggaattcgccgttatcctgatcgtcctgcataccatctcctcgcgattcatgctgccggatatgaggggtgccggcgcccgtccatcatacgtggaaaatacggaaacagcccgaaaccgaaacggttccgggctgaatttcacggtttattcgcgcacctgcatcatcaggcccacgattgcacccgcgaatcgactcacttagcggagttgtcgcggcgctcggcaatacgagcggccttaccgcgcagagcgcgcaggtagtacagcttggcgcggcgcacacggcccttacgcacgagcttgatggagtcgatggacggggagtgcaccgggaagcgacgctccacaccagtgccgaagctgatcttgcggaccacgaaggtctcacgcacgccagcgcccttacgagcgatcaccacgccggtgaaggtctggatacgggagttgttgccttcctggatcttcacgttcacgtcgacggtgtcgccgggacggaaggccgggatttcctcagccggcttcatgtgcttggcgtcaaaagcctcaacagcgttaaccattgttttccttcagtgctgccgcatatcagccacagatctggggccatccacgcgattgcgcatcacgtgcgttggcctgttctcgttatccctcgggtttgcccttgggaagcctgccgatccgccgaaagtcaggccttgcggccgttcggactggacccatggagacgtgggcttatgcggcggcccacttctcgacacagcaatcgtcaattgtacggattattgcggacagaatggctgcctgatggcattccaacaccaaggcactgcgacgtagttgacagacctgcaggcgggctttatcttgggagcgtcggtaggcgaggctaccgcagggatatgggttgctgccgctaacagtggagacactgcacgcaggtcagcagttcttgtcggatcaaggcatgaactaacgcaattccaccgccctgcgatgctgaagcttgaacgatggctcgaatcggcggattcgaatactttccgcccctcctgctggtcgcatggataccgacgatggtattgatctggcgtttcagcgcacggcttgaaggaggtgagagtccgatggacggtgattattccagtagttccgccgccggcaacagtcatagttgcggtggtgatgaccatgttttcttatattccgttatccggaagtcgggctctcgcctgtagtgttccttggctccccggataacccttgcataattcgtctttcctatgcatagggaggtcttttcatgaccatgttttcattcaatcgcgtcggcgcgcgtccaaatgcgtcggcccgcaacccttccaccgccgcgtccgaccgccagccattcgccgtgcgcctggcctccgacgtactggtcgcggccggtattctggcgctgttcggtctgatcgcttggattctgccggcgatcggcgaaccgatcggcccgaaaggagtgccatcacaagtcagtacgaatctcgccgacctgccgtattacgcgctgcgctcggtgttccgcatgctcgtggcactgttcttctcactggtgttcacgttcatctacggcacggcggccgcgcgctgccgccgcctgagccgcgtgctgattcctctgttggatattctgcagtcggtaccgattctgggctttctttcggccaccatcaccatctggatggtgctgttccccggctcgatgctgggcgtggaggccgcgtcgattttcgcaatcttcaccagtcaggcctggaacatggcgttctcgttcacccggtccctgaccagcgaaccaactgaactcgacgaggcggcccgctcactacagctcacacgctggcaacgattctggacactggacgtgccgaacgcgatgattccgctgctgtggaactgcatgatgagcgtgggcggcggatggttcttcctgaccgcctccgagatgatctcggtgaacaatcgcacctatgcgttgcccggcatcggcagcttcgtggcacaggcggcggccgaggagaatctcgcggccatctgctgggccatcgtgacgatggtgctggtggtgctgcttatcgacgtactgctgtggaagccgctgaccgcgtgggcggagaagttccgcattacgcaaagcgagtcggcggtgcgcaagaccagtgtggtgctgaccatcattcgtcagtcacatatcgatgagatggtggcctggctgttcaggcctctcggcgacctgttcgacacgctggcccgcccgttgggtcggaccggtggacgttgggcggcggacgtgaagtccgcacgcagccgcgcgcttgacgtggtattcacagtgctggtgttggcagcgtgtgcgttcggactggtgcagcttatgctggtgattcatcgcgatgcgggattcggcgagctcgggcaggcgttcgtgttgggcatggtgacgttcctgcgcgtggcgctgcttacgctcgtctgctcggtgatttgggtgccgattggcgcgatgatcggcatgaatccgcgcgtttcgcggtttatgcagccgattgtgcaggtgctggccagcttcccctcgaacttcacgttcccgttcgtcacgctctggttcgtggcatgcagcgtggatatcaactggggcagtattctgctgatggcgttgggcacacagtggtacatcctgttcaatgtgatcgccggggccagccagattcccgacgatctgcgtgagatgacgcgcagcttccagctggggcgctggcagcggtggcgcgatttgattttgccggcggtattcggctcgtgggtcacgggcggcattacggcggccggtggggcgtggaatgcctcgattgtctcggaaatcgtaagttatggacggcatacgctgaccgcctccggcttgggcgcgtatatcgccgaggccaccgaaagcggcaacaccgtgaggaccatcatcggtgtggccgtgatgagcgtgttcgtggtggccgtcaaccgcctgttctggaacccgctgcagcgcatggccgagcgccgtttcgcactgaactaaagacttaaggagaataatatgactgttgcaatggaaaccattcgttcgctgcgggcggtgaccccgcagaacaccatcatcgaagcccagcacgtcggccagcgcttcacggccgacaacggcaccgaactcactgtgttcgacaacatctcgttcaacctgtacgagggcgagatcgtggccattctgggccgttcgggtgccggcaagtccacattcctgcgtgcgctggccggactggtcaagccgaccagcggcacggtcaagtatcgcggcgaggccctgaccggtccgaatcccggcatcgcactcgtgttccagaccttcgcgctgatgccgtggctcaccgtgcaagacaatgtggaactcggtctgaaggcgcgcggcgtaccacgtgcggaacgcaccaaactggctctggatgccatcgacatgatcggcctggacggcttcgaatcggcgtatccgaaggaactgtccggcggcatgaggcagcgcgtgggcattgcacgcgccttggtgctgcggccggacgcgctgttcatggatgagccgttctccgccctggacgtgctgaccgccgaaaacctgcgtcaggaagtgctcaagctgtggtcgagcgaacagcgcagcatcaagtcggtgcttatggtcacgcataacatcgaggaagccgtggagatggccgaccgagtggtggtgttgggctcgcacccgggccatctgattgccgatgtgcgggttgatctgcagcgcccgcgcgaccgtcacagtgtcgaattcgaggcgatggtggaccgactgtacgcgattttgaccggacaggcctcgcagcctacgcaacaagccgaggctctatcgccatcggcatcgctcacgaacgcacccgtcacggacgcatctgtcacggacgcatcagaccttcagcccgccaagaccatcgagaaaatcaaggagcatccgctgcccaacgccacgccgggcgggcttgccggtctgctggatgtggttgccgagcatcctcacggcatcgacttggcagatttggcctcggctctttcgttcgaggtggacgacctgttcccgctggtggatgccggtacgatgctgcgcgtcatcgtggtacgcgacggccatgtgcagatcaccgaggcgggcgactcctggcataaggcggacattctgcgcgccaagcaggtgttcgcctcactggcgatggaacacgcgccgctggtgcacaacattgagcatgcactgcggaagtctgcggaaggcaagctccgcggcgagctcatgctggacctgctgcgcgcccgttacgccaacgacgaggcgcatcagcagttcgccatcgccgtggagtggggccgttacggcgaactcttcgattacgatgccgatgacgatctgctgagcctggatgaggcgaataagggcgaataagcgaatcagccacgtgagttggctagatagtgcctttatgcctgcaaacagatgccgaagcggaatatgaccatgttcgactcatctgactgaca

SEQ ID NO: 3658 - DNA, 5608 bp, Unknown
  R85_18m  MAG No. k141_42374
caattcgaactgcgttccgcacaaccccgcacacgtggccgcgaacgggtcgaccggtcgtacgggtacctgctcgacctgctgatccgaggcattcggcggtgaatggtgagctccctctgatgaggtagctcagtattgatacgctgtactgccgtcggcgttgcggatggtgaaagtgggggattgctcgatgttgaggtccacggtcagggaatgctgggcgtcggcgctcgtcgaacgatagacgaagtgcttgttttccagcttcacggcctcggtacgcgcatccatcagccatgggttgcgacggcgcagcgcgatcagcgcctgatgcagccggtatgtcggctctcccagcgtggacagttcggcaggggagtcggggaacttcggacgtacgtcgtcatcgccgccgaaacgctcctgcttgacgcccacatagccctgctcgtcgccgtaatagatgcttggcacgccgccgaccgtcatgagcaccgccaatgccaacgccgccttggccgggccaatctgcgatgcgatacgcgtcacgtcatggttgccgatgaacgtctgcggcacgaaggaatccaggaacgcgttgtgccgcttgagattccaatccagctcgaagaagttctccgtctccagcgcatgctggatcgacttccatagctcgtattgcgtgatcgaatccatcgtggattcctcgatgatgcgcgggtaatcgccatggatcacctcaccgaaaatccacgaatacgggtgtgcggctttgacctgcggcaacacgcgcgcccagaacgggctcggcacggcatacgcggcgtcgaggcgccagccggcggctccgcgatccagccaatggctcatcacatggaccacatagtcaacggtctcgtcagccgaatggtccagcgccaccagatccccgtgcccctcgaacacatccaaagcgggttcgtcattatcaccgacatgcgcgcggaccagaccatgccacgggttgtcggccggattcaagcgtccggcggtctcgtcaagcgccgcccggacggccggatgatcgcggctcacatgattgaacacgccatccagcaccacctgcaatcccatgtcccggcaggccgcaatcagctggtcgaacgcggcatccccgcccaatcgcacatcgatgtgcatatggtcgagcgtgtcgtatccatgcgtcgccgactcgaacaccggacccagcagcaggccggacgcgcctagatcgcgcacgtactccagccaagggatcatcgcgtcaaggccgcggccatggaactggcgcgggccggcgggcctgatatcggcaccgcagaagcccagcggatacacgtgccagaacaccccgtacttcacccaatcgggcattgtgcggctcgaatccgtgcttgcaaccactgtgcacctcctgattgacaccgtgtccattttcgcacacgcatgaccgaatcctcggcagatggcgggaaatgtcgacgagcatatcgaagcaaagtatgagcctgcccccgttccgttggttggtatgcaaggccgtgaccctgatttgcgctggcatggaccgccgccgcaccaacgggttcttcacctacgcgcagatcgtgggcgcggcggccatgagcttcatgcatggcgcgcaggacggccagaagttcatcggcgtgctgttcctcggcatggcgttctgcaacggccaacccagcgtgaccggtgtgatgattccggtctggctcatgattctgtgcagcaccatcatgggcgtaggcacgtccgtcggcggtgaacgcatcatcaaatccgtgggccaggacatggtgaaactcgagaaataccaaggcttctcggccgatctgtcaagcgcgctgtgcctgctcgtcatgaccgtgctcggcatccccgtctccacaacgcacaccaagaccagcgccatcatgggcgtgggcgcggtacgccgcctctccgccatcaacttcggcgtggtgcgcgacatgatgctcacctgggtgttcaccttccccggttgcggtctcatcagcttcgtaatggccaaactgttcatggtcgtgttctagaaaggaatccacccatcatggcgagacaaaaagacgcgttctacttcgacggattcctccgcagcgcggactacgcatgccaggccgcgaagctgctgtccgaggtcatgcacgacttcaatccggaccagctgcgcgaacgcatggacagcatgcacgcgattgagaagtcggcggacgaggtgcgccacgacatgatggacgaactggtgaccgcgttcatcacgccgttcgaccgtgaggacatcgacgagcttggccacgtgctcgacgatgtgaccgacagcatcgaaggcgtactcaaccgcatgtactacgacaatgtgaccgacatgcgcgacgatgcggtccagatgtcggatatggtggtgcgcgccacggaaagcatctgcgagctggtcaacgaactgccgcgattccggcattccaagacgttgcgcgaactggtgttcgccatcaacacgatcgaaacggacgccgaccacctgttcatcgagtcgatgcgcacgctgcacaccacctgcaccgatccgctgcaggtgttcgcctggcatgacgtgtaccgtcacctcgaacagtgctccgacgactgcgagcgcgtggccaacaccatcgacagtatcgtcatgaaaaacagctgaggttggtttttcacaacctccctctgatgagccgagccgtgaagaaaacgccggaggtgtttttaggcaagggtgagtgacaacgagcgaataagaggtcagctgcaagctgtcctgaatcgcgttcgaggtggcatcgcgaagcgatgacggagggagagacctacttgaccaaaggcccctcaccgatgggcgttgagccagaggatggcgagttgggtgcgattggtcaggccgagcttgtccagtatcgcgctgatgcgattgcggaccgtgccttcgctcaggaacagtctggcggcgatgtcgcggttatcgaggccctcggcgaccagtgcggtgatctcacgctcacgctcgccaagcaggccctcgatggaatcggcggtatctctggaatcgtcggaatcggcaggattcggagtccgttcggtgagcttgccgagcacttccgcgccgagcaccacctgaccggccatcaccgcctgcagcgcaggcccgaccgccgccacatcctgtttgatgagatagcccttggcgccaagccccatcgcctgcgcgatatacgactggtccgcaaacgtggtcaggaacagtatgcgcgcggccgggtccgtggccagaacctcgcgcgcggcatccaaaccgctggtgcagggcatctgaatatcgatcagcagcacgtccggtcggctcgccggcgtctcgaaataacggcgcacggcggcgtcgccgtcatttgccgtccatagcacctcggccgtgccggtggccgtcagaatcgtctccaacgactggcagacgatcggatcatcatccacgattgcgattctcatcaatccctcgattccatggtccaacgcttcttcggcacggatacgaacacacgccagccgtcctcatacggcccgcagaccgcggtgccgccaagggcgcgcacgcgcgattcgatatccgccaaacccatgccgcgcatcagctcatcggccgaaccacgcatatcggcaacgccgtcggcggcgagtcgcgagccgacgcgcgtggcgcacatcgcacgcgggcgggcagcggccgtccgggacccatcggactcggacacggccggccccggatcctgaatgaccaactgccagaacgcggggaagtcgcgcaacgtcacgctcgcctcgcgcgccgcactatgatgcaccacgttcgacaatgcctctcgaatcacggtcgcgaaacagcgcgagaccggcgcgggcgccttggcgatgtcgttggccagcgtcacggcgaaaccgggggagatgccgtcgaacgacgtgacggcatcatcgatctgcgcggcgaaatcagtgccgtcatcctcaagatcatgcaccgaacggcgcaccatcgtcatcgcatcatccaacgtcgcacccaacgtggcgaacccttgcgcggcgaccgtatcgttcgtcgcctcggccaccgtcctgccggcctgcgcctgcatgatcgcgcgggtcagcagatggcccacattgtcgtggatctcccgggcgatacgcgtgcgctcgccgagggtcgccatgcgaatcgactgggcgcgttcctcatcgatgtcggcgatgcgcgaacgagtggcccgcgaggattcgcgcgccctgtcctgcgcgtgcagcaacgcgcgccgcgcctcgtccgaggaggcgcgggcccggcccagaacgaatccaagcagggcgaccatcgtcatcaccagcgtctggagacggtcggtgccacgggcgaaccagagcgcgatcggcggcaacagccatatccagcgcgcggcgaccgaaaaccacggggccgaacgtattgcatcggcaagggaacggcgagaggccgcggtccgcgagacactgggggagcggccgcttgtcgcagtccgtgccccagttcgggctccggccgaggcgagggccggcagctgtgcagtatcgtaggcgatgagcggcatgaacgcgcaccatgaaggcactgccacggcgatgacgagatacgccgtacacaagacccaagaccattgcgcgggacgcagccattccaccaatccggcgacggaaacggccaacagcaggccggcgatgaacacgccatcgagccgcaccccgacaagccaggccaaagccaggcccaacacgagcagcaagcccttctcggccaacacgcgcatggcacctccccggctcgacgctctttcaccaccagtctagcggtgtgcggaacacaacgaacttgacgggcgtgcggaattattcgcatgacggtccaagacaacgggtctacacttcccgaatagatgaggcacaagcgtcggatgttgtcgacacaaccgtaaagggatgataccgatgattgcgcaaagccacagggcgtccaactattcgatggacgagatcagcctgatgccggtcgataaggtgtacaaggccatgcagaccgacgccgaaggactgtaatgacaaatgtcacgcctgtacggccaagtcgtgacgtttgcctgtggcggcgtccggccccttcttgggatgatggaatcaccaaggaagggagtggctatggcaaccgacaacagagcttccgaacacgactcgacaaccaacccggccctggccgtgcacgtcagccaactggtcaaacgctacggcgacatggtggcgctcgactactttgaccttgacgtgaaccagggcgagattttcgggctgcttggaccgaacgggtccggcaaaaccaccgcgatcaactgcatcctcgcgctgctcacctacgattcgggcacgattcgcgtgttcggccagccgatgacgccgacctcctacgcgctgaaacgtcgtatcggcatcgtgc

SEQ ID NO: 3659 - DNA, 13060 bp, Unknown
  R85_18m  MAG No. k141_42914
ggttccaagtgtctcatgggcttgagaccggcgatggtgcgattgcgggaatggcgcggagagccgtggactggccgcggccgatagccgggaagccgagccgcagcgtgaagcgtcatacgagttgtctcgcgatgatcaacgcgccggcaacgaccatgagcgccgagaagacacgcagaagagtccttttgcgttctcttcccagttttttggatccaataactacgtatatcatgaccaatccgacggccagcggcaccaaggccagcagaaacagcggtttttccatggcatctcatctcgaatgctgtggttcagatttttcgatgttcggtttttctgcgcttactgacaagagccatggagcagcatgccgatacgcacagattcactatgcaggtcgccgccggcagtagccgtatgaacggctgactgtagaaatcgaggacatccggatccatagatcctgagtatatttcaaaaaccggatatgatgcgagagccggcgccgaactcacgaggaacagtatccaaatgacgggcaatctcaggatggatactgttcggcctttccgatggacttctttcgagaacatgaaaagagcccaagaggtcactgcgattaatgcacccgcgcaatacaacagaccagggaagtcgctacgcatgattccgtcctcacttcagtcgcaggtaatttggcttatcgatcttctggctggttcgagattaccatacctgacatggcagtcgaattgcccgttgtctattggcagagcatccgactgttaatcggacggtcgctggttcaagcccagccgcaggagccagacaaaaacccggaacttcggttccgggtttttgttacccgccccccgaaactcctttatcaaggaatcatccataagggatgccgcagcagacggtctccaaggcgtactacaccgtgctcatccccatggacgacggcaactggcacgtcaccgtgtactgtcccgcctcgctggacggcccactgctcgacaaggattccaacgaattcgacacggacgacgtgaaacccggcgacaagtcgtacaccgttgccaatccattccacctggatcacgcacccggaacagacggtttcatcttcggccctgacaccctccgacgatagcgatggactaaccattcaaccgcacgcgtaggaggagcgcattccaaccatgaatgaatgacatatagacgtcaagggcttgcgggcatcgtgcccgcaagcccttgacgtctcaatccaacgaaatatcgacttttacccgtttgtcggattcaggctttcgcgcaagtccggcgatgaggagggccaccagcagggggatcgtcgtcagtgtaccccaggaaatcgagaacgtgtcggcgatgtagccgcacagcggggtgacgaccgcggtgaaggccatcaatacgagcgatcccacggagaacgcggtcgcgcggatcgaatcgtcaatgctctcgtgcaagctgctggagatcgtgttcgccacgtacatctgcgcgcaggagaacacgaagaacgccaggatcctcaccgccggcatcggcgtggccgcaagcaccaccgccgacacgatgagcacgaggatcgcaatgtcgccggaacgtggatgcagccgcagcatacccagacgactgccgacgatctgcgcgatattagtgaacactaggccggcgaactgccaccagaccccggtctggtggcccatcagcagcagctgccagaacgtcagcaccgacaacgtacccagattgaacaccaccatattccatatctccggcttccgcagcagcacggccgcggccgccacggtctgcctgacatgatccaacaccgtcagcgaggtcccggactcgcccggctcggcggatccatcggattcgacggacgcctcggcctgccgttccgtcgtcccgctcccatccgtcgctgcggccttggtgcgcgacccggccctcatcagaccgagaagcgggatgatcgccaatacgtagaacaccgtcgcgcccagccagatcagctgggagtcaagcaggaacagcacggcaccgaccgcaccgccgcatatcgtgcacacagcgatcatcgccgacagtcttgacaccaaggtcttcatacccagcgagggatcgtgcttgcgggcgtattcgatgtacagcgaggacgccgcgccgctttcgaccgcggccccgatgccggccagcacgttggccaggcacagcacggcgaagttcgtggaccagaacagcatcaatatgaatcccgcgacgcggcacaacacgccgatgatcagcgtccgttcccgggaccaccggtcgaacagcacggacgtgggcagctcgctggccgattcgctgacgtcgaacaccacattgacgatggagatcagcagcaccgacaggcccacatcatgataggccaccatatagtagaccgaaaaacatccggtaccaagataaataagcgcattatacaaacaggcaaaccgaaccatcaatcattcccttacataaacaaagaaccggtatacgtgggactgtctctcgaagtgtgtaactggccttaactggccggtcgtgtggccggtcggaaaggctggtggacgatgtgtgctgggacaatgggaaacatgacaccgacgaagaagccggacgcggaaaaacgcaacgccgagcgggaggcggcgctcacattcgtgcgcatggccaaggaaaaaggactggacctgacagggtccgacggactgctcaaacagttcaccaaaagcgtgctggagacggccctggacgaggagatgaccgagcacctgggccgcgccaagcacaagaaatccaaggacggcagggccgcgaacacgcgcaacggcaccaccgccaagaccgtggtcaccgattcggtaggtccggtcgggatcgaggtgccgcgagaccgcgatggctcgttcgagccggtcgtcgtcaggaaacggcagcggcggctgcccggggtgggcgaggtggtgctgtccctgtatgccaggggcctgaccaccggcgagatcagcgcccacttccaggagatctacggggcggacgtgtccagggagaccgtcagtcgcatcaccgagcgggtcgtggccgagaaggacgaatggtgctcgcgtcccctggatcgtgtgtacgcggccgtgtccatcgacgcgaccgtcgtcaaggtgcgcgacgggcaggtcgccaaccgcgcgttctacgtggccgttggcgtggatctggagggcgaccgcgacgtgctgggcatctggacgtcgcccgccgccgcggcggcggcccgcgacgcgatgctggacaagtgggaggcgagatatcccgcgatccgcaggctgtggatggacgcgtgggaacggttcataccgttcctggactatgacgtggagatccggcgcgtgatctgcacgaccaacgccatcgaatcgctcaacgcgagattcaagcgctccatccgcgcccgcggccacttccccgacgagcaggccgcgctcaagtgcatgtacctgaccgtccgctcgctggaccccaccggcaagggacggatacgatggagcgcgcgccggaagcccgcgctcaacgcctttgccatcaccttcgccgaccgctggccaagcgagggaacacaacaatgaaaacgccagttacacacttaacgagacaggcccgcgtctgggccggtggccggcgatccgctggtgccgctggtgccggtactggttgaagtcgatcccgatggatctttttgcgtcgagccggtgccggtgccgttcgaaccggtctggctgccgccgacgccttggctggtcgggtcttcggtggtcggattctttgaggtgccggtgccgttcgaaccgttggcggtgccgtcggttttcgaatccgaggcgccggcgccggtcgaacctgaggtgccgttggcgtcgaagtcggtggagggggcgtcggttttcgaatccttgctggttcccttcgaatcatcgccggtgcccgtctggggcagagcgttgttctgatcgggggtgcccgttcgcgtgccggtgtcgttgcgcgcgggcgtggtcgtggtgggggatacgagattgtccgtgccgcgtccctgcgtggccagcatcacgacgccggccgtcaccgccacggcgagcaggccggacaccaaggtgacgatcatggcggtgtgcttcgaagcgcggaagcgggacttgcgcagctcatcgaccgagtacgtcctgccgttcgcccggctgaacacgatttcacgcggtctgcgtgtggaggaagcatcatcggcggtcacgcccgtcgccgtatcgggctcgtcccgaacgtcggtccggctgccggccgttcggggggtgccgccatcggcatcgccgttctcggcgtccttcgtgatcccgctgccggaggacgaggccgattggagtttttcgccggaggcggtgagcacgttctggtagatcttggtggccacggcggagacgacataactggccgccgctccgatcaccgaaccgccgatgccgatcttcgatgcgagcaggaacgaggtgacggcggcaagggtgcccgccacgatggatgagagggagattccttcaaaaaacttcttcacaatgcacgaccgtagggtgtcgggctgacaggttgcctgagactcgatggaagcggggcgaggcctacacgagaccttcaaaatcggccttcgtacaggtcggacacgccctgcggcgcacacacgtgcgtttcgcgtcgccgcaggccgcgggacatcgtcaattacgatgcagcgactgcccggtcggtctgatcaccgacatcagcacggcgacgaagatcagcgcaaagcccaccagcgaagtccacatgattgtctcgccccagaacaacgcggagaacgtgacggcgaacagactttccgtacacatgatgattgacgcctgcgaggcaggcacgtgagccagaccgatgttctgcatgatctgggcactcatcgtggcgccgaggaacagatagagcacgctggccactactgagggtgccagccagctggcgttcggcatgggttcggtgaacaacgcgccgatgatgaacaatacgccggcaacgccgaactgcacaaaagtgacggcgatagggtcgaagcgtttggtgtagacaccaaggcaggtcagattgaacgagaagatgacggcggttgcgatggtcagccagtcgccggcgctcagagacagcgaaccgcccggcttcagcgagacgaagccgacgccgatcagacagatcacgccggcgaccagattgatggccttcgggcgggttttcgaaatgatccacgtggcgaacggggtgagtacgcagtaggcggccgtcaggaacgcgctgcggcccggttcaatggtctgcaggccgatggtctgggtgaccatcgtgccccagtaggtcaggcccaccacgagcgccggcacaatgattttcggcgtcagatacggcacgatgtgcttatggaacaaggccagcatgcacaggcaggcgcctatcatgcgcagacccatcagccattggggcggaatcgcctccatggcgaatttggcgagcagataactgccaccccataatgcggcgcagcccagcaacatgagtcgggcgagattcgggggaaagctgcgggaccagcggctgcgcagcttgctgaaacgttcgaccaaacccatggtgcacctcaggacagttaggaaaacttgtggctctctcggctcacagattacgggaactaccggccaaaatcgaccggtcgatgggcgtcgggtgtgtgacaggtgtgtggctggtgcgcggccggggcgcggcatcgccaagcaggtaagaaccggatgaaagctgtgcgaaggtgaggttactcacagcgaacatccgggctagtcgcgctcgaaaccggtactctggaaagagtaaaaatacgttgtccatagcaatcatgaaaggattcgacatggcagtcattactccggaaatcaaggaattcatcaagaacaacctcggttggatcaccaccgtctccaaggacggcgaactggacctcggcccgaagatgtccctgttcgtgctggacgacacgcacatcgcctaccacgagcgcaccgccggccagcactacgagaacctcaagaacggctctccgctggtcatcgccttcgccaatctcgagaagaagcagggctaccgcttccgcggcaacgtggtgttgcacgttgacgacgacatctacaacgagcaggtcaagatcgccgaggaaaagggcaccaagaagccggccgtgattccggttctcgaagtcaccgagatccagaaccttgcctccggtccgaccgccggcaagaccatcgccaaggactgattagctgacgtattggtggcttcctcgtcagagggagccactttttcgcttttcagtgcgcagtactaggtgatggcctttgaggtcggtggtggcgaagaggtaggtgttgccgccgtccttgagtttgagttttttgcgcagctgggccacggatagggggaaattgcgtacggcgatgttggcgtgcgtgagaccggccaatagctgcttcagttctttcttgttcatggtgacgatggattcgatgacgaatgatctgcctgggaaatcggcaataggttcggccgccacgaacaggtggctattcgggctgatgtgatgcacgacgaagcgctgttcgagaacatcaaagcacccggccttcatgattgaggcgttgggttcgtaaaggtacttccaatgcgaggaatcgaagccgttcgcgctttcctcagccgggaaatcctcggtattacaggtattgcgtgcaaccaaggcagaatcgctgataggggtgtgattgtcgctgttatcgccggccttgtacgacagcacctgcccgtcattgacgcataccacgagcggtgaggcgcaacggccgcgccccaacaccaacaacaattccttgcattcattcccggtggagacgatatgcacctcatgcaccgcgccggcgaaatcggcgacggtcttatgccagtcgagcatgggggagagcttgaccatgaccgtcggtgccttggccagcagcgtatccttcagggtcagcacatccggcgtgcaatcggcaatcgcgtaggtacgcgagccatgatcgtcacggcgggccggatcgaggaagatcatggaggctcggccaagcgtatcaagcactgctgttgaatcatcattgatgatttcggcgtggccaaggccgagtatcgggaaattatggcgagcgatatcacataaagtggattgttgttccacatatatggcacgattgaacactcgggacatgtaagaaaagtcgacgccgaaaccgccggtcagatcgactagggatgtcggggaatcgtcggcgtcgtcgactgcttccccgtccaacaatcgctgtgctaaccgggctttgtattgagccgtgaactggctggaacattgttccattgggacttgcggcgggaaaatcagcccatcatgggacgcccagtcaggtagcttgagcgaagcgcgctgccagccggcaatctgctccagcgcgaacggcacatccacgtcgccatcatgcttggcgtgcaaggccacatcacgcacatcttcacggcggtgtttggcgatgaacgcccagatcgactcagaaatctccatgccgccattctaggggttgtgctgagatgagtatggcaaaccgcaagagaacgaggtggcgaaaaccgatgatcgatgaagtgatgatgctgcgtcatggccgtacgcaatacaatctcgaacatcgcttgcaaggccagatcgatgtgccgctcgacatcgtaggccaatggcaggtcgaccagaccggattcgcgctcgcttcacggtactactgggccaaggtgaaccggcttgccgagcatcccgaagccatcgcccagcccggtcctgacgccgccgaacgcactgatacgcgacagttcgaggaggcccccgccgccggccggcgcatggtggtgatgacctccgacctgttccgtgcccaacagaccgcacacgccttcgccgatattttgggattgccggtcacctgtgaccaacgactgcgtgaacgcagcttcggcgagtgggaaggcatgacccgcgccgaaatcaaagccgtggcagccgacgactacgcctcttggaaacagcacaccgggggcgaaaccaagcatggtgtggaaagccgtgccgccgtgggccagcgaggtgccgatgccgtgcgcgcactggtcaccgactccgcctattcagacagcatgcccaccacgctgatgctcgtcacccatggctcatggattaccgccaccatctccaacctgctcgaactcgacccggacggcatgaacgcactcggcggcatgcgcaacgcctgctggtgccggctcaaagtgcgccacagcgtcaacggcacccccaccgaacagcccctgtgggagttggaggaatacaacaaggctcccgccatcgccgacagcgccgactgggagaacgggccgaccgatctgcgaggaccgcacatgccgagttggcagccaatcgtctggtgacggtcgctatgcgaaaccccgctcgcaaattcgaacggtgggtctagactaatctcggtttggaaccgtacagcgatagaacagtaagaaagcgcggaaggcgggtgaggcgacatgctgagaatcttcagctcaatcaatggccaagtggagcagatcgagaaaccggaaaacggctcctggttatgtttgagcgaacccactgatgtggagctcgccaccgtcgcatcacagaccggcatcgacttggccgacctgcgcgcccctttggatgacgaggaacgttcacgtgtggacgtcgaagacgattacacgatgatcatcgtcgacatccccaccgtggaggagcgtggcggacgcgactggtacgagaccatcccgctgtcgatcatcgtcaccgaaaacctcatcatcaccgtctgcatgcaggacacgcccgtgctccacccattcatggaaggcacgatccgaggcttcaacaccttcatgcgttcgcgcttcatcctgcagatcctgtaccgcaacgccacgatgtacctgcgttacctgcgcatcatcgaccgcgaaagcgacaagcttgaactgaagctgcgccactccatgcagaaccgcgagatcgtgatgctcatggaactgagcaagaccttggtgtacttcaccacatcgctgaaatcgaacgagatcgtgatggagaaactcaccaccctgcagcgcatcaagcagtatccggacgatgaggatctgctcgacgacgtcatcaccgaaaacaagcaggccatcgagatggccaacatctacagcggcgttcttgcgaacatgaccgacgccttcgcctcgatcgtgtccaacaacctgaacaacgtgatgcgcatcttcaccatcatctccatcaccctgtccatcccgacgctgattttctcgatgtacggcatgaacttcgacggcggcatgatgggcatgccgttcaccgacaagccttggggcttcctgctcatcatcgtgatctccatggtgctttccggtgtggttgcctggttcctcacacgttcgcgcatgttcaagtaaggcgtttgacggttatgcaccattggtcatcgttcgtcagccgtagcatgctccgcgcccgccgcccgatgcggcgcggatttcgctcccgactgatggcaggattcgccgcggcctttggcatgatattgccattgtccggtctggccggttgcggccaaattcaagtcaccaccgtctccggagcgccggagggacccaccatcgccattggggtcgcaaccgacgaaccatcggtgggagcatggcatgacggcacataccagggcttcgacatcaccatcgccaaatacgtggccgccaaactcggctatgcgaacaagcagatcgtcttcaagcaggttcgccccgaaaaccggcgctccatgctggacaatggacaggtcgacatggtcgtcgcctcttggcctatcaccgatgggtccagcgcgatcgttgattttgccggaccatacctcacgaccagcgtcggtttgctggtcaggtcggatgagcgtggccgattcaccaatgacgcaggttcggtgggcgacgtaggcgacggcacggtgtgcgcagtgaaaggtgacgagacagtcggcatcttccgcggcaaccacccgcaggctcggattcaggagcgtagcagttatgcgcagtgcgtcacggccgtgcaagtagggtcggcggatgccatagcctccgatatggcggtgctttccggtcttcaagcggccaacgggccccagtatatggacgtgattgcggacaagggcgaggtcagttatggcatcgccgtgagtcaaggcaccagccaattggcgcagaaaatcgcggaagcattggaagacatggttgaggatggcagctggacggccgccaaggatacgttcacaagccaaacaaagctcacggtttcgctgaacggtgaccccaaagccatcgtctcgaatgctgaataacgattgacgacgtgtccagttgcgaggctaccttgctgatttatgagtgacaacgagaagagcacgcaaaccgaagagcccaacttccgctacaacgccgcactggcgcaggacatcgaaaacaagtggcagaagatctgggatgagcaaggcaccttctgggcggccaacgtcaacggcgatttgaaggacggcaagggccgcaacgccgaaggccgcgccgcctacttcgccatggacatgttcccgtacccctccggcaagggcctgcacgtcggccacccgctgggctacctggcctccgacgtggtgagccgctaccaccgcatgaagggcgagaacgtcctgcacgccatgggctatgacgccttcggcctgcccgcggaacagtacgcagtccagaccggccagcatcctcgcgtgaccaccgaggcgaacatcgccaacatgagccgccagctgcaccgcatgggcctgagcttcgacaaacgccgcacgttcgccaccatcgaccctggctacgtgcgttggacccaatggatcttctcgcgcatctacgattcctggtacgacgaggacgccaccaacccgtccggctccaagggctccgcacgcccgatcgccgagctcgtggccaagttcgaatccggcgaaaaggccattccgggccacgagtccgatggcaagcagtggtccgacctcactgacgccgagcagcaggatatcttgaacgacttccgcctggcctacatctccaagtccccggtcaactggtgcccgggtctgggcaccgtgctggccaacgaggaggtcaccgccgaaggcaagtccgagcgtggcaacttcccggtcttccagcgtgagctacgccagtggtccatgcgcatcaccaagtacggccaccgcctcatcgccgaccttgacggcatcaactggcctgagaaggtcaagctcatgcagcgcaactggatcggtgaatcccatggtgcctccgtgcacttcaccgtggccactgccgacggtgacaaggacatggaaatctacaccacccgtcccgacacgctgttcggcaccacgttcgccgttgtttccccggaacatcacctgctggagaacgtgcccgccgaatggccggccgatgtacccgaagactggaagggcggctatgccaacccggtcgaggcggtgaaggcctacaggctcgccgccgaagccaagaccgccaaggaccgcgtggacgaaggcggtgagaagacaggtctgttcaccggcctgtacgccaccaacccgatcaccggcgcgaagctcccgctgttcactgccgactacgtgctgatggactacggcaccggtgccattatggccgtgcctggtggcgaccagcgcgattacgactttgccgtgaagttcggtctgccggtcatctacaccgttgaaccgctgccggaatccggcgatgacttggccaactacgagggcaaggcgccgttcgtctcccatgacggcatcgtgatcaactcccacgtcgaatccacgtacgctaagggcgacgcgctgtcgctcgacggcttgcgcgtggacgacgccatcgccaaggtcaacgcctggctcgaatctgccggcgtcggcaagggcacggtcagctaccgtctgcgcgactggctgttctcccgccagcgctactggggcgagcccttcccgatcgtttacggcgaagacggcaccccgcacctgctgccggattccgcattgccaatcaacctgcccgacgtgcccgactacgagccgcgcaccttcgatccgatggacgccgagtccaacccggaggcaccgttgagccgcaatgaggactgggtcaaggtcgagctcgacttgggcgacggcaagaagacctactaccgcgacaccaacaccatgccgaactgggccggctcctgctggtactacatgcgttacatcgacccgaccgacaccaagcacatggtggagaaggacgagttcgactactggatgggtccgaaccacaacaagtattcgggtgacgaaggcggcgtggatctgtacatcggcggcgtcgaacacgccgtgctccacctgctgtactcccgtttctggcacaaggtgctcttcgacctcggctatgtggattcggccgagccgttccacaagctgttcaaccagggcatgatccaggcctacgcctataccgacgaccgcggccagtacgtgccggccgacgaggtcgtggaaggcccggccgacgcctccggcgagccgacgttcacctggaacggcgaacacgccaaccgcgaattcggcaagatgggcaagtccctcaagaacatcgtgac

SEQ ID NO: 3660 - DNA, 2515 bp, Unknown
  R85_18m  MAG No. k141_42924
agaaaggtgatcgactcatactgcagccggccgatgcgcagaatgctgccggtcagggacaatagattccaatccgtctcgcctatgcccggccgccctgttttgtcctgatacacgcgagcccaaatagcaaagtcccgcaaggtcgtttcgatgatctcgctcggtatgccggcagcctgcatggactgcactgcttgcggcaggcaatacatcatgacggcgctcaacgatacatcggcggccgagctggcatcatcgtccggggcggcggaagcgctgccgggataaaacaccgttgcataatcgcgcagtcgggtgaatacggcgctggcagcagagacgttccgagtgccaatcaccaggttttgaatacgctcgagcatggatgcggcagcctggtcctgccgcatccattgcaacagtcgattcgttgaatcgcacaaggcgcgactcatgccgtagtagcggtcacacagcgaatagccactttgctcattgcacatcatggtcatgctcatttctattcctgccttgtccactccaacaatatgccgctgcaagaatatcgtggcggacggcagcacggctataactgccggagatcagccaatcgtcgaagaggtggttgaagagagcggcaatggttgactactcattgggctgaggttcgtggttgagcacgaggttcatcttgctgttgtccatcagccatgcatacaggtcccggtccatgatcatcgccagatcgaaacaggcttgcaccgcgtccaccagtgtgatgcgccggttctcgccggggagtgggatgccgttaacgagcggctcgtggtgtgcgaccctgttgcgtagggcatgcacggtcttgacgatgtccagcgcgtagtttcttgtccacttgtcgttcgtgtccaatgcgtgccgacggccgccggggaaggctttgacgacacctttgcgccagaggtcgttctcgtagtcggcgcttccctcgtccggccaatgagcatggatcgcgccgccgttctccaacagattgcgccagaacccgaacgtcaacgccgcgacgagatgtccgtgcgcgtgccgtttcttctgctggatggtgaggtggccccaggcttcacgaatctgacgctgggtacggtcgtcgaatcggagtcctgccatgtaccagtcctcagtgccggactgttctaaggaaatgagggacagctgccggtccatgtggttgcgcaaggtgacttcgaggatggcgatgtcgcccatgcaggcgctggccatgtcatgatcccacaggtacagtcgcagtgcgggacatgagcgtcgctgcgcttcatgattgtatgcggcgagtcgttcgtcggcgatgcatgcgcttaaggctttctcctgtggacttccccttcggggaacctgcgagaggaaatcgggtgatgggtttgactgtcgactcataacccattatcatattccatgaaatcccccaaagggcctctccggacggtcttcgactgagccgtgatgcactgggggttctcttttattcgaacgcgtcagttggccgctagtttagccttgtatcctttgccccagttccacatggcatcgatgacaggtttgaggctctggccggtgtcggtcagcgagtattccacgcgcggcggcacttccgcgtagaccttgcggtgtatgagaccgtcgtcttccatctgttcccggatcaacccgttcgcttgttgccggaacgcatggcccttcattccgcgcgcaatggcagaccaggcgtacaaatcgttgtgcaaaccgatggtgcagaaacactgatcagagatgcgccaatcacactgtagcggcattttggcgcggggtgctgggacaatagcacctatggctatgaaaaaaggaccgaccaaggggtcaggtggcaagcatcgcaataagttgaagggctacggccctactccgaaggccgaggatcgcgtctatcacaaggcttacaaggccaagaaggcgaatgagcgtcgccagatcgccgacccgcgcttggcggcccgccgccgcgtggataagttcgcctcctccgacacctcggatctggtgtacggccgcaactccgtacttgaggcgctgcgcgtgggcgtgccgagttccacgctgtacatcatgtctcgcatcgagcatgatgaccgcacccgcgaaatcgtgaagatcgccggcatgaacggcctgcacatgctagaggccgaccgtctggagatggatcgcatcgcccgctccggcaaccatcagggcgtgatcctgaaggtcgatccgttccagtactcctctctgagggaattggccgaccgtgccgagaagaaggcaaaggccatggaggctgcgaattcggccgccgcacgcatcgcggcccgcccgctgttcattgcgctggacggggtgaccgacccgcagaacctgggtgccgtgattcgttcggcagccgcattcggtgccaacggcgtgattctgcccg

SEQ ID NO: 3661 - DNA, 7037 bp, Unknown
  R85_18m  MAG No. k141_43133
atcaccgaccatggcaacatgcatggcgcctacgagatgtacaccaactgcgtggccaatggcgtcaagcccatcatcggcatcgaagcttacgtgaccccggaaaccgcacgtcaagacaaatcccgtgtgcactggggcactgaagcccagcgccgtgacgacgtctccggtggtggtcttatcacccacttgaccatgtgggccgaaaacgacgaaggcctggtcaacctcatcaaagcctcgtccgtggccaacctcgaaggtcgcgtcatgcgctacccgcgtatggataaggaggtgctcgccacctattccaaaggcgtgatcgcctcctccggatgcccttcgggcatcatccagactcgtctgcgcctcggtcaattcgaggaggccctgcgcgccgccggcgaattccaggacatcttcggcaaagacaacttcttcatcgaactcatggatcacggtctgcccatcgaaactcaggtgaccggtgacctgctgaccatagccaagaaactcaacgcaccactgctggccactaacgattcccactacgtacacgccgaagatgcccaggcacaggacgccatgctctgcatcaactccggttcccgtcttgacgatccggaccgattcaaattcgacggcaccggctactacatcaaaaccgccgaagagatgcgcgaactgttcaaggaccatccggacgcctgcgacaacaccctcgccatcgccgaacgctgcaacgtgatgttcgacgaccacgaagacggcgcgttcatgccgaaattcccctgccccgaaggctgggatgagacctccctgttccttaaaaaagtcgaggaaggtctggagaagcgttacgacggcaacccgccgctcgacgtattgaagcaggccgactacgaatgtggtgtgatctgccagatgcagttctgcggatacttcctcgtggtcgccgactacattcagtgggccaaggaccacggcattatggtgggtccgggccgtggctcggccgcaggcgccatggtcgcctattcgatgggcattaccgagctcgatccgctcaagcatggcctgattttcgagaggttcctgaaccctgagcgagtgagccttcctgatatcgatgtcgacttcgaccctgaaggtcgtgcgcgagtcatcgaatactgcggcgaaaaatacggcaccgataaggtcgcccagtgcgtgatctatggcaccatcaaaaccaagcaggccttgaaggactccgcccgcatcatgggctacgagttctcggtcggtgaaaaagtcaccaaggcgctgcctcccgcggccaccggcggcaaggatatcagcctgcatgacatcttcgacccgacagccaaacgctacgccgaggccagggaattccgagaactctacgattccgacccggacgccaagcgcatcaccgaagaagccaagggtatcgaaggcctgatccgacagaccggtgtacatgcctgcgccaccatcatgggtagcgcgcccatcaccgacacctcgccgttgctggaacgcaccgatggcaccatcaccaccaccttcgaataccacacgtgcgaaacgttggggttggtcaagatggacttccttggcctgtccaacttgacgatcatccacgacaccctgaagaacatcgaggccaacggcaaacccgccatcgactacaccaagattccgctcgatgacgccgaaacctacaaactcatgtcccgaggagacacgctcggcgtgttccagctcgattccgacggcatgcgttcactgctgaaaaccctgaagcccgataacttcaacgatatttccgcacttatcgctctgtaccgaccgggcccgatgagtatggattcgcacaccaactacgccaagcgcaagaatggcctgcagaagatcacgccaatccaccctgagcttgaggaacctctgaagcaggtgcttgacgagacctatggtctgatcatctaccaggagcaggtgcagtccgccgcccgaatcctcgccggctattcgctgggcaaggcagacgtgctgcgtcgagccatgggtaagaagaagcccgaagtgctggccaaggagaaggtgccgttcttcgccggtatgaaggagcatggatactccgaagaggcctcccaggccgtgtgggatattctggtgccgttctccggctacgctttcaacaaagcgcactccgccgcatacggtctgatctcctactggaccgcatatctgaagacgcactacccggtcgaattcatggccgccctgttgcaaggtgccgccaccaacaaagacaagaccgcactgtacttgggcgaggcccgccgcatgggcatccaggtgctctcgccggacgtcaacgaatcggtgtacgagtactcggcagtcggcgacgtcgtccgattcggtcttggtgccatccgtaacgtgggtgacaaggccgtggccgatatcatcgccgaacgcgaaggcccgcgcggcaagttcgtgaacttcatggacttcatccgccgcgtgcccctgaccgcgctgaaccggcgattggtcgaatcgttgatcaaggccggtgccttcgactcgattgacccgaaccgtcgcgcgctgttcaccgtgcacgaggccgccatcgactcggtggtgagtctgaagcgcaaacaggcggagggccagttcgatttgttctccgatgccgaggatgggggagcggaggccatgggcgacgcttccgtgaccgtacccgatcttgaggaatgggacaagaagaccaagcttaacttcgaacgcgaaatgttgggcctgtatgtgtctgaccatccgctctccggtatgcagtcgattctcgcgtccttgcgtgaaatgtccatcgcgcatctggttgatcgagccaaaacgatgggtgaaggacagcaggtcacgttggctggtttggtcaccaatgtggaccggcgcgtatccaagaagggcaacccctgggccatcgtgaccatcgaagacatggaaagctccatccaatgcatgttcttcggcaaggtctatgaagcggccgccgccgaactcgccgtggacgccatcgtacagattcgtggccaagtggagttgcgcgacgaaaccgtttctctgagagccacggaaatgcagattccgaccttggaagccgaggatgaacgtccgttggtcatcacgctgccgccggtggcgttggagcgccaacgcatgatgcaactcggtcaggtgctcgctaatcatcctggttactgcgaagtacatcttgcggtgctggatgagaagggtaacgctcaggtgctcacgtttggcgatcgtttccgcgtcaagcgggatacttcgttgtttgctgagatcaagattctgtttggccccagctgcttgcctgccgcctgattggcgggtttcgcccctggcctctccctcacctggctttgctggggactccttcatcagagggagctaaggcatgtgccaccatacgatgtgcgcgactattgtggaacgtatgggcatggagatggcggatactggtaacaacgatgacgagcgacaatggattgccgcgatgctggaacggctgtctcattcgcagttccgcgccaaattcgctttgaccgacaaagaacgagcctatgcccgcaccaaaggcaaggcgaccatcgatcgtcatgcgcgagaaatgttgcgagaccgcataggcgcagccgaaccgaagaacgacggcaggcagacgccatggcgcggccatccggtattcaccgctcagcatgctaccgccacatgctgccgcggatgcatcgaaaaatggcatcatctgcccaaaggccgtgaactcaccgaagcggaggtaaaccgacttgccgatttggtcatggcatggattgagcgggaccttatcaatcatccggttcggtgaagcacccagcatcctcagtatgcctgtatgccttcaatagttatgagccaacagccaacacaggcctcgaaaaccgtagacgcaaggtattggcgaatacggcagaacgccgaacgttgcctatggcgtgttcggcaataatgtgacatgatgtctattcaagaagagttgacgaagcgtcaactctaccccaaggaggcggaatatgtactacagcagcggcaattatgaggctttcgcacgcccgaagaagccggccgacgtggacaacaagcatgcatacatcatcggtaccggactggcggcattgtctgcagcctgttatctggtgcgtgatggtcagatgcctggcgagaacatccacatccttgagaaggacccggtacccggcggcgcctgtgacggtcttgatattcccggcctcggctatgtgatgcgtggcggccgcgagatggacaatcatttcgaggtcatgtgggatttgttccgctcgatcccctccatcgaaaccgagggcgtcagcgtactcgacgagtactactggctcaacaaggaggacccgaactactcgctgtgccgcgccaccaaggacctcggcaaggacgcggggctcaagggcaagttcggcctgtccgacaaggcttcgatggaaatcatgaagctgttcttcaccccggacgaagacctgtatgacaagccgatcaccgatttcttcgatgatgaggtgctgaactccaacttctggctgtactggcgcaccatgttcgccttcgagaactggcactccgcgctggaaatgaagctgtacatcaaacgctacattcatcacatcggcggactgccggacttttccgcgctgcgtttcacccgctacaaccagtacgagtcgatgattctgccgatggtcaagtatctggaatcgcatggcgtcgaattccgctacaacaccaaggttgagaacgtggaattcgcgattggcgggggagccggccccaagcgcgagcacaccggcgtaggccaggacaccatccaaaagattcaggccacctccggtttcttcaagcgcaaccctgccagcacgcccaccaagaagcttgccgtgcgcatcgacgtggatcacgagggtgataaatcctccatcgacctgaccgagaacgatctggtgttcatcaccaacggcggttgcgtggagaactccaccatgggttcccagaactcgcccgccgcatggaacccagacctgaagcccggcggcggctggaatatgtggaagcgtatcgccgaccaggacccgagctttggccatccggagaagttctgctccgatccgaatgccaccaagtggatgagcgccaccatcaccaccctggacggcgagattccgccgtacatccagaagatttgcaagcgcgacccgttctccggcaaggtcgtcaccggcggcatcgtcactgtgcaggactccaactggctcatgagttggaccctgaaccgccagcagcagttccgcgaccagcccaaggaccagctgtgcgtatgggtctacggcctgttcccggacaagcccggcaactatgtgaagaagccgatgaccgaatgcaccggtgaagagatttgcgaggagtggctttaccacatgggcgtgccgaccgacaagatcgaggcgctcgccaagcatcacgccaacaccgtgccggtcatgatgccgtacatcaccgcgttcttcatgccgcgtgcggccggcgaccgcccggacgtggtgcccgatggtgccgtgaacttcgcattccttggccagttcgccgagaccccgcgtgacacgatcttcaccaccgagtactcgatgcgcaccggtatggaagctgtctacacgttgctcggtgtggaccgcggcgtgcctgaagtgtggggcagtgtctatgacgtgcgcaacctgctcaacgccaccgtcaaattgcgtgacggtgcaccggtcaccgatatgaagctcaacttcattgaaaaggccgtggtcaagaaggtgctcaagaaactcgacggcaccgatattgccaccctgctacgcgaataccacgtaatctgacatccatccggctcccctcaaggtgaggggagccagcacgcgaagcgtgactgggggagttgctcacaacggagtgttaagagaaagacaaaaacatgactgattctgatccccagttaatccgccacgccaccatcgacgatctggacgcgctggccgccatggaattcgaatgcttcccggccgccgaggccgccgaccgctcgtccctgcgcgcccgaatcgagacctatccggaatgtttctggctattgattgatggcgagatcgtcatggcgttcatcaacggttttgtgaccgatcggcgcgacttgaccgatgacatgtacgaggatgccgcgcagcacaaccctcaaggtgactggcaaatgattttcggcgtggatactgcgccgaagtatcagcatcgcggttgcgccagtacactcatgaggaaagtcattgaagacactcgtgcagccggccgtaaaggcctggtgctcacctgcaaagatcggttggtcggattctatgcgcgattcggatatgaggacgaaggcatttccgattccactcacggtgacgtggtctggcaccaaatgcgcctgaccttctaatccccttttggcttccctctttgatgctgggtcgtttaaaaaaaagtccggtggactgtttttttagacgaaggcgagacgatagtcgagccataagggcgcgagctttgctcgtccgtaattgcgggtgagctgtccgcgtgatcggactgaggggagttgaacgtggaatgaattgttgcgacacgccggtgaacatctgatttcgttacgtgagcccataaaaagccggcgtatcctgatggtaacggcgtgattcaagctgatttcgacacgccgagcgaagtctgtcgtttcaacgatttgggcttatcttcgtgcgcccgatttgcgcgagtccgtgaatgcgtgtaagttatttccttgctgccgctcagcgagtggttctcctccggggagctgc

SEQ ID NO: 3662 - DNA, 9971 bp, Unknown
  R85_18m  MAG No. k141_43192
cgtcagaacctgctcggtaagcgagtcgactactccggccgttccgtgatcgtggtcggcccgtccctgcgcatgcaccagtgcggtctgccgaagccgatggccctcgagctgttcaagccgttcgtcatcaagcgcctcgtggacctgaactacgcgcagaacatgaagtccgccaagcgtctcgtggaccgcggcgacgccgaagtgtggggcgtgctcgaggaggtcatctccgagcaccccgtgctgctcaaccgtgcacctacgctgcaccgtctgggtattcaggcattcgagccgatcctggtggaaggcaaggccatccacctgccgccgctggcctgcgccgccttcaacgccgacttcgatggtgaccagatggcagtccacctgccgctgtccgccgaagcccaggccgaggcccgctcgctgatgatggcttccgacaacatcctgaagccggctgacggtcacaccgtgaccatgccgtcccaggacatgatcctcggtctgtactacctgtccaccgtgctggaaggcgccaagggccagggccgcgtgttctcctcgctggaagaggccgaaatggccctcgaccgccacgagatcgacatgcaggccaaggtgctcatccgcctgcctgagaccttcgtgctgccgaagaactgggagcccggcgaggtcaaggtgctcgacccgcgcgaaggtgaggacgaggtcgtcaaggaagagcgcttccacgacggcaccgtgctgttcgccacctcctacggccgcatcctgttcaacgagactctgccgaccgactacccgttcgtcaacgagcaggtggccaagggccgtctgtccaagatcgtcgacgacatcgccatgcgttactccacccagcaggtggccgccacgctggatgccctgaaggatcttggcttcacccgtgcaccgtggtccggtgtgtccttcgcgttctccgacgtgaacgagccgcccgagcgcgacgagaagatcgccgagtacgaggccaaggccgacaaggtcaacgccaactacgagatgggtctgctgaccgaggaagctcgccgtcaggaactcatcgacctgtggaccgaatgcaccgccgaggtgtccaaggaagtcgaggagaagttcgacccgacctccaacctggccatcatcgtgcagtccggtgcacgaggcaacatgatgcagatcaaccagatcgcaggtatgcgaggcctcgtggctaacccgaagggtgagatcattcctcgtcctgtgaagtccaactaccgcgacggcctgtccgtgctggagtacttcatctcccagcacggtgcacgtaagggtctggccgataccgcactgcgtaccgcagaatccggttacctgacccgtcgtctggtcgacgtctcccaggatgtcatcgtgcgcgaagaggactgcggcaccaaggccggtctgcccatccgcgtcgccgagcgcgacaacgacggcaacctggtgctcgtcaaggccgccgacggtggcccgtactcccgtctgctcgccgccgacgtcatcgacccggccgacggacagaccgtgctgtacaagcgcgacgacgccctgtccatggacgtgctcaacgacctcgtggcccacggtgtcgaggaagtcaagtgccgttccgtgctgacctgcgagtccaagcgcggtgtgtgcgccaagtgctatggctggtccctggccaccaacaagctggtcgatgtcggcgagaccgtcggtatcgtcgccgcccagtccatcggtgagcctggtacccagctgacgctgcgttccttccactccggtggtgtggccgcggcctccgatatcacccagggtcttccccgtgtcaccgagcttttcgaggcccgcaccccgaagggtgaggccccgatcaccgagttcgccggcagcatcaagatcgtggagaacgatcgcggtcgccagatcatcctgaccccggacgccgattccggcgcgccgaaggaagacggcgtgatcaagccgatcacctaccaggtctccaagcgcgtgccgctcaaggttgccgacggcgaccacatcaaggtcggcacccagctggtcgaaggttccgtggatcccaagaagatcctcaccatcctcggcaagcgcgccgcccaggtcaacatcgtggaggaagtgcacaccgggtaccgatcccagggtgtggagatccacgacaagcacatcgaggtcatcgtgcatcagatgacccgtcgcgtgaccatcatcgactccggcgacaccgacctgctgccgggtgagctggtggacaacgcccgcttccgcgagatcaaccgcaacatcgtcaagaacggtggccgtccggccgtcggtcgtccggcgcttatgggcatcaccaaggcgtcgctggccaccgactcctggctgtccgccgcatccttccaggagaccacccgcgtgctcaccgaagccgccctctccgagaaggtcgacgacctcaagggcctcaaggagaacgtcatcatcggtaagctcatcccggccggtacgggcctcgcccgctaccgcaacgccgtggtcgagcccgacaaggccatccgcgacaccatctacccgaacttcggtctgggcggcgatggcgatctcggcgacgcgagcttctccgatgccgacctgtccgacctgaacttctcgaatctcgagttcggtgatctgaagctcggcgacgacttcaacccggatgatttctactccgatcagggcggtcagcctgacatcgaggagtaaccctcctcccccccccgataagatggcccggaactcgtgtggttccgggccatctcgcattttcagacagcagtattgttcttgtcgatttacgggggtagtgtggcaacttaggagtgcgggtaccgctcccagtggtttgtggctcggtacgtgcacggaagtcgtaagagaagagacaagtgttggagggccacctatggtggggttaaacacattggtcggcaagcggtacaagatccttgcccagatcggcaagggtggtatgtccaccgtctatctggcaatggattcctcgctgaacaagcaatgggccatcaaggaaattcgcagtgcctctgatccggtgcagcgcgacttggtcattaagagcctgaccgtcgaagccaatatgattaagcgcttcgatcacccggcgattccacgtatcgtcgacctgatcgaagaaaagggcagcctgttcgtcgttatggattacgtcgaaggccagaccttggcgagcctgctcaagaaggaaggcccgcagtccgaagaagacgtggtcgattggggcatccagctgtgcgatgtgctcgactatctgcaccgccgcaagcatccggtgatcttccgcgatatgaagccctcgaatgtgatgctgacccctgagggcgcaatcaagcttatcgacttcggcattgcactggagaccggcaaggatgcggacagcaagccgctggtcggtgacgaccgccagctcggtacgccgggcttcggcgctcccgaacagttcgccgataacggcaccgtggacgcacgtaccgatatctacgcgctcggtgccaccctgttctacctgctgactggctcacacccgcgcaagaacggcattgtgccgattcgtgagatcaacccggagctttcgcagggcttggaactggtgattgccaaggccaccagcaagaatccggacgatcgcttccagacctgcgccgacttcgcgtatgcgctgaaacactacaagcaggaagacgccgcataccgcaaggcgctgaattccaagtggtggggcttcctcggcacggcgatcgcctccgtggtctgcctggccctcgccggcggcagcctggtgctagccaaccacgcgcagaacaccgattacgactactggatgaaccaggcggcgcagaccaccgacgcatccgccgcagaagccgcctacgtgcgcgcagtggaaatcaagaccaatgccattgaaccgtacgagcagctgatcaagcgttacaccgctgacagtgatttcagcgacgacgaagagcagatctacaacacgctgatcaaccagcacgccgactcgttgcgcaaggactccaccaagtgggccgagctgagcttcgacaccggccgcatgtattggtactactactccggctccaagatggccggccaaagcgcgtccgccgccaacaccgatccacagcgatacgcccgcatccgcgccgcttcgcagtggatgcacaacgcggcacaagagagtagcttcagcaacgtcaagctcgccaagatctacgccgacatcgccgacttcaacacggagatcgtgccgctgatcaacgaaggatccgattcaggcaagtacaagccgtacttcagcaagctgaacgaactggtgaagtccgccgctcaggaagataacggtgtgatcagcctcgaatccgcgaacctgaccttggacgcgttgcgtgtgtacccgcgcaagttccgcgcggacggcatcacgcaacagcagatgagcgatttggccgatgccgccgcatcgcttgccgacaagaccgaaaccaccaccgatgagctggatgccagcaagaaagccgcgcaacaggccgaaaagcccaccaaggacgccatcgccaacgctttcgttgatatcaagggggacgccaagtgaacgccgatatctataggactctggcagtcgtattcctggctttggccgtgattcttgcggtcgtggccgtagtgctgttccgcaagttcaacattcccgccgtgcgtgacgccctgaccggcaagcgcgcggaacgtgagatcgccgaactgcgtggagtgcgcgccggttcgtgggccaacgccgagaatctgggcgaaggctcgcgccgcaagcgcaagaagggtgccctttccgataccaccaccggtacgcatgacaccagcgacatcgaattccgcccggtgaccggtaccggttccggctctctgggttccgccagcaccaagggtggcattactcgccccggcgaagacaagccgtccgcagtgcccggtgccaagcaaaaggcttccgccgctccggccgtggtggacgaggaagacgaaagcacccgtctgggtaccaaggccgcactcgaatctgtggttgagattccggtgtccatggcttccgccgccgaattggcggacgagggcgagacctcgctgatgcaattccgcaagacgaatgaagcatcgtccgacgacgatgaatcccgtaccatcctggttcgtggagggaagaacaagtaatgagcttcgtaactaattccagtttctggcgcaagtcgttgatcggtgcggccgtggctgtggcggctcttgccatgggtgctaccgccgtggtagccagcgccgattcgacttccgacctcaagcccgagcagaccaccggctccgtggtgtccgcacgctccttcaaggccgtcaaggcacagccggctgccgccactacgccgaagatggatctggcttggtatgccgccgataaggacggcaaggtggccgataatgcccagccgctgaccgatggccgcaccaatgcctcgaatgttcgtctgggcgtgacgattactgggtttgatggtttccccgcgggccaatttgaccgtaacggacaatacgaaggtgcggataaagacaagattgcctttaccgtgaccgtgggcatcttgggcgtcaaggaagtcaagtatggcgacttccaccgtacaggcaatgtgcaggacggctacacctacaccgttgagccgaatgatggtccggcgttcgctctgagcggtgatccggttacgctcgatgtgacagttgccgcgccggctgatcctacagcggcagatgccgccattgacctgaatcagttcaaggatggcgacggcacgagcaccatcacggctcctcaattgtcttatgacagcaccaagcccgccgccgtggatacggcggtgttcggcggcgttgctgatactgattggctgaaaggcaaagacaaagacgcgaccgacggtacctggttcacgaccacgtcgccgtccgtaacctttactccggttgcggctgaggcagccaatgtcgtgtcttatgaggtgacgtatccgaatggcaacggcaccaagaccgatacggtcaaggcagatgaagcatggaccgtgcctaacggcaagaccgacctgaccaagaccacggttacggtcaccaattggttcggcagcgcttccgatgcgaagccgttgagcgatttgctcgacgcgaagaccgttattgttgacccgaatgccggcactggtctgtccctgaatctgaccggtaccaccccggataagggtgctgtcaacaacggcaccacgtattacagcaaggtcggcggcttctcggtgagcagcacgagcgcatacttcgccgatgaactcgccctgctcaaggcgaacggtatcaagttgctgaccgttccggctgccgacggcaccggtgccacaatcccggtgtgcgatgccgataatcttacgaatggtgccatggactgcggcgatgccggactggacctgaagaccggtaaccacaccgtaagcctgaactccgcgctgccgggcacgccgactgtaacgcagtcgttcgccatcgacaccaccgctcctaccgttgcgtggaagggctactccaagaacggcggcattgatattccgttcggaaagacactcttcgcagtcgaccgtaaagaacgtgccctgaccttcaccgttacggatgatggtgccggtgtgggcaaggtgattgcaagcggtatcgatcctgagacgggcaagcaggccacggtcacgttgaccaacaacggtgacggcacctacacattcccgctcaccaaggccggaacctacgatttgacggacttcaccatccaagccacggacaatgcaggtacgcagtccaaggctgaaaaggtaaacgcaattgccggcgataagttcacctacacgaagattcgtatcggcaagaatgtccagccgaagaccacggtatcggtaagcggcaccgactacatcaacggcactcccaaggtcacactgaccgtcaagaacaacccgtggctggcggacgaactgaagggtctgcaagaaggtgccggcaccaagggcctgaacctgctcaccagcacattgaccgccggtgacaagaccgtgtacgggggcacattcccggtggccggtgccacggtgaacggcgccggtgacgagatcgtcatcgcagcggatgccgccaagccgttgattgacgccaagaacacaaacggccagtatgccattacggtaaccgataaccccacattgctggcagtgttgggtgacgtgaccaataacgccaagaccttcggcgtggatacgcaggctccgagcttcaccggtgccgcctaccaggcaggcagagatgaactgacctccaccaaggacgattccatcagtgtcgtgtcccgttctgccgccaccatcactttggacgcgcgcgatctgctgcccgattccacggcaacaggtgccggcaaagacgatgcacagacctctggtctggcaaaggtcgaagccaaggtcgattacaccacgtggaatggcgataaggtcaccggcaagtggaccgaacttcagcgcgtgaacaacgaccccaacaaggtccaactgacgctcggcgaccaggacggcaagtacacgctggccggcgtatccctcagagccaccgataaggcgaccacgaagcccaatgtcagcgatgccgaaaccacattggccacggtgaaggccgcactggccaagtccactgataccaccgtggccgctgcggccaagcagctgccggatacgctgggcgtgagcaagcagaccgcgaaggcgactctgcagctcaacgatgctgacccgcagaatacctacaaggaagatctcaccaacatctccctcaaggtcgccggtgaccccgcgttcgcctaccgctgggatgtggtcaaggccggctatgccgatgccaacttgctgaccggtgcggtgcaatacggcgacgccggttcgaagtccttcacgttcaagatcagtgacgccacctataaggacggcgtcatcacgctgggcaccgcaaacctgcccaagcggaccaaaaccgacaaggataccaccggcaagcagttcaacggcgactaccagctgacgctccagaagaacttcggcaacaatgtcgagctgttcaacgctcaaagcaccggcactaccaactacctgttggacaccaagcgcccagtgctgaccaagatcagcggtccggccggtgccaagggcgagaccatcgtcgataccaccgtgcaaggcaagagctacacggtcttcgccaaggccggtgcacagacgttcacggtctggatcaaggacttgctgcccaacggccagtcctcgaacgactccgccaagaacgaagcccatacgtccggcatcaaggatgactccgttaagctgaccattcctgacggcactgatctgaagggcaagacgcttgccgagggcaagacggtgaatgtcacactcgacaacgaaggcaagggacagttgacccttgatcaggaaggcttctacgacctgagcaagatcacggtgagcgtcaatgacaacctcggcaacgcgctggacaaggaaagcttcaagaaagctccggttcaggacaatgtcaaggattacgacgccgtcgttgccgatgtgaacggcaacgacaccaaggcatccttcgcggtcaccaagtccgacaactccgtgcccgactccagtgataacaacaacaagtacttccgtggcaaggtcaaggtggcctacaccatcaccgaccactggttcccgatttacgccaagctcaacgccggcaagacgaacctgctcgctggtagtacttcgaacaccacgccgttgaccggtggccagaacgagcagaacatcaagccgttggatgccagcgatgcacagtggactgaaggcgatggctacacgtggacgctctccggccagaagctgttgatcaacggcaagaccaacgaagtggaaggcaattacacgctgcacctcgcctatgccggtctacaggcaaaggccaatgaggcatccacccagtccaaagacgtggtgctcgactggaccgctccgaagctgggcgacctgaccgcttccagtgaagcaccgaagaagtgggattggatcttctccactgatgtcttcacggccacgctgaacggcatcagcgataatgtgtccggtgtgactgcggactccaccgcgttctccaccaagcacttcgacaactggctttccggcaagaacgacccggctcccgtctatgcgggcgacgcggccgccggcagcatcagcttcacgatggatggcgacagccagcgcgtctaccttggtgaaaccagcctcaccattcgcgatgaggccggcaacccggtcgacaccggcaggctcaacgcctacgaaggcgtgaacggcaaccaagccgccaacgcactgaagggattgaacggcgtggccatcgacaccgtggctcccaccatcgcagtctcctacgacaacaatgatgtgcgcaacggcaagtactacaaggcccaccgtgccggtaccgtgacactgaccgaatcgaacttcgatttctccaagaagtatgagggcgatcgtgtggtcgtcaccacgtcggtcgacggcaagaaggccaccattccggtctcctccttcaagaacgcgagtggtgacctgaagacgtacgtggccaccttcgccgccgacagcgacggcgactggactgtggacgccgcctacaccgatccgggcgatcacccgtcgaatacgattcatgaggagttcacggtc

SEQ ID NO: 3663 - DNA, 5001 bp, Unknown
  R85_18m  MAG No. k141_43502
aaaccggctccaagatggacgaggtgattttcgaggagttcaagggcaccggcaacatggaactgcgcctgtcccgcgagctggcggacaagcgactgttcccggccatcgacatcaacgcttccggcacccgccgcgaggagctcatcaccaacccgcaggaactgccgattatctaccgtctgcgtcgactgctgggcggcatggagcccgagcaggcctaccagacgttggtgccgcgcctcaagaagaccgccaccaaccgcgacttcctcgccgccatcgtgcagcaggccaacaccggcaacgcggtcaacggcaactgaccagaccgctgaacaatagtgtaagggctgcaccccgattgatacggggcgcagcccttgccgtatatgatgcaaatacatcaactatcacattgcagttgtagtattgccgtcaacgttcacatgcacgctgacgatatatgagatgaaagatgtatcaatgggttcgattgttttgggagtgggcaatggtgcggccatgttcggcgatgcggatgccagccatatcccctacggcgactatgacatctgagatatctgactttgcgcatcgtgcaaagccgcaatcgggagtatcctcgaatctatgagcgaaacgagcagcggctggcaaaggaccaccatcgactccgcccaggcggcggcccacccggaaaccgcacaagcggtggcgcgcatcaaagcgctgcgccaaaccatcgataacatcgattcggcggccatcgcattactggccgagcggttcaaggccacctcgcaggtcggcgtgctcaaagccaacgccggattcgcgcccgaagacaccaagcgtgaggactatcagatcgaacgcctccaccgcatcgccatcgatgccgggcttgatccggaaattgccgaaatgtaccgtgaattcgtggttaccgaagccaagaagcgccaccagcgcatcgccgatgccggtggcgacccgggcgtactcgacgtattcgcctgattcgcccgcagcgaatgggcacctttcggatattcgtctatagggcaagttgccggcagcgactacattaatacgggaatggaatgcccatagtggccgactgtatgaatgggatacgtagatgagatgtggtgccgcactggtcagttgcgcattgtgcgtggcttcgattctcggcggtgcttggatgtctcgtccgactccggttgattacggtccggtgctcgctacggcaagtgatatgtacgccgtcgccgatgccgaaggggagccggtccgttggtatgtggtagggaagggcggcgccggcaatggcgccagtgccgattccggcaatagcggttccactgataccgattccgccaatagtgattccggcacgtccaaggcttctcgtatccccgcttccgccgccaccctgccatggaaagtcagcgtcacctactcgcttgacggtccaaacgtcgaggcaaacgaggttgccggcgcatctggactgatcggcgtgtatatcgatattaagccgcaaaccaaggaggccaaccgtacgatcccggttgtcgcctttaccgtgcctacgcaggtagccgatgatgtttccgctgacaactccattacggtaaccacgcaaggttccaataccgtagtcgccgcagctggaaaagccgcaaccggcttggaattcagctgctatatgaacgccaaagacttctccatgagttccgtggcgctcgccgtattgccttccaattccagcagtccggtagttggtgctaatcccgatgccgcgaatgccgccgcacagcctgctgccgatacggatgtcgcccaactcgtcgcctctgccgccatactggtcgattcactgaccgacgccggttccggggagcatcaacagctcatcgagcagcttcaaaccctgcgcgataatgagcgtgcgctggacaagtccgtagtggccgaacgcgaaaccgcccataagcggacgtttgaagactatatggccgcgtatgtgggctcatataccacgcacctgtctggatcgattggtacctccacccagttgtcggcgttgatgggcacggccggcgaactgtccggggatacgcctttggcacaagccgtactcgacttggccaacgcggtgaacaacgtcagtgccgcacatcagcatgccggtgcggtcgatgcgttggatgaggtgattcgccgcatccagcagcaaggcaccaccggactggtggatgatctgaccgccgaggcttcggaggaagccactcgaggctccaagcaatacgccgatggccagagccagctctccgccgcaatgattccgtattcgatgaaatacacggacgtctacacggccaatttgagcgccctgaccggcggcacgtcttcgggcgccaccgcttacgagagccaagccatcgccgaaaccaacggtagcgatgaactcgccgacgatcaatccaaggtcgatgccgcgatgagcacgcttgccaccgcctccgagcatacgggcaaagccacggccttgcgccagattgtattgcgattctccgatcagttcgaaggagtcgcgtcctcggcttccggcagcgatggcgatggctcgtccggtgatgtctcttccggtccggtgaccgaggctcaggcactgactggcctggtcgattcgcaatcgcaatcgttctacggcaagacccgggcctcccaagccaagcgtaaggccgatgccgcccgtaagcaggccaaagccgcgcaacagcagcagcagtcgcagcattccaaggcctcactggtcgatgacaccatgtccatgtctgctggcgatgtgatgaactatgcgggtggtcttacttcggccatcggtggtggaggtaagttcgattcgtccaagagcgatggttcgggaacgaacgactcagccaagtcgagcgatactggcgattccggcaacaatcttgacaccgctccagtactgttcggctttggcactggcggcacgctgctcaagcatgacatgagcgcgctgatcaatgagaccgtggagatcagcgatgctggcacgctcttggcgcaggccgtcgcgcagctcgatagccccaatacgcaacaaaaaaccgccgaaacccgatacctcatcgtgattccgacggtgtgatggtgtatgcgggaaaatccgcatgcgacaggtgcccaatacgcgtaaagtgcgttatcggtgtgggacgccgcatcaaaaactggctttttcgatgcggcgtcccacaccctcttgtaagtcagagctaactatagtttgaagaatggctaaattccaaggatctgttgattcggtctgtgggacgccgcgtatataaaacgtttgacacgcgtggtggcccacgctattgtgggccgccagcttacaatgcgggatatttgcgtgccgtcccacagtcgtgtcatccgaacgtcaaaaaacaaaagaggggaacctcaataggaggttcccctcttttgttgttgtgcgcaacgctcagtgctttggcttcttggctggccgagccgttaagcgggaagcccggtgggcttcccgtaggctcggaacgagcggcattgccgtgagacctactgttgttgtgcgcaacgctcagtgctttggcttcttggctggcggctcaccgagctcgctggcttcgacggcgacctcggtttcgggcgcgtcttcggcggcggattcctcggcgtgcttggccaccaagtcgaacttgccgaccacgcgaccggcctgcgcgatatcgcccaaggcggcgtgaatcgcgttcacaccttccgaagcagcggacagtgccacagacaggattggggtcttcatggagaccttggcctcggacttgatcttacgcagctgctccacggccttgccggcccaagtcagcagctcgggggaagcaccggtggcggcctcgacatacgggtccacgaccggccaggcggcgcgatgcacggaaccggaaccggcgtgcatccagctccacacttcctcggtggcgtacggcaggtacggggccagcagacgtgcgaaggcgtccaagcccagacccagagcggtgcgggcggacttcacagccttctcggacggcacattgccgtgctcgtccggagtgccataggcgcggttcttgaccagctcgatgtagtcgtcgcagaactgccagaagtaggattcgatgacttccagcgccttggaatgctcgtaggattccagcgcctcggtggcctgacgcaccaccaaagccagcttggccatagcggcgcgatccagcggttcggtcacatcggccgggttccacgaggtctcggcggcagcgcccacgtgatggttctcgtcctcacggccgatggccagcgcgaacttggtggcgttcagcagcttgatggccagtcgacggccaatcttcatctggccgatgtcgtacgtggcatcgaggcccaggcgagcggcggcggcccagtaacgcacggcgtccgcgccgaacttctcgatcggctcgttcggcaccacgacgttgcccttggacttcgacatcttcttgtggtcggggtccagaatccagccggacagcgtggcatgggcccacggcagacacttgttctccaagtgcgcgcggtccacagtcgagaacagccaggtgcggatgatgtcctgaccctgcgggcgaaggtccatcgggaaggtggaagcgaacagggccttggaggcctcgtccggctcggcccagtgggtcacgatctgcggggtcaccgaagaggtggcccaggtatccatgatgtccttttcggcggtgaagccgccgggcacatcacgctgggactcgtcgtagccctccggcacatcgatggtcgggtcgatcggcagacgatcctcgctcggggtgatcgggcgatcgtaatccggctcgccggaagcgttcaccgggtaccacagcg

SEQ ID NO: 3664 - DNA, 4554 bp, Unknown
  R85_18m  MAG No. k141_43868
catgtggagaaggcgtaaatggcaaagcacagcaggaagctgccggccaattcggcgcacacgcgcagggccagcggctgttgcttggtttcttccatgattgttcattccttttcatctgttggaagacgggcgaacccgcacaaacggttgccagtctacccggattcaacttgtaagtgcaacggctggtttcgggtcggcttgttttgattgtagcttggccatctcctcgtcccatacctcgttgggcgttttgtatccgaggagcttcatgggggtgtcgttgatctccccgacgatcgcgtcgagctcgtcctgcgtgagatcctcgaaactggttcccttgggcagatagcggcggatcctgccgttcctgttctcgttgctgccgcgctgccaggagctgtacgggtcggcgaagtacgtgagcatgcccagcgcctcgtccaccagcacgtgcagggacgcctccgtgccgttgtcccacgtgcggtcgacgcgcgcggccggcggcatgcccttgaatatctcgtactcggccctggccgtggcggacgcgctcttgtcgtcgacgagccgggcgaacagcctgcggctcctgcgctccacctgcgtgttcatgcagcgcctcgacggcgcggcgccgaccaccgtgtccgactcgaaatggccgaaccccttcctggatccgaccgtctcgggccggtccgcgatgggcacgcgcatcgggatgcgcggccccttcgccttcctgccctttttcctcgtccggcgtttcctgccgcgcgccagatactggcgcaggtccagcgcccgctgcggcttggcgtagatccactggtaaaggcactcgtggctgatccgcatcgacgggtcgccggcgcactgggccttcaaccgtccctcgatcagttccgggctccaccccctgcgcagcgcgtccagcacccaggcgcgcaacgggcccgagtccatgcggcgcggcttgcgggatccgcgccggcgcaggtccgccttcctctgcgcggccagcgccgaatagaacggacccgaggtccacggcccggtcttcagccgtttcggccggtaggggcggtacgacccgttctcgttggacgcgaaccacaggccgcgcctcagctcgcggctcaccgtggacttgtcccggccgatcctctccgcggtccgccgaatgctcagatgctgttcgcaatgcagcttctcgatcaggatcctctcctcggacgacaggtgcgaatactgttgacccatgagtgcgacaccttcttaagttagaaacttcgaacacttccaaccctagacaaggtgttgcacttctatttagaacccgggggcgacggtgaacatatcggcggcaggagaagataagctgttctcaggggaacatcagcacaacaaaggagttacgcatgcgagatttcattttccataacccggtgaagatctacttcggcaaagggcaggcgcgccatatcgcacaggaggtggagcgtgtcgagggcgccgttctggtggtgtatggcggcggatcgattaaacgcaacggtgcctatgacgatgtgatggctgcgctggcaggaaccgggcgcaaaatcatcgagctgcccggcgttacgccgaacccgcgattggacaaagcgctggaaggcgtacgactggtcaaggagcatggcgtcggcctgattctggccgtcggcggtggctcggtaatcgactgcgcgaaatttatttcgttgggttccggcatcggtgacgatgaggatttgtgggatgactacatcgaaaccggcaaaccggcacctgaagggctgattccggttggcgtggtgctcaccaccgcggcaacgggctcggaaatgggagatgcggccgtgctcaccaattgggaacgtaaccgcaagctcggctatacgtcgttcccgctgatgcccaggttctccgtgctggatccaagctacctgatgacattgcccgccgaacagacggtgtatggcttcgaggacatgttctgccacacgtgtgagcagtatttctcctatccggtggacgacaacctttccgacgaaatcgccgagggaatccaacgtcatattctgcgttcgtggcgagcgtgcttgtccgatccgaaagattatgaggctcgctccaatgcaatgtgggattccacgttggctctgaaccgcattatctcgcgcggcaaggaagaggattgggtgacgcacggcatcgagcacgcgctgtccgcatacaccgatatcgctcacggtgctggtctggctgtggtccacccgcattggatggcatacgtgtatctggtcaacgatgaggtgacggctcgctttgcccgctgggcggtcgacgtgtggggtgtgacgcccaccggcaaaaccgatcgcacggtggccgaggaaggcattgatcgctatgtcgatttcctgcgtcgcgtaggtgcgccgctgactctttctgaggccggcgtgcccgacgatcccgcctctctcgacaagtacgccgatcatgctggtgaggccggcggctcattcgtgcagattcaccgtgacgatgcccgagcgattctcgaggcatgcaaggaaccggtgtcgttctgacggttggactaatcccgtgatttgagccgccgcgtgctgtcccgcaccaccaaagacgtagaaagaaccacgcgcttctgaatcttgcgtccttcattggtatcgatgaccatgcgggctgcagtggcggccatgtcttgcaatggctggcggaccgtggtcaacgccgggcccatgtacgcggcggtctgtatatcgtcgaatccgataacggacagatcttcggggatacggattttcagttgacgggccgcctcgtaaacgcccatggcctgtaggtcattgcctgcaaagatggcggtcgggcgactttgttcgtcttcaagtaacgccatggctccttcgtaaccgcctggcgtggtgaaatcgccttcggtgatgagttcgggagaggtggggatattgcgttcggcgagggccgccgaatagccgtcaagccgggcacgtgagcagagcatttcatccggtccggtgatgatgccgatgcgcttgtggccgagttccagcagatgacgggtggcgatgacgccgcccatccagttgtccgcctgtacggagagatcatctaatgccggattgccggaagggtcgaagacgacgaaaggaatgccgtgtgattggaacatgctgcgttccttgtccgtcaagttggagaacaccagaatagcgccaatgggctggcggtcgatgatgccttcaacccaggaagagtcggggtgctgccggtcgccactttccgcaaccatgacattgatgttgtgcggcttggcctccgtgatgatgcccctgagcacctccagcgcccaaatggtctcaaaatcccgaaataccacctcgatggtgcgttgtttacgggagggggagacgcggcgaatgtagccgttgtctttcagggctttgtcaatggcctgccgggccgcctccgaaatatccgccttgccgttcagggctttggacacggtggccagtgagtagccagtctgtttggcgatgtctgcaagtttgaccttgttctcgccgttgcttttgcgctgttctgccgacgccatcattgaccgccttcatcagagaatgttgatatcagtatattcgaaactttcgtaaagtcaatttgacgataaagaatggtatgtatagataaaaaaggttggaatttcaacgattttgatagtaaaaaagccgatataaatttcgtttgaccgtcaaactaaggctctttatgataaaggtatcgaaaacataaagcgagttttcggtaaagttgaagaaggctgatggggtaggtgaaacggcgaagtttcactgaaaacatcattaattaccagctgttagatatgtaactggctgatatacctttcgaaactttcgtaaatcgcggatcggtttcatgctggtcaagaacaataaggagacgacaatgaagttcaagtccgttgctgcggcgactcttgcagtggccacgcttttcggcatgagtgcgtgcggcaccagcaattccgcagacgataacaccatcgttttttggcacaacgccacctctggtgatggcaagcagtactgggaggatttcgcaaaagcttttgaagaaaagaatcccggagtgactgttcagattgaaaccattcagaatgaggacttcgaaggcaagttgaccaccgccatgcaggatccgtcttctggtccggacgtgtatatggccctcggtggagccaagaccaaggacatggtggatgcaggtcaggcgatggatttgaccgacaagatttccgacaccattaagacgcagatggcatcctcattgagctccactacatatgacggcaaaatctacggcgtgcctgtcactgtccagcctggcggcatctggtattccaaggatttgttcaagcaggccggtattggcgaggtacctaccaccttc

SEQ ID NO: 3665 - DNA, 3574 bp, Unknown
  R85_18m  MAG No. k141_43928
ccgatgatgttcgacgagattcagaagtccatgaaggacttccgcgtgaacttcgacgtctggttccatgaaaacagcctgtacgccgacggcaaggtcgacgccgccatcgaagagctcaagtcccgcggcgacatcttcgacaaggacggcgccacttggtttgaatccaccaagcacggcgacgacaaggaccgtgtgatcatcaagtccaatggtgagttcgcctacttcgccgccgacatcgcctactactgggacaagcgccatcgcgccgaaaacccggctgacgtggccatctacatgcttggcgccgaccaccacggctacatcggccgcatgatggccatgtgcgcggccttcggcgacgagcccggcaagaacatgcagattctcatcggccagctggtcaacgtgatgaaggacggcaagcccgtgcgcatgtccaagcgcgccggcaacgtcgtgaccatcgacgatctggtctccgtggtcggcgtggacgccgcccgctactcgctggcccgctccgactacaaccagaacttcgacatcgacctggccctgctcgcctcgcacaccaacgacaacccggtgtactacgtgcagtacgcgcacgcccgctccaagaacgtggaccgcaacgcagccgccgccggcatcagctacgagggtgccgacctggccctgctcgacaccgaggccgatggcgaagtgctcgccgccctcgcccagttcccgagcgtgctcgccactgcggccgacgaccgccagccgcacaaggtggcccgttatctcgaagagctggccgccacctatcacaagtggtacaacgtggagcgcgtggtgccgatggccctgaccgatccggaaacccgtggcgacgatgaggctcgcaaggccttggagatcgccaagaatccggagccggcccgtgccgccgcccgcctgaagctcaatgacgccgtccagcaggtcatcgccaacggcctcgacctcctcggcgtcaccgcccccgaaaagatgtgattatgcccatttctccaatttggccggccgctacggctgtgaatgccgacggtgccattacattccacggtcgtaccgccgaatcgctgcttgacgagttcggctcgccgctctatctcatcgacactgatgaagtagtcgcacgtgccaggcacttcgtgcgcgctgccgccgaagcattcaacacatccactacgcacgtgagctttgccggtaaggcgttcctgtccaaagaaatcgtgcgattggtcaccgaggccggcatgttcgtggacacctgcacgatgggcgagatgaaaatcgccctcgccgctggcgttcccggacgtcgtctggtactgcacggcaacaacaagtccgatgaggaaatcgcgctggccatcgaacagggcttcgccaaaatcgtgatcgacgagcccgacgagccggagcgcgtcgccgccatcgcccgcaagctcggcaaacgcgcccgtgtgatgctgcgcgtcaccgtcggtgtccacgccggcggccacgagtacatctccactgctcacgaggaccagaagttcggcgtgccgctgctggccgccggggccgacgccgctgtgctcgatgtgctgaacgacctcaaagacgtgacgcctgccgctaccaacgcgcgtatctctgcgacgcattccctggaaaatggcgcggaaaagaccgagaaatcagagcgcgagctgcactacgacgtcaagtacccgtacgacctgagccacgaggaagtctccgacacagacaaggcgctggccgccgcgatggaagccattgcggacggtccgtccatcgccgtgctcaagaccatcctcgccgaccaggacgtactcgaactggtcggagcccactcgcacatcggctccaacatccacgatgcggacgccttcattcacgcggccaagcgcatgatgctgctgcgcaagaccctgtgggccaccgacgcctacatcctgcccgaaatcgaccttggcggcggctactccgtggcctacaccgatggcgaagattcaatggacattgacgtggaactcactcgcttggcggatgcggtcaacagcaccaaccgtgcgctcggcatgcccgcgccagccatcagcttcgagccgggccgctacatcgtggcacccgccggcgtaaccctgtaccgcgtgggcaccatcaagcacgtgcacttgtccgatgccaaagacagtgccggcaacccgattgccgagcgcgtgtacgtgtccgtggatggcggcatgtccgacaacattcgcccggcactctacggtgccgactacaccgcgcgtctggcgaatcgcaccggttccgctgaaacgatgcttgcccgtgtgtgtggcatgcactgcgaatccggcgacattgtggttcacgaggtgcagttgcccgccgatttgaagcgcggtgacattctcgccgtgccggttaccggcgcatacggccgcaccatggccagcaactacaaccaggcgctgattccggcggtggttgctgtcagcgagtccggcgcgcacgtcatgctccgccgccagaccgtagacgacctactcaacctcgacgtcagcgagtaatcagcgtgcagaggtgagcgcctgacagtctgtaatgtgcggccaaaaccgtcataatacgaaaagggccgtcagcttgatgagtactttcggtctgctgtcggaaataatccgtaaaataggcgtgggatatagaaaactttttggaaggaccctgaattggctcacaacagcgaaaccccgattcgcgtaggcctgcttggtgccggcaccgtcggctcccagaccgcccgcctgattgtcgagcagaaggacgaactgtccgctcgtatcggccgcccgatcgaactgaccggcgtcgcctgcctcgacccgaaggaaaccgagaagttcccgtggatcgaccagtccatcgtcaccaccgatactttgagcgtggccaccaactcggacatcgtcatcgagctcatcggcggcaccaccgtggcccgcaagttcgtgcttgccgccatcgaatccggtgcttccgtggtcaccgccaacaaggcgctgctggccaagtacggcccggagatctactccgccgccgaggccaagggcgtcgacatctacttcgaggccgctgtaggtggtgcgattccgttcctgcgcccgctgcgcgagtccctggtcggcgacaaggtgaccagcatgctcggcatcgtcaacggcaccaccaactacattctcgacgagatgaccaccaagggtctccagttcgacgacgtgctcaaggacgcccaggccaagggctacgccgaagccgacccgaccggcgacatcgaaggctacgatgctgccaacaaggccgccatcatggccaccctcggcttccacacctccgtgaccatcgacgacgtgtccgtcgaaggcatcaccaagatcaccgccgacgacatcgccgccgccaccgccgagcacaaggtcatcaagctgctcgccgtggtcgagaacggcgaggccggcgtctc

SEQ ID NO: 3666 - DNA, 2503 bp, Unknown
  R85_18m  MAG No. k141_44753
caagaaagcccgcactgcatgacgtcagtgcgagctttctactccttgggtcaagcgatcaggcggaaggcaccccatgcggctcgatgattcgcgatgcaccccattagcatcgcgccccttctcatcgggccgtcaaccctcctgtcgacctcacttggccaagccggaagcgcgaagggcttcgaagccgcccttcaggtcatcgagaatgtcctcgatgttctcggtgccgatggacaggcggatggtgccctggtgaatgccctggtcctcgagctcttccagggtctcctgggagtgcgtagtggaagccgggtggatgacgagggactttgcgtcggccacattggcaagcagagagaacaggtgcagattgtcgatgaagacgcgagccgcatcctttccgcccttgatatcgaaggtgaagatggagcctgctccgttcgggaagtacttctcgtacaggtcgtgatccggacggcccgggatggacgggtgggagacggactcgacttccggcacggtctgcaggtactcgacgaccttcagcgcgttctggacgtggcgctcgacgcgcagggacagggtttcggtgccctgcagcagcaggaaggcggcgaacggggacagggtggcgccggtgtcgcgcagcaggatggcgcggatacgggtcacgaaggcggtgccgccgagagcctcgtagaagttcaggccgtggtaggaggggtccggctcgggcaggggcgggaacttgcccggcacctcggcccagttgaacttgccgccttcgacgatcacaccgccgagggtggtgccgtggccgccgatgaacttggtggcggactcgaccaccacgtcggcgccgtgctccagcgggcggaacaggtacggagtggcgaaggtgttgtccacgatcaccggcaggtgatgcttgtgggcgatttcggagatggcctcgaagtccggcaggtcggcgttcgggttgccgaaggtctcgaagtagacgagcttggtgttctcctggatggcgtcctcgaactcctgcgggttctcggcggaaacgaaggtggtggtgatgccgtcacgcggcagggtgtggcgcagcaggttgaaggttccaccgtagatgttcttggcggcgacgatgtggtcaccggactgggtgatattacgcacagcgtattcaacggcagcggcaccggaagcgacggccagaccagcggtaccaccttcaagggcggcgatgcggtcctcgaagacaccctgggtggtgttggtcaaacggccgtagatgttgcccgggtcagcgagaccgaagcgagcctcggcgtggtcgaagttgtggaagacgtagctggtggtggcgtagatcgggactgcacgggagtcggtggccgggtcggcctgctcctggcccacatgcagctgcagggtctcaaaacggtacttcttgttgttctcggccatgggtctttctccttggttgtgctaggtcgcgaggatttttccttgccacccgcctgccgtgttcgggcggttggcgaggtgttggttatgaagttacgacgcttgggccgcgcggcgcaagccgaacgttatcgggcttgcctataagggcttataaagccttgggatcattgacgtgggagactgtcagaagtcacgaaaaagtcgttgaaattatcgcgacacgccgggccgcacgcatgcgctttcacggtcgactgcggtcacggtgatatcgctaccatgcctttcgcgcatggctcaagtgtccgtgatgattgcttgttccacccgtcaccaagacggtttgcccgctcggcgatgacgtctgttccttttttccgccgcccggttacatggtttacatgacgaacgactacagtcaaacatcgccaatgaattattccgccaacatggtgaaggggttcgaacagacatgaccgatgtaacactgtatgaccgtgatccgaactatattccgcgcgtggccgccgtgcacgacatgtgcggctacggcaagtgctcgctgaccgccgcgattccgattctctcggccgcaggctgcgatgtgtgcccggtgccgaccgccctgttctcggcgcacacgcgctatgcagtgttcacgttccacgacaccacggatattctctccggttacttggatgcctggcagaaggaagacgtggagctggatggtgtgtattcaggcttcctcggctcccccgatcaggtggcgatcattcagcgtctctaccgtgaatatccgaatgcgctgcgtctggttgacccggtgatgggagacgccggcgaaatgtaccccacgtatacaccggagctgtgcgaggcaatgggcgctctggccgatggtgccgacgtgttgatgccgaacctcaccgaagcgagcattctcaccaagcgtgactatcctggccaggatattgatgaggccacggttaacgagctgcttggtgctctgctgaagttgggtgccaag

SEQ ID NO: 3667 - DNA, 10541 bp, Unknown
  R85_18m  MAG No. k141_45120
atcggccagggaagcgccctgacgcagacggatggtctgaccgttgccgttggggatgcgaacgccgccgatggtcggtgccttcagctcctcatactcatggcgctttgccaggcggttcttacgggccttcgaggacttaccgccctgacgtccgaatgcacctgcggcaccgccgcgaccgccgcgaccgccgccacgtgcgggaccgttgctcggtgcgccgccgccctggaagttattgccgccgccttggcccccacggaagccgccgcgtgcgccgccctgaccggcaccctgggagccgccgccctgacccggacggttgtggccccactggccgggacgaggaccgccctgaccaccttggcccggacgaccgccacggaagccgcggccttgcccctggccttggccgggacggcccggacgaccgccacgaccgctatcagcagtcggacgagccatcggatgcggacgcggaatatcacccggcgtcggggtgtgcataccctgcttgcgggagaacgggttgttgcccgggcgcgggccctgagcgtgcgggcgcggaatcgcgtttgaagcggcattgccgccattggcaccggcgccgccctgagcgtgcgggcgcggagccgaagcattgtcgcggttgttctgatgctgccccggctggccattgttcggacggccctggttgttacgacgatcgttgttacggcgatcgttcgggcgactctgacgaccgttctcgcggccttcgcgattatcgcgaccattctcacggttgtcgtgctgaccgtggcggccgggggtcggcatgccggggcgtgcgccgccctgcggacgcggtgtcggtgcgcccggagtcggagcctgctgatgtgccgaggcgggcgatgcctgacgtgcgggagcggccggagtcggtgcggaagatgaagtggaagccggggccgaaggtgcggccgggcggcgctgctgcacgggcttggcagcaggcttttgtacggaagatgcgggcttggaatcgcccttggcgttgtccttggcgaactctgccttcagacgccgggctaccggcggttcaatcgtagaagaagcggacttgacgaattctcccatgtccttaagcttctcaagcacggttttgctatcgacattcaaaaccttagccagttcgtatacgcgtggtttcgccactaattactcctattctgtgaccacgcgcgtgcatgggcgtggtcagttggtgatgacggcaagcctaccctgtctcatcgtgcgaccatgatcgtgttacctcgtctctggtgtgggcgatttcgcgcacactgcaccagcccacatacgccaatcaagcatactcatagcgctggatagcgtagacgcagcgagccgcgccattgctgacgcggctcgtatcaggaaataatgcgccctgaagatcattcgccttcgagcccggcggcctattcggcttccggagcagcagcctcggccgcagcctgggcggccttttcagcggcgaccttcttggcatgggcctcggcggattcgatgccgatcttccagccggtcagcttggctgccagtcgtgcgttctggccttccttgccgatggccagggatagctggtcgtcgtggatgaaggcgatggcggtcttgttcttctcgctgatcacctgtacgccggtggccacagccggggacagcgcggctgccacgaacttggccggatcgtcggagtagtcgacgatgtcgatcttctccgggccaaggttctccataacggcacgcacgcgagcgccgccggggccgatcagcgcacccttcgggttcacgccatcggtgttggccttgaccgcgatcttggtgcgggcgccggcctcacgagcgatggccatgatggacacggcaccggagaccagttccggcacttcacgctcgaacagcttgcggaccagctccgggtgggagcgggacaccacgatttccgggcccttgatgccacgggccacgttcaccacgtacacgcggatgcgttcgccgtggcggtaacgttcgccgggcacctgctcacggcgaggcagaatggcttcgacatcgcccatcgcgacatgcacgttggaggggtcggaagcatcctgttggatgatgccggtgatgagcttgcccttctgaccggagaacgcgccgaataccttctcatcttcggcgcggcggaacagctgggtgatgacctggcgtgcagtggcggcggcgagacggccgaagtcacgcggggtgtcgtcgtattcctcgcccagcttgggagcggggtgcgggtcgtcctcggtgggctcgaccgggatttcgtcggcggcccagacggtgaagttgccggaacgttcgtcaagctccacacgcgcgtgcctggcggcgtgcggagtcttgaggtaggcgaggcgcagggcctctgccagcgcatcatccagggttccggggtcgattccttgctcggcggcgagcttgtgtattcctgtcaggtccagttccatcgatccgtacctcctatgaagttatgtggcgcatggcctatgagtggtcacagttagctattagtgtaggtttccatgcagacacgcttctcttcaggacggtttacccggcgcttggcatccgcactatgcgcgagcgcgatgctgtgttcgctttcggcgtgttcgatgccgcgactggccggacgggccgaggcggaagctcaaatgagcccttgcgagaaagcgatgacgttggcggactacgccacccatccggctgaaggcacgccgttattagagcagtatgccaccggcctggccgctcccctgacttggattgacgttgccgggtattgttcgggtcgttttgccgagggaacgttacgtgacgcgcagaccaagcaatggctggcttttctggccgataaattcgggcagtccgcgcctgaggtgacgccggcgcgtcttgatggcgtcacgtccgccaacgttgaccgaccggtattggatgcgatggccgtggccgaggatcgcgccggattcgctatcgaggtcttggccgcacgaggacagaccgctggggctacgttggcgttgagcgatatgcataagaccgccgggcagcagctggtgtcgctggcgaacggcaattttgatgattccggcgcacagtccagttcttccggccagagcgacccccgccaaaaggtctatgccatcgaccaactactggccaaccccaccaccatcgccgacaaggcaagcggccagaccgtaccgaccgccgccgccatcgaaatggactgcgcccgcgcgcagatcaaggccgtgaccgaatcgaaatcttccaccgagagcgatacgctgctcatcctcgccgcactggccgccaagcacgcctacaccgcgttccaacttggctacccagcgactgacgccgcattgttcgagtagacacacactcctcacgaagccgatgcgaacttgttggaggctagtgggcaagtcgagttgaggcacgttccaccaatgtgaaatcggtggtgtacgtacgggccgggcctgagtatccttcgatgcggtcgataagtatgtcaacggcatgcttggcataatcgtcgtcggtacattggatatcttgcagttcgatgaggagcgggaatcaggagccgaataatgacgatgccggtggccccgacgggaaagaggaggaaaaccgtcggaaccaccggcatacgggtgctcagagcctatcgttcaacgttcacgacaccgaatcgggactcatcggcgcgatcacgccacccgttcccatacggaccataaatcgtcctgatgttgactccgacaggcaatgccgggcattcgttttcgccgttcgtaccccagttgacccagccggattgaggcctctgcacgatctggaacgccgaggacgcctccgaggtgatccagatcatgcaccggttggtattggtgtcgtattcggcgctgcaggcagacggcccggggaagatggtctcctcctcctgtgccgacacatcgaccgccccctcggggaactgccaaggacgggaggtctcatcagctgcgcggtgggcaagcgcccgcacatgcccgagcctctcatcgagccccttgggggtaagggcattttcccatcgcgagaacaaacgccagtagagatcccagtgagcgttctccagatccctgtcaagcagagtggagaaataggcgaaccttgatgtcgtttccgtccgctccgatagcacgttccgcacttcatccttgaggaagccggcgtaggggtcccctccgcggaaaggaacaggctggtaggtgtcgaatcggttgaagacaaggtttccttcgccgctttcgaactcgtcaccgaccgtgatacggttcacgacgcttctgccatcgacctccgtcacaaacgaatccacatggtagacacgatcgaagaaatcgacgttccagtagaacgtgaactcgatggagaaggtcttgccctgcagttcaggtcgaagaccatcagggatgcgcccctcaagcaggtaacggcgcatgacggggccgaactcgataagacggacatcggcgatggcatgttcgggcgggttgatcagaccgttttccggagtgaagaaagggccgtagaacccgccaatggcgttgttcccgctcttgagcagatcgaatccctcgtccttggtgaggaaatggcggatgccccatttggaggcgccctcgcccttgccggtgccacgacatagttcaatgtcgaaatatcccgtatcaaggtggcagaccgcatcgctttcgagcgtgttgtcgtcggcgacgatgcctccttcaaacgtctcccccgggtccgggtcatgtagggacaggacctctccgtcatgcggcaccagaatgccgatgaacgtcgtcgaggaaccgtcggaatcccccagcaccttctggaacggcgaagactgtcccaaatcggtggtaccgagaatcagatcggcctcaactttttccggcacggtcaccgtgaccggctgtggctttgtaggatggtggtggctattggtgatggtgaatcgtggatattcgtgcgtcattgtcgttctcctgtttcagttcgcagccttggcttgtgtggcacctatgcctttgaggaacccgaacgagaacgagttctccttgagaccatcgatgagcacggcgatgatgatgacgatgcccttgacaagctgctgggtgaagaacgggacattcatgagcacgaggccggtggtgagcacgccgaagatgatggcaccgatcagagtgcccgggatcttgcccttgccgcccatcagggaggtaccgcccaggacggccgctgcgatggcatccatctcataaccgtcgccggcagtcggctgcgcggagaccacacgcgccgcgaagatgcagccggcgagaccggcgcacagtcctgcaatcacatagacggatagcagtacgcccttgacattgatgccggcaagccttgcggcttcggcattgccgcccacggcgtagacatgcgagccatacttggttttgtcgagaacgatccacatgactacataaacgattatcatcacgatgaacggaatcggcacatggaacaggtatccgttgccgagggcgcggaagttcaaaccgttgtctacgatcggcagaccgccggtgatggtgtatgccaatcctcgcatgaaggtcatggtgccgagggtgacgatgaacgcggcgagattgcagtaggcgatcaggaatccgttgatcaagccgatgagcgcaccgatcaccatgccgagaaggatggcgagcagggggttgagcccctgctgggcggccagaacggcgatgcaaccgctgacggcgatggtcgaaccaacggacagatcgatgccggtggtaatgatgacgaatgtcatgcccgcggcaagaatcgcgctgatggagatggacctcgccacgttgaacaggttgctcaccgtgccgaagttcggggccttgatcagcatgaatacgaccagcaccagcaatacgaacggcatgccgaccttctcccaggtcgccgccaggttcatctttttcttttctttcattggaagctcctctttatcgttgcgctccgtcgcgcgtttcggaatcctcggattgcgccttcagcacgcccgttgcgtaccccatgactttctcctcggtagcttcatcctcggggatacaggcagcgatgcccccctgcctgacaacgaggattctgtcgctgatgcccagcacctcgggcagatcggaggagattacgagaatcgccttgccttgcgctgcctgggaactgatcagctcgtagatctcctgcttcgcgccaacgtcgacgccacgggtcggctcgtcaagaatcagcacgtcggagttcttcatcatccatcgggcgaacacggccttctgttggttgccgccggacaggttgatgatggaagtggtcaacagacgttgcgcgatgttgaccagtttcatcgattcctgcacatccttgcggatgcggtgcttctgaagcagacccagcctctcgtattcgcccagcgaagagacggagatgttgtcttcgacgcttctgacagggaagatgctctgcgttttcctgctttcgggaagatacgcgaccccatgaccgatggcggccttcggggatttgaacgacaccgccttgccacggagccggatctcaccggaatcatgcttgtctgctccgatgatcgctctggcgatttcggttctgccggcgcccaccagcccggacatgcccagcacctcgcccgcatgcacggtgaaggataccggcggagagtccggcgaaagcctgagattcttgatctcgagcacgccctcccccggatgacgcttgccatggtcgtaaagtttctcgactttgcgtcccaccatcttggcgacgatgtcattctggtcggcatgctcgatgtcggtggtcatcaccgtatgcccgtccctgagcacggtgattctgtcggcgagccgccacacctcctccatgcggtgggagatgtaaatcaggcccgtgcccttctcccgcagcatgttcaccagcgtgaagaggtgctccgattcggctcgggacagcgatgccgtgggttcgtcgaggatgaggatcctcgcgtcctgcgcgatggccttggcgatttcgaccatctgctgctcaccggtgcccagatcaccgaggaatgtgtccgggtcgatgtccgccttgatgacatcgagtttacgtacggcgtcctcccgcatgcgcttcttgtccagcagccccgacttctgcaacggttcgttgccgagtgcgaggttctgcgccaccgtcatggtgggcaccacattgagttcctgatggatgatggcgatgccgaggtcgtcggcctgcttcggcgtggagacgtctacctctttgccatcaatgagaatgcgtccggagtcccttttcagattgcccgaaaggatgttcatcatcgtcgattttccggcaccgttctcacccatgagggcaagcacctcatgttcataaaggtttaggttaatgttgtcgagtacgaccactccggaaaagctcttgacaatgttctcgagctgcaataggggcagcaactgaggcatgctcaccatcccttgtaatcgttgacgttctcacgagtgaccatgacactcggaatgagaatcgtggacttcttgggggtatcgcccttggcgaccttctgggcgtaggcgacggcctgcttgaccatctcgccggggttctgcgtggaggtccccacgaacggggagccggcgcgcttcagctcgtcgacgccttcgggacttccgtcgatgccggtcacgatgatttcatcggtcctgccggcctgctcgacggcgagcgcggcgcccagagcggacggatcgttcataccgaagatgccctgcacgtccttattggcggtgagcatgtcggtggtcacggacaggccggtggcacgatcgttcttggaggattgctgtccgacgaccttgatgtcaggatagtccttctccagggccgccttgcaacccttgatacggtcggtgatggtctggatcggggttccgtccacgataaggatgttgcccttgccgccgagctgctcggccaggtaagagcacgacagttcacccgcctgcacgccatcggtcgttacgaccgcatcagcgcccttcgcaggagtgtccacggcgaccacgatgatgccggcggccttggcacgctcgattgcgggcttcaaaccactctcatcgacggcggagacgatgatcagatcgaccttctgctgaatgaacgaggagatctggttgtcctgggtggccaaatcgagctgggcgtcctggacattgagcgttgcaccgatcttcttggcttgagccttggcttctttgtccatggcggtgaagaacgggttggacatatcctgcaccatcaggccgatgctcttgatttccgtgggcttggagacctcggcggcatcgttgtcgccattactcaccgcgctgcagccggacagcagcagcgacgctgcgagcagggtggaagcggcggaagcgatcttcttgatgttcatggttgttttctccattggaaatagctgtcttgcgttcggatgcggcctattgcccaccgcatccgcatgactccctgatcttcagggatgtctcgatcatgtcgtggatgggattcggcctcatcgtcgccccatccgggtttttattcacctcctcctttccttccatctgtccaagcaggtagttcgccgccttggcaccgatgaatcggctgtcttcggcgacaagtgttatcttcggcgataccaggtccgaccaggcgaagtcatcgaacgcgaccagcgccatatccccgggaatgtcgacggatttccgattaagagccgacatgacgcccaacaggatgggattgttgccggcgatgatcacatccggataataatcgttctggtcaagaaaacggatgacttcggtgcacgcttccacatcgttgttaccgcattccagcacgcgaatctccgccccacactcctcggcggcggccctcaggccgctctcgcgagcgaacctgctgttccaggtgtccggatagatggcaagcagccaacgatggaaatgatggagtttcagatgacgcccaagcttggcggcggcatccacgttgtcggtggctacatacgagaaaccatcttttatttcctcatcatcaccgtatccgggagtggaatcgacgaatacgacgggaatgttccagttcttcagctggttcctgctgtattcgctgagtcccaaggtggagatgatgccgccaggacggttctccacgacctgacgcaacagatacgcctcgttctccttgctgtaccggccgttgacggccatatcggcaatgaacaggctctccttcttgtcctgcaggacgctctcgatgccgtcgatcagatcgagataataggagttcgacattcccgcggtgagcagggtgatgaaccggtgcgtgcccgtgcgcaggtcacgcgcattgacgttggggatgtagcccacctcgttggctgtttcgcgcaccgatgcacgggtgctctcggatacaccgctgagaccgttaagagcgcgagaaaccgtataaacggacagtcccatccgctttgcgatatcggtgatagtaacgtcgtgtcgtttcatcattgaagtcctaaacgtttatgttctgatgtattcagaatacacacgacccaagacgttgtcaacacaggacatgcagacggactcaaaacgagtttattccaatggttcacaatgaactcggacggatatcccgaatccgtcacttgcctcattctgtctcattccgatgaggcacgaggtatcaggcatacccggacacttcgtatcccatcgggatgaggtgtcgattacaatcgacatccaccggcacggtcccgatatgccggacgcatatccgcgacagtcagatggcccctcacgccgtcacgtactccacgtgcgcgaattcgggcactttgtaccacttgaccgggtagccggcgccgtaggcgcagaacacagaatcggacgtgttctccagattggcttccggatcgtacgcggcctcctcgatcacgcgccgttcgtcgtggcagggccggtagccgccgaacgaggcggagaagcgcccacggccgtgcgtatacgcgttcacgtccatcgcgtagtcgcgcatctcgctcaccggtgccccgcctgcgatgacggcgtattcgccgtcgtccgtaggcgggtcgaacgtgccggacattcgttgcacgtcggtcatggcgtgaacgcgtatacgcacggccgtgggcgcttctccgcctcgttcggcggctaccggccctgccacgacgaacggcgcgtgatcgaggaggccgcgtacga

SEQ ID NO: 3668 - DNA, 3377 bp, Unknown
  R85_18m  MAG No. k141_45145
acgtacgcagaggaataatccggatcggggttcattgcatccgagccggaaagcgtcgttgaagtggggaatcggaagtcatacgtcttgactttggtgatggtactcatgtgttcgggctccttcgcctggtgtgaaccaacggctatatcgtacgtccgaataaagaaatttgcaagcctatttgcgaaaatttttattcaaggccggacaaagggcaagaaaacacggaattgttacggcacaatgcgtcataatggtgggaacaacgacgaaatcgtctcagtaattgaacggcgaatatccaagagggaagcaccgatggttaacgatacatccacccacaagctcaaggtcggcgagctcgcaaaaatcgccggcgtatccgcatccactgtttccaaagtcatcaatggcaggtcaggcatttccgacgagacgcggagacaagtcgagcaaatcctcaaagatcacggttactcaaggcctctggtcaacaccaaactctcccccaccatagagctcgtcgtcgaatacattgagcacaacggcacgatggaactcatcaaatacgcctcatactgggcgcagcaggcgggcctcgccatcacggtcacccagaccaaccatggcgatgccacggaagactgtttccgcggcatcatcgatagaaatccccaaggtgtgattatgcagcagatgggcggtctgaccactcaagcgaagtctttgttgaaatcgcgcagtattcccgtggtcatcatcgacccaatcgataccgtcgattcggatgtgatgagcgtgtccatcgataactggaccgcaggataccaggccggcaaacacctgctgtcgctcggccatcgacgcatcgccgttatccgggggccggcgaacctacagaccagcatcgcgcgctatagcggattcaccgccgctctgcaacaggccggggtggatctgccggagtcctatatcgaacagggcgactacttccccgccgaaacaagctatgaagcagcctgccggctgctggaactcaccgaccgacccaccgcgattttttgctgcaacgacttatctgcagtaagcacgtatcgtgccgcacgagagcataagatcgcgttgccaaagcaattgtccgtcatggggttcgacgacattttccccgccggccaactcatgccctccctgaccagcgtgcatcagccgttcagcgaaatagcccaacgcgccgtgcagatgatcatcgacagccgcaagggcaatcagggtgatatgcacgtcatcctccccaccagtgtcgtcacccgggaaagtaccgtaccgcctcagtcatcggcccgataatcggccagattcaagctggcggccacccgattggacgcgaacgcacccaccgaaaccagcgcatagcacagcacaagcccgccgaagaagctggccagcgtggccggttcggtcatcgaagcggcgaacagaggggccataagcagcatggaacagccgccggccacgatcaccacgatgttgagcggggtgagtacctcgatgaatcgcgcacggttcaaggtcttgacatcagtgccctccaacaccagcatgcgatattcgccggcctgatcgtacacgctgccggcctgcatcacaccggagctgaccgcggcaagcacagcggcgaacactagcgtcaggatgccgccggtgccgatgtcgcgaatgaacacggtggacgggtcgttggcgtcaccgaccacggcggccgagccaaagaatccgcagatcgaggtgatgccggcgatgaacacggccagtgcaatgccggacacattgcgccacgcgcgcttcggattgtcgagaatacggcgcatggcaatcatcgtggccgcgtccttgggccgtttggccttggctttggcgcgggcggtgaccacccaggagcccacgaggttcaccagcgcgaagcacagcagcatgaaaccgatgatcacgccgtacatcactacttcaccggcctgagccagcaccatcggattcttgaacagaagaacggcaatcaccatgatgacggcgaacaccaccacacgccagccggacggcagcgtagtcgcaacgcgtgaagtgacgccgagtggcgtgatggccacgcgccgaagcgtgaccagcgaagagatcagcgccaacacggtcacgccaacaagcgtaatgatcaaggcaatcggccccacccacagttgctcgaacgtaaacgtctgattctggaaatgcagcaacatgattagggggatcaacacgcagtaccccgcgatgccaatcagcgcccccaccaaggcctgcccagccgcatcaagcgccgtaaggcgaataacttgccccgtggtcgcgcctgccaagcgcagggatgcgagccgagcgtcacgacgggacgcagccaatcgcgcggcggaaccggcaagcgccacgaacggcacaatcagcagcaggcaggcaaagaacgccagcacgacgtatgccgtggcgtattgatccaggctgtggggattggcgatacgctgcttccagatttccgctgttccgggtttgcaagcgtcgagattgattgcgcatccaatggtgtggtcggcggaggcgcgccacatgaacccatgcacgccgcccaaaacggtgagaaagatagtggtggctgcggcaaaagcaatgatggccaacaccgaagtatgacccgcactgccacgcgagccggggcgatggaacaatcgccacaatgcgaaagcgctcatcgtacgcctcccagctggccgtcctgcatggtcacggtgcgcgagcagaacgaagcgacgttggggtcgtgggtgacgacgaccacggcggaaccgttgtcccgcgcggcggccatgagaatgcccatgacctcgcggccggtggcttggtcaagtgcgccggtcggctcgtcggcgaagaccacggcaggtttgacggcgagcgcacgggcgatggcgatgcgctgcatctggccgccgctcatctcccccggtcggtgcatggcgagtgcgcgcaaacccatacgttccagccacagaatcgccgtgtcggtggcggtgcggtagggcatgccgtcgagcatcatcggcagggcgatgttttcgaccgccggcagttcgggcagcagctggccggattggaagatgaagccgaaggcgttgcggcgcagtttggtgcgctcggcgtcgctcatgcggctcaggtcggcaccacggaagatgacggtgccggcggtcggcttgatgatgccggcgagtgcgtgcagcaaagtggatttgccggagccggacgggcccatcacggctactgtctcaccctcccggagcgtgaagttc

SEQ ID NO: 3669 - DNA, 11355 bp, Unknown
  R85_18m  MAG No. k141_45433
caccaagttcgagggcgaagtctacgtgctgaccaaggacgaaggcggccgtcactcgccgttcttctccaactaccgtccgcagttctacttccgcaccaccgacgtcaccggcgtcatcgagctgccggaaggcgtcgagatggttcagccgggcgaccacgccaccttcaccgttgagctgattcagcccatcgccatggaggagggcctgaccttcgctgtgcgtgaaggcggccacaccgttggctccggtcgtgtgaccaagatcctcgcctgattatcatcagacaagaatcttcgcttgaactagcgacttaagaaatccccttcgaggaaactcggaggggatttcctataaccgcagcaggatatggatatgtaccacgacttccggcctggatgcgctagtgttgctttccaatagataaacggactgctgcactgcgagggtatgacactgatggcaggccgggaaagaaggtcgatgatgactggttcgcaagccgcacactgtggttccgtatccgcgctttcactgggactgcccgtctccacggcgattcccgaagccaaaggcacactgccgaaagccttgttcgtgggcaaggcaccgatttcaggcaaactcaagcagcgattggtgaacgaaatcgaatccattaccatgctggcgttggtccggtcgattaacactgggcttgcggacggcaaactggttccggaagtgctggtcatcggactgaagcttacggccaaagccactggcataccgaacgaggtcatcgatttgattgccgggcagcgtaaatcgggcatcgtgttcgtgtgtgtacgcgacgtgccgttcgagggcagcaaacgtgaggaatgtgcgttcgccgtgcgtcgggcgataccggggcgtgccggccacacgccgatctatcgggtatatgccggcgattggcagccggcgggggaggcccagctggagctggccggctctactattgatgagctgtgggcctcgctgtgctcacagaccattctgggcacgccggagatcgaaaatctggatgcgcgcatcattcgccatactgaaattgctcggctcgaatccgaagtggacaagctcacccgcgaccatcagcgcgtcaagaatcctgttcagcgcaatgaaatctatgccaagctccacaaggccaaaacacagctcgcagaactgcgcgaagcatagtgatatgaaaaccattggggtcccgctggcgggagctggctcgcaaagcgagactgagggtggtccaggtccgtggcctagggctacgcccaagctaattgaaatattcgtgcatcatacagcgtacagttaaaccatgttccctctgctcgaaaccctggtcgccgtatacgaggtgggccagttcacgctggctgccgacgaactgaaggtgtcgcagtcgacggtgtcgtcgcgtatcgcccaattggagcagatggtcggcgcgccgctgttcgtgcgcaatgcgaaaagcgacgtgacgcccacacaggccgggcggatgctgtaccagaccgccatcggcatcgacggattatggcgggatacgcgtgagcagatcgcccgcgtgcaggaggcgcgtgagccgctggccgtttcgttctcgcacacgaccgcggcgattctgctgccgaaggcgttgccggtgatggctcggaacatggacagtttcgacttcgccgtacacgtgatgaactcggatgcgattctcgaacgggtcagcatgaaggccgtgcagctcggcgtggtggaaaagccgatcgtgaacgattcggtggaccgcgtcaccctgtgcgaggaccggctggtgttggcgggggagcccgacggcgtgtggatggtgcgcgagcacggttccggcgtgcggtattacacggatttgtatttcaagaccgctcaggttgtgcctgcacgcacgatggaagtgtccagtaatgcggcgattgtggcggcgctgtccgccgggttcgggcagtcgttgatttcggaagccgccgtgccggcgggcgtgccggtgcagcgggagcttggcgatgagtttgtgcggcggttctatgcgctggtgccgagatccggtctgacgcacgatcagcgggagttggcggagatgattattgctgcgctgcgcgggtagtcagatagtcgactgaggggaggtcgcgaacgttgtttctctctctccgtccgcctgcggcggccacctccctcatcagagggagatcaattaggtatcgacaaaatcgatgatatgtattggttgcaatgatttgaccgatgtaaatgcttgagcttcaatagacaccgtgagagagttctgtacaaaatggtggaagcgcattaccaccgttgacatgttgttcattggcgttctgactctgctggcctcgctgttcgcctcctggctcaagcagttccccggattcagcctgttcggcgcgcttatcatcgcgctgctcatcggtatgatcatccagttcccgatccgcagtgcctacgtcggttccaatgatggccgcaaggcaggcgtcaaggacgccgctggcctgatttccaacaagctgctgcgcctcggcatcatcctgctcggtttcaagctcaacctcgccgtgctgttcacgcagggcatcaagtgtctgccgatcgcagctgtggtcgtcacgctgaccatcatcgtgtgctatgccatcgcccgcaagctcggtgtcgacccgatgctcgccatcctgaccgccggtggcaccggcatctgcggtgcggccgccgtcatgggtctggccggttccatcaaggtgcctgaggacaagcaggacgagaaggacaacgacgtgaccatggccgtggccatcgtagccattatgggtactgtgttcgcgttgctggagatcgcgctcggcccgctggccggcatgaccaaggaccagctgggcatcaccgccggtgcttccctgcacgaaatcgcccacgcggtcgccgccggcgacgctttcggcgcggtggacatcgccaccatcatgaagctttcccgcgtgctcatgctcgtgttcgcggccatcatcatcgctatctggtgggagaagaagcactccgaggtggagaacaccggcaagaagaccgtggccttcccgtggttcatgctcggcttcatcggcgcttcgatcatcggcaccttcgtgccgctcatcgcctccatcaccccgcagctcgtggactttgcgtacatcgtgctcggcatggccatggccgcgctcggcatcaacgtgaacttcaaggccatcgcttccaagggcaagaagccgatgctcgccagcttcctgacatcgattctgctcatgtgcttcgccgcaggtgttgcgatgctgttcttctgataagcgctccaaatacaaataggcgaaggcgaacgacagtgagcaattggaatgcgtcacctaaaaatcacgtacttgcacaacggataaccccagccgaactggcaggccatcgcaatgaacttcaccacatacgggctcaggtccgtcgcgcccggcatccagccgatcagcagtgtgctgaacgtgaagttccagatccacagcagcacgaaaagcatcacggaacgggtgaagttgcttgacgatttgaacgtcacgttgcggttcatcacgaagttgtaggtcgccgaacacaccacggcgataccgttggagatctgcgagggcacgccgatcaagtgcaggatggcgaacgtcgcatactccacaatggtctgcgtggcggaaacacccatatacttgcccaacacggcgagtccattttgcttcggggttgccgtgcccacggtattttccgcagtgttcgtcgtggccgaggcgttcgtgacgtccgcgccctgattgtgcttcacatccgctccattgttcgccatgcccatatacctcccggatgtacctgtgacgttcgacctcgcgatgataccgctgaccgcgtcgggaatcgtcgtggcggtcagacgagaaaaccgcaggccgcagcaacgaccggcacacccagcgacagcaccagataggccgttgccgtggggtagcggcgtttgcggaagagcgtcaccatttcgttgatcgcggtcgagaacgtggagaatccgccgaggaaaccggtggccagcaccagccgccacggttcatcaagtgtcccgcccagtgccagcgccgcaaccagaccggtcaggaatccggcgatgagattgatggtgaatgtggacagcgggaatgcgcgttgccaatacgttttgatggtcgcgtcaagcagatagcggcaggaggcgcctacgccgccgcacaggcagaccaagattggtaggaatacggtcatcacgccttacctcccttgctggtcgtagcggcattcgtatcagcggacgcttcggcggatgcgttcgaggagccggccagatgcgttcctgcccacacgccggcagacgcacaaaccagacccagcgcgaacgtcaccagtagataggcaatgccggccgccacctgaccgtcgcgagtcgcggtgaagccttccaatgccaacgtcgacatcgtagacaaaccgccgcatacgcccatgccgagcccacggctggtgagctccttggcacgcgtgtcgaaccgggaagagccggccaaataggcggtcagacccgcatagcagaagcaggccagcatgttggccacaaacgtgccggtatggaagctgccggctgcgggaatctgcgcgaacgcatagcgaatcgcggtgccgatggcaccgccgcagaagacgaccaacacaatatcaagatggatatcggggagtttgtgcgccggaggagtggccgtgcgcgtgcccggccgggcatctgcggatggggattgcgagcccataatagcctttcctgaaaccgctgaatcctactgaagacacaacgattccatgcaatgtcaaatcgtgtgtaggaactatcagcagtgtgcggttcgaaacaagttcaggcgggtcccatcgccggttctccagattactcatggcgacgaatcgaacagtgagcgtatctcggatattggcctatcgcagtgaattgctcggttgttgccatacctcatgggtatggcgaaacatggtttatggctattggttaatgcaaggcgattattgtttaatagaacacgaggataacgggccttaagcgctcgatgccggaaaacaaggagttatgaacgtatgtctgaaaccatgaaagctgcgattttcgtggagcctggcaagatggccgtggaagaagtgccgaaggcgatgcttgaacaggatgacgacatcgtgatccgcgtggtgcgcacatgcgtgtgcggctctgatttgtggttcttccgtgggctgagcggacaggccgcgcacagccaggtgggtcacgagtccatcggtgtggtcgaagaggttggcgcggcggtcgaatccgtcaagcccggcgatttcgtggtcgtgccattcccgtacagctgcggcaagtgcccggtgtgcaaggccggcttcgaatccgtgtgcccgcacggcggctacttctccgcttgtcaggccgaatacctgcgtgtgcccgaggcggacggcaccgtggtcaaggtgcccggttcaccggaagactacgatgacgcgacgctcgcttcgctgctgaccgtttccgatgtgatgtccaccggttatcacgcggcggtttctgccgaggtcaagcccggtggcaccgccgtggtcataggcgatggcgcagttggcctgtgcggtgtgattgccgccaaaatgcgcggtgccacgcgcattattgccatgagccgtcacgaggatcgcgcggcgctcgcccgcgaatttggtgcgactgatatcgtgcccgagcgcagccaagaagctattgacaaggtgctaggaatgaccggtggctatggtgcggacgcagttctcgaatgcgtgggctccaagcagtccttcgacacggcgattggcctgattcgccgcggtggcgtgattggtcgtgtgggcctgccgcacgacgtggagatcagcgccgaaggcacgttctacggcaacatcggcatcaagggcggcccggctcccgtgcgccactatgaccttgatgagggtctgctggacgcggtgctcaagggcgagatcaaccccggccgcgtgttcaccgccgagtacgacctcgaccatatccaagacgcctacgaggcgatggaccagcgcaaggtcatcaaggcgctgatccggttctagggtcaggtacgcagcgaacggttctcaccaagaaccgtgtgagccattcgcacaaaatcgcacaatcgaacagggcgccggtgtgatggggggggattgggggtgagccggttcggcttgcgtccttataccgttgttttcgtgtagaatcggctacctctatacctctgttttcgtgtagaatagcatatgcccatactgttgttttcgtgtaatgaggtgattgctcatgttgaagcgcaagatgctggataagctgatcgcatggaaacaaaaagcgggtgggcgtgaggctcttctcatcgaaggcgctcgccgtgtgggcaaaagcaccattgtcgaggaattcggccgcactcagtacaagtcatatattctcatcgatttcacacgtttgccgcgcgacgttcgcgacatcttcgaaaaccagcgtgatgactttgacacatttttcatgctgttgtctgcgtattaccgcaagcgactgtacgagcgtgaatcgttgattattttcgacgaggtgcagcggtatccggcggcgagggagctcatcaaatatctggttgcggatggccggtatgactatgtggaaactggttcgctgatctccatcaagaggaatgtggcgaatatcgtcatcccctccgaggaacggaaaatggacatggggccgctcgattttgaggagttctgctgggccatgggggaggagctgcttgctgaaacgattcgcaaatcgttcgagcgtctggtcccgttgcccgatgcgctgcacaaacgagcgatgaggctgtggcgcgaatatctgctggtgggcggtatgccgcaggcggttgccgattatgtcgagcagcgcgattttggcgaggtggatttgatcaagcgtggcatcctgcagctgtacagtgatgatatcggcaagttcgccaatggcgatgccggccgcgtgcggggcattttcgctcagattccagggcagctgtccaagcatgagaaacgattcactctggcatcggtcgataagggggctcgatctcgtgaatacgattcggcgttcttctggttggaagacgcccgcttggtgaacctgtgccgtaattcgactgaccctttggtggggctgggattgtacgaagataacgattcattcaaatgctatatggcggataccggtttgctggtgtcgcaggcgtttgccgatcgagagacaacgccggatgatgtgtaccgggatattctgttcgataaactctcgctcaacgaagggatgctggtggagaatgcggtggctcagcaattccgggcgaatgggcgcaaactgtatttcttctcgcgctcggatagggcggatgccacgaaaaccatggaaatagacttcctcatcgttcgggaatacgataatgccgcgatgaagcctcgcatcagcccgattgaagtgaaatccacgaaacgatacggcgtatcttcgctcgacaaattccgcaaaaggtatgcccaacgattgggcaaggaatacgttctgcatccccgccaactcgaagtggatggagaacgcatcaagctgccgttgtatatggcccactgtctgtgatttgtgctgattgatgcatgtttgggctgcaaggttcaggcagtcgaagagtgtccgttccgcataggacatccgtgaatatggctggactcacactggctcgactgcagggaaaggagttggcatgggatattccatcggtcaggtgtcgcgaaagactgggctgtccgaacatacattgcgctactatgacggccaaggtcttttgcccggtatcgcttgaactggtttcggacggagatgcttcgatgacggcgatcttgaattgcttgatctcattgaatgtctgaaatccacgggcatgagtctcgcagagatcaaggattttgttgatatgactaagcaaggtgatgccacgctcgaatcacgacttgctgtttttcgcaatcagcgacatgtggtgaaacgtcaaatcgtcgaattgcgacgccggtacatcaaacttgacgtggtcattacatccggtgcctcttgcacctcgtcgatgaaaatcaatgtaccgccgggagtgagcgttgaaggtgagaacaaggtaagtcggctgatgaactcctgcgcgtcattcgccgatgcgagcgcgcgggccgcctgcttgttctcgtacaggttgatttcaaggtaatgagcgtattcgtgtttggcgaactcgcgtaccgcgtagctcttgccgatttggcgggcaccggtcagcagcagtgctttgccggtgccgatcagcttccattccaacagatcgtccgagatcttgcgctcaagcatggcagttcctttccgaatcccttatgggagtagcattttctgccttgtatgtgcagaatgccgcatttcaaaatggggttttggcgcaaaataccgcatttcaaagtagggtttggtgcaagatgtcgtgcaaatggtgaatcgggcgtgtttgtaggggcggctggatgactgtgcggctggactgttgtgcggccgcatgcttatgcggccacaagtcgtgcgggctgttcgcaaactatgcgcggtcggccggcattcgcctgcgcttgaggtgttcgataagcagctcacactttttgacatcctcggcggtcgaggccggtaggtcgtcggaggaggtgtcgatgatgcgctgcaggtagccgtgtagggtttgtagctcggtttcattgagacagtccagcatggaggaggtctggtcgggcgctttgcccagcagatcggcggccttgcggccctggttggtgaggctgaccatcatgacgcggctgtcccgcctggatggacggcggctgatgtgaccgctggcctccagtttcttcaacagttcggccatggcctggcggctcatgccgaacattgcggccaagtccttctggctggtctggtcggattccctgagcgtggccaagacgcggccttggccgcggcgcgggtcgaaagcatgttcgccgcgcggcgatttggcgccgggggagacgagccgtctgtgtatcgcgcgatacgccatgatgcggccaatgctgatgaaactgctgagaacatcgttcttgatatcgccgtcggcggtgttgtggcttgtgccgttctccgccgattgactcgtggccattgcgttgtcgaccgcgtcgtttccggttacggcggcgttgttgctggtactgctcatgttcggaatccttacgtcagtgctgcatgttgtcgccggtggattcgccgcgatagcgcatcatcatcgagcgctgcatctcctgcgcgttcggcggggtccaggtcagcgcgttcgcgccggccacgatggtttcggccatggactcgtcggtcgaaccgccgctggcgagcagcgggatggaggggtgacgctgcctgatctgctggaccacgtcaggcgtcctgcggccggccgccacgttgatgatggaggcgccggcctcgattttctcgtccaattcgtcatcgcaggtcaggaccgtggcgatgaccggggtgttcgtgatgcgcgccacgtcgtacaccgtggagggcggcgccggcgcgttgagcaccacgcccgccgcaccctgcatctccgccatcatggcgagttggatgacgcgcgggccggtggtggtgccaccgcccacgccgacgaacagcggggcctgggccacggtgagtagggcctgggtgatgactggttcgccggtgaacggatatacggcgagaatggcgtcggcattggtgttgcggatgatggccgcgtccgtggtgaacgcgaacgagtggagttggcggccttggacagtgatgccggaagtgcagctgatgatgtcgggaacacgggccgcggaggagctgatgcggttttcgatggggttcggtccgtctacttgacgggattccgggtcgtattcggtgaggtcgttgctcatgtcatgtgtgatgttcatgccggtctcctttaataaggaagcgagcgaagcgtcgctggtcgtgtgtctttttcatcctcttcagtaattatgtcaagtacctgacagatatgagtatacgactccatcaaagattgtcaagtaccttacgtattgctgttgtgtcacatttttcgacaatgccaacatgcgtatgttgtttgatgcggatctgaatgtggaacggctgattcccgcactgtcgatcgagtccggaactaggatcactcccgaggatacgctcgtcattttcgatgaggtacaggaggtgccgagggcgatgacttcgctgaagatgttcaatgaagccgccccggagtatgacgtcttggccactggatcggcgcttggcatcgccatgcatcttgggttttcattcccggttggcaaggtcagtagactcaagctgtatcctatgtcttttgttgaattcctgtatgcgtgcaaacagtatgccttggccgaaatgcttgagcccaaggattttccgctaattaacgtaatgcatgacagggtcatgacttggctgcggtatttcatgtatacaggaggcatgccggagatcgttgaagcgttcgccagtactctgccgaatcctgacttcacggcggttcgtaaattgcagaatagtctggtctccgattatcgtgacgatttctccaaacatgttgatatgcgtgatagtcccgccgtcaccacgcttcgtctcaatcaggtatgggattcaattccttcccagttggcgaaagagaacaagaagttcgtatacggcgtggtgcgagctggtggacgtggcaaggattttgagagtgccatacagtggcttgtcgatgcgtcgttggcgttgcgcgcatccgccatcgcgcaagcgggaacgatcgcattcccggtcacgaggattccgctggttccacctccggggatcggccggttggatgaggttacgccgtcttgcgagccgtcgaacgatcagggccaaaggtaaagaaattcggtattcttgcaaggctttttgggttatcccg

SEQ ID NO: 3670 - DNA, 6759 bp, Unknown
  R85_18m  MAG No. k141_45613
cgggaggagccaatgccgaattcggggccggctaccagaatctggcccttgccggcgtactccggcttgttgagcacgaagttcgggtcgcggcgccatgcgtagaacagggcgtcgtcgaagccggacttggtcacgcgcttcagaaacacggcgggaatgatctggtcggtatcgacgttggagcggcgcagcggcacgcccacgccggtcaaggtggtgagtttttccatggatatcaagctttcagttcttgccccactggcgggggctgtcagctttgctgactaggggtggtcgccggcatacagcgtctcaagaccaccctcagtcagtcttcgactgacagtccccgccaacgggagccagtgtgcagtatttacaaatcggcgggggacgaaatcgtgccgcgaatagcagtcgctgcggccacggcaggcgacgccagatgcgtacgcgaccccttgccctggcggccttcgaagttacggttcgaagtggaaatcgagcgttcgttcggcaccagcttgtccgggttcatgcccaggcacatcgagcagccggcgttacgccattccgcaccgaagtccttgaacaccttgtcaagcccttccttttccgcctgcagacgcacgcgggaggaggccggcaccacgagcacgcggtgaatgttctccgccttgtgatgtcccttcataatcgcagcggcctgacgcagatcatcgatacgaccattggtgcacgaaccgatgaacaccgtgtccacggcgatgtccttgatcggcatgcccggcttcagacccatgtacgtaatcgcgcgttcggcggcggcacgcttggtggcgtcggcgatcttgtccggttccggcacgttcgcggtaatcggcagaccctgaccggggttggtgccccaagtcacgaacgggccgagcttggtggcgtcgatatccactaccttgtcgaacatggcatcgtcatcggtcttcaacgtcttccaatactcgaccgcacgatcccacatctcaccttccggcgcatgcggacggcccttcaggtactcgaatgtggtctcatcgggcgcaatcatgccggctcgcgcaccggcctcaatggacatattgcatacggtcatgcgctcatccatggtcaggttgcgaatcgcttcgccacggtattcgatgacgtggccctggccgccgccggtgccgatcttggcgataatcgccagaatgatgtccttggcggtagcatccgcaggcagcttgccgttgacgttgacggccatggtcttgaacggcttcagagacagcgtctgcgtggccataacgtgctcgacctcggaagtaccgatgccgaatgccagcgcaccgaatgcgccgtgcgtcgaagtgtgcgagtcaccgcacacgatggtcatgcccggttgggtcaggcccagaatcggcgcgaatgcatggactatgccctgatcggcgtcacccaacgggtgcagtcgcacaccgaattccttgcagttcttctccaaagtgctcagctgcagagcgctcgtttcatccggattcggacgatcgatgtcaacagtaggagtgttgtgatcttcggtggcgatgagctgatccacgtgacgcggcttgcggccagccagacgcagaccctcaaatgcctgcgggctggtgacctcatgcataagcatcaggtcgatgtacagcagatcgggcgcaccgtcgctgcccctgcgcaccagatgatcggcccagaccttctcggccagtgtcgttcccatagtgtttcctccaaaaattccgcgcgaggtattgtgttcgcgccttgttcgtggtattagcctatgtggtgacgtttggcccggccacaagcaggccggatattgagatacgctcccaattcccccatggccaccctgtgagacacttccccgatttggtatttcactatgtgagatggcataatcgcacgtattatgactgattcccaagaagaaccactgaacaacggtctgaccgactctgagccagccgagaccaccaacgagaccgccgcaaaggatgacggggaaatccattccggcgtcggcgttcttgataaaaccgtaaagattcttgatgcgcttgaatccggcccgtctacgctcggccaactcgtggccgctactggactggcgcgaccgaccgctcaccgtctggcgatcgccctggagcgccatcgttttgtgctgcgtgatcagcacggccgctttgtgctcggctcccgttttgccgaactggccgccgccgccggcgaggatcgattgctcactgccgctggcccgattctgcagaccctgctcgaccgcaccggcgaatccgcgcaaatctaccgccgccagggcgaccagcgtgtctgcattgccgccatcgagcgcgcttccggcttgcgtgactccatccccgtgggcgccatgctttcgatggaagctggctccgccgctcagattctgctggcctgggaggattccgaccgcctgcaccagggactgcgccacgccaagttcaccgccaccaagctggccgcagtgcgcaagcgcggttggtctgagtccgtgaacgaacgcgaagagggcgtgtgctcgatttccgcgccgatccgcaacgcttccggccaggtcatcgccgcgatttcgatttctggcccgaccggccgcatgggtgccgcccccggccgccgttacgcgccgctggtcatggctgccggcaagtacctcaccgaggctttggtcaaagcagttcgctagtcatcacatacattgcccccgctggcgggggcagttttgttatgcgctacctaaacaggccggacagttggctccatagcgacggcttgcgcagcaaatcatcaccctcgccctcgccaggcgcggtttggttcaccgcataggtgtaggcgcgtttggaactgggcttgcccaccagttcgccaaactccagcaattgcgtacgcggctcgtaagggtgacggatatcaaattcgatcaatcgcgtggcacgtttggccggagccggtccgtacgtattgaatccgcaggttggcgtagcgataagcaacagaccctcatgttcgccgacgaaaccgttgcgatgatcatgaccagctacgacgccgaaatacccctcgcgcagcgcctcaaactcgtccgactcatccgggcaggaaatgccttcccccagatacccaccggcttgagtgcgatcctcgtccagcacataataggtatccgcatgcttgcggtagccctgcatggcgaaagccgcattggcggccaccggtttgagtacctggtaatactccggcagcggcatgtgctggaacaccattgatttggctccgatatgttcgggcaaagccttgaggaaggccaatgtctcgggcgaaggcgtgccgaaaccgcctccatgcgcatagtcaccggaattcaccagtaccagtcccagtacgttgcgcgtgcaatccacatccatcaccggcaatgcaaaagtgccgggaatggtggacgcggaaatcggcgcatcggtttcttcaccattggttgccgcaggcgagccgtccttatgacacatatatacggtctgcttggccagcgcatcgctcggcggattgatgcaaccgggaaactcgcggtagattccgtcgagttcggcattgctcaaaccgcactggaaatcgtggttgccgtaggtcaccgcccacggtatgccccgtgacgccaaaggagaggtaaattgaccgatggccttgcgcaccaattcacgcgtatggttcaacgcagattcaggaatcgcctcttcgcaccaacggcgtttgcggaagctcttggcaaaggccggatcgtagccggcgatctggttgccggagaaaatcaccagatcaggccgtgtggcatcaaggctggcctcaatcagggcgatggtgtctttggagactttcggcccatcctgaatgtcggcaatctgcagcacgcggaacttgccggaatagtggaattgcagtcgtccgagacgcgcagagatagagaccgggcggccgtcttcggcatcggccggcttgatacggggtttcgacgacatcccctctggcgtacgctgtgtttccgtcatgccctccactgtacacacaaacgaaaaggcccgccggagcgggccttttctacaagttcaactactggagcagaatctctgcacaacatcatcgtcgtaacggtaagtctttccaatgcccgtccaacgtaacagtcctcgtgaccatacactatttgtgggctctgctctgttcagttgttcttgtacctcataatctattcatcactcccgtttctcgcaacctgcagggagtcgttgtgcgttttttatcacaactgttcaatcgcactttctggctatcggaaaacgagctgaaccgttcacatcgaacccgtctgatgttcggtttcgttcgtttcaccgccgctcacggcgtgtcgcgagcacgctagcacactcagaaccaaccaacaccgaactaacatgaacacccgttgaattctggcgcgttcagccgttttccggccacgccagagcttacgatataagctatggcacagatatttgacgcaccctcgaaggcaattctgcgcagccaaatcgcagagcatattgccgaaaacgacaacaacgaccgccgcgtcgatcaggaaggcgaggcaccgctgcccaaggaccgtttcttcgaccgcgagctcagctggctcaagttcaaccagcgcgtgctcgaatgcgcggagaacgaagacatgcccctgctcgagcgcgccaacttcgccgcgatcttcgcctcgaaccttgacgagttcttcatggtccgcgtcgccggcctgaagcgccgtatcgactcgggcatcgccgtgccgtctgccgccggcctgagcccgcgtcagcagctgcgcgcgatcagcgagaccgcacaccgtctgcaagacgagcacgcacattacgcgatcgacaccattctgccggaattggagaaggagcgcatcgtcctgctgacgtgggacaagctcacctcctccgagcaggagcgtctctcgcgctactaccgccagcaggtgttcccggtcctgacgccgctcgccgtggatccggcccacccgttcccctacatttccggcggttccatcaacctggccgtgattgtggagaacccggcctccggcaagtcgcacttcgcccgtgtcaagatcccgggcaacctgccgcgcctggtgccggtggacgacatgaccgacgaggagtccaaggacgagcgttacggcttcatcgccatggaaaagctcatcgccgcgcatctggaatccctgttcccgggcatgatcatcaaggaagcccgctccttccgcgtgactcgtaacgaggacatcgacgtggaagaggatgacgccgagaacctgctcaacgccatggagaaggagctgctgcgccgccgcttcggaccgccgatccgtctggagatcacggacaccactagcccgttcctctcccagctgctcgccgaccagctcggcgtgagccaggacgaggtataccgtctgcccagcccgctggacctgaccgtgctctttgagctcggcagcgtggaccgcccggacctgaagaaccgtccgttcgtgccgaccacgaaccgtcagatcgccgaggtcgagtcctcccgcgcacaggacattttcgccgccatccgcgagcgcgacatcctgctgcatcacccctatgactccttctccacttccgtgcaggccttccttgcgcaggccgccgcggacccgaaggtgctggccatcaagcagaccctgtaccgcaccagctccaactcgccgatcatcgacgccctgatcgacgccgctcatgccggcaagcaggtgctggctttggtggaaatcaaggctcgtttcgacgaggacgccaacatcgcgtgggcccgcaagctcgaacgcgccggcgtgcacgtggtgtacggcatcgtgggcttgaagacccactgcaagctcatcgaggtcgtgcgtcaggaagcggacggtctacgccgctactgccacgtaggcaccggtaactacaacccgaagaccgcgcgactgtacaccgatctgggtctgctgacctgcgacccggtggtcggccaggatctgactcgtctgttcaaccagctctccggttacgcgccaaagtccagcttccaccgtctgctggtggccccgcgcaccgtgcgcaccggtctaatccagcgcatccgccgcgaggaggacgccgcccgcgctggcaaggaggcctggatcaagatcaaggtcaactccatcgtggacgagaagaccatcgacgccttgtaccgtgcctctcaggccggcgtgaagatcgacatcgtcgaacgcggcatctgcgctctgaagcccggcgttcccggcctgtccgagaacatccgcgtacgttcgattctcggccgcttcctggagcactcccgcatctacgccttctgcaatgcggacggcccgcagatcggcgagggtccggcttccggcccggaggtctacatcggttcggctgacctcatgcaccgtaaccttgaccgccgtgtggaggctctggtgcgtgtcaccgccccggagcagattgacgggctcatcaagtacgtggacctgcagatggccgactccaccatgagctggcacatgcagcccgacggcac

SEQ ID NO: 3671 - DNA, 6001 bp, Unknown
  R85_18m  MAG No. k141_45748
catatcggtgtgattatggacggtaatggtcgttgggccaagcagcgcggcatggtccgcaccaatggtcatcaggccgccgaaccggtggtgttcgacactatcgccggtgccatcgaagccggtgtgcggtatttgagcctgtacacgttctccactgaaaactggaagcgttcgccccaggaagtgcgcttcctcatgggcttctcgcgtgaaatcatccaccgccgcgtggaacagatggacgagtggggtgtgcgcgtgcgttggtccggccgtcgccccaagctgtggaagtcggtgatcgacgagcttgaggccgccgaggagcgtaccaagaacaacaaggtcatcgatgtggtgttctgcatcaactatggtggccgtgctgaaatcgccgacgcctgcgccgccatcgctcgcgaagtgcgtgatggcaagatttccggcgaccgtgtgactgaaaagatgattgccgaccatctgtacaatccggacgttcccgattgcgacttggtgatccgtacttccggcgaacagcgcacctccaacttcctgccgtgggaggccgcctacgccgagctcgacttcgtgcccgaactcttcccggactgcggccgtgacgtgctatggcgctccatcgaccattacatccaccgcgatcgccgatttggcggcgtgaaataaagaacagccctgtggaccgttcgttcacgccgcctggccgaggccgataggacatgaccaggtaatgatgagtccggcgaagccggtccttgattgctgggggtgtgaaatagtccttgttaagcccctcaaaattgagggggctgagccgtaaaacaaacagcccgatgggctgtttgtaggcgaaggcgagacgagagtcgagccagaagaatgcgagcggcagcttgtccgtaattgcggtcgagctgtccgtgtagcggactgaggggagttaccggcacacctcagccatcctctctgcaaactcatccaaaaaacgtcccgaatccgcaccaagtgccacatgcacatgcggcatggaatgattcaccagcccaaccgggtctccggtggtccggcctcgtactccattgaaatcaccggtattggtctccgcgcgcaacgcaagatcaaaacaatcgaccagtgaagaatcaagtgcaaccgccgccgccaacggatcatgcaacggcatgccgccagagaacagtgcggggtcggcttccaaatttgccttgatggaaaagtccgcgagatcagccaagaaccgcccgcgcttggtccccgtcgcacgccactggtcggccgccgatcgcggtagcaaacactggtgagtcacatcaagtcccaccattgtgatgtctgcgccggaatgaaatacacgattcgcggcctcagggtcttggatgatattcgtctcggccaccgcatcccaacaattgccgggttgggtaagcgtaccgcccatcatcaccagcctgagtttcggtgcaatatccggtgcccgagtaatagccgcatccacatccgtcaacggcccggtagccagcacggtaacgtctcggccaaactcacgaacctgctcaatcagatactcaatcccatccgcagcatcaacggagcgcctccttttgccccagctggcgagagctgtcgatgtagccgactggggacggtccacaggccgagagcgacccacacgagaacaagaccccgacgccggatgagcatgagcgtcccctaccaaatacccgccaacagaaacaaccccatcgggcacatcctcagacatgtcatccccagacatatcatcaccaggcacaccagctccatcagccagagccccggcccctgccagccaagtattccccagtccatccttcccatgaaactgggcacaccctgcatcgggaataaacgcatcagcccaagaaggatgctcggagcccaaaaacaccggaatatccgcccggccaaacaaatcaagcaccgcgcaagtattggcataagccgtgttcgcatccacattgccataactggcgatcacaccgctcagctcgcactcatccgccgaccccaacaaatacgccaacgccaacgcatcatcaacaccggtatccatgctggcaataatgcggtcaggacgttgggccatggaatcgcctccttgttagcatgattcgctatgaataaccttatcggccgatacgcaaaaatgcgtcctttcctcatgggaaggacgcatttttgcgtagattcaaactcggaatatcggaaattacttgccgaggaattcgtcggtgccaaggtccttggcctgcggggcctcatgaatcaccttgtcatgactgtcagtgtaggcgtcttcttcagccaggaagtcgaagtattcctgagtgcccttgaagtcgttggtgccgagcacgaaagagccgtccttgatcttggccgggtcgccccagtactggccgtcgacgataacctgcatgctcttcttgacgaattcgggcttgaggttggcgtcaggggcttcgtccacgagaatctgcgcggcgtcatccgggttggcgtacgcgtactcgtaacccttctgagtggcctgagtgaacttcttgaccaggtcgggattgttcttgatggtcttgtcattggtgatgatgccgatggcgtcggcgttgccgggcacgccgtagtcaggctcggtgaagcagttgagcttcgggccgtacatgtcggcctgcacgccttcccacgtggcgtagaagccgccgaaatcggccttgccggattccatggtctggaaggtggaggtgccgacggtcaccttgtcgaactcgcccttgccgccgtcggtctggatcatgcggcgcaccacggcgtcggactcgttggagccgaaggtggcgaaggtcttgccatccaaatccttaggggacttgatggcggtgttggacgccagtgcgcaccaaatggcgctcggcttctgctgcacctgcagcacctgcttgatgtgagcgcccttcagcgtgtagatgcccacattggtcaagttggacagggcgaagtcggccacaccgttgttcacggcctgttcggcaccggcctgggccacggccacgatatccacgtcaagaccggcgtccttgaagtagcccttgttcttggccacgtacacgccgatgtggttggtatcgggcgcccaggaaagcatgaaagtgaccttcttgaggtcggaggtgttggagttggaggagtcggcggtgttggtctgaccacatgcggcgaaaccgaaagtcatagcaagggcgcccacgagggcagcggccttggatacaaggcttttcttcataatgatggttccctaattcgttgtctctctatcgttctctgggattgcttcgaacggaagtcggcagaaaacgatatggagggccttgatttccgttcgaccagcgcccccgacattccctatgaaagctcaagaaagccggtttgccacacgctggtaaagctgttccattatagagacagggctggagacctcatgagaagccgccccgttcagtcggttctggccgccggcttgtgtctttgacggtaaaaagaactactggtccgcgtcggggtcttcgtcatcgccggccgggccgagcaggatgcgctcgctggcgttcaccgccagcatcagtacgcatgtcatcaggataatgacgatggtggcggagaagatcagcggcgtgcggaacgaattgtaggcagcctgcagccagatgccgaggcccttgcgcgcgccaagatattcagcggtggatgccgtggcgaagatgtatgcggcagatacgcggataccgccatagatctgacgtgcggcaacgcgcagcttcacgtgccagagcgtccagaccggggtcgcgccgcaggtcaatgcgacgtcggaatagaactggggcaccgcttctagtccgcgcacggtctgcacggcgatggggaagaggccgaataccgccacgattacgattttgccggaaatctcaaagccgaaccaaatcaggaacaacggggcgatggaaatcagcggcatggtttgtgcggcggcaagcagcggatagaacgccgcgttgaacgtgtgcgagcagtacagtgcgatgccgatcataatgccgaagaacacggcgaacaggaagccgaccacgccctcatagccggtgatcgccgcggccgggccgagcgtgttccacgtttcgatggtggcggcgaaaatctcgcttggcgcggagatcatcgtgggggagacatgtcctagatccacccacgtttcccagactgccagcaatacgatgacggcgatgacggtgggcatgcggcgcttgaggcgcttggcgatggacatgggatgtcaccttgctttccgcgccagtccggtttgctggtggcgcttgcggccggggcgtggaacagtaaggtgaggagcctgcgcgcctgccggtcgtgtgatggattgtgttatatgccgtccatcagtataggcgaaggcgaacgacaggggcacacaaaaaacctccctctgtgagggaggtgagagagctactccagtccgatggacttcatgtggtggagcttcagggaatccaccttgagactaccggactcggcggcgagcttgatggcacgcggtccttcggaggcgtaggagtaggagctcagcacttggtggccaccgttgacgtagacctccacggagccgcgatccacgaacacgcgcaggtccagcttgccggaggccagttcggcgtcggtcagtggggcggcgcggtagccgtgatcgccgttggccatggcctggcgatccaccaccacgcggccgatctggtcgtcataagccacgtaggtgtaggcaccgtccttagtggcatgaatcttcaggcccgcacgctcggcagtggaggcggccaagtcgatggtcatttcgatttccacggcctcggcgtcatcggcgatgacctgctcgccatccatatcgagtgtgatcgaaccatggtcgagggtatcctcgcgcaggccttccatttcggcgaccggcgcggtgaccacgtcgccgtcatcgtcaagggtgatctcgcgcggcagggtgagctgaccacaccagccgtcatcctccatgggaatcggctgcacgaacgggctcatccagccatagacgatctgacggccgtccacattgaaggactgcggggcgtagtagttgtggccgcaatcccacaggcggaactcggtttccggcttgaattcgccgcccggctcccacgtgccgatcatgtagccggcgttgttgacgttgcggttcatgaagccgctgggcttggaccccatggcggagaagccaatgacccacttctcgttgccgtccttgtctttgatggggaagaagtcggggcattcgagcatgaacacatccggatccgggtgctggaagagcacgcgctcgtattcccagcggaccatgtccttggaggagaacagccacatctggccgcgcttgtccgcagaggagacaccgaaggtcatgtaccaggtgtcgccggtcttccagaccttcgggtcgcggtagtggtgatccaccttgtcggtcgggcagtcgatgatcatgccgcgcttggtggcgctggtcagctcgtcgttgtccggctcggcgagcatctgcacctgccagtcgccgccggtgttgtcgtggccgttggcccaacggtggccggtgtagtagaacttgagcttgccatcgtcgccgattactgcggaaccggagaatacgccgtccttctcctcttcaagggtcggggcgaacatgattggttcacgcttccagttgagcatgtcggtggaggagacgtgtccccagtgcatcggaccccactgggtgccgtacgggtgcagctggtagaacacgtgccagcggcccttatagaagcacaggccgttcggatcgttgatccaa

SEQ ID NO: 3672 - DNA, 3964 bp, Unknown
  R85_18m  MAG No. k141_45959
actgatctacctcgccggcctgcagaccatcgacaccgacatctacgaggccgccgcccacttcacccggctggaccagtaccgcgatctggaatccctcaatgcctaccatcagcgggtcgaggaagccaaagtgcagtccgcggaatcgatgatggccggcatcgccgcccgcggccgtgacaacgcgcgtacgccaatgcagtgggatggttccgcctatgcggggttcaccgcgccggacgccgccgtggagccgtggatttcggtgaaccggaatcatacccagatcaatgcggcgggcgaattcgacgatccggactccgtgtacacgttctacaagcggctgatcgccattcgccacgagaatgcgctggtggccgccggcgactgacagttgatcgatgcggacgaccagtacgtctacgcattcacccgcacgctcggcggcgagaagctgctggcggcggtcaacctgtccggacgaacggtcgatctgccgcgcgacgccgccgaactggtgcagcacggggtgaccgaaccggatatcgtgatttccacctacgacgcctcgcacgccgtggtctccctcgccaaccgtgagcttggcccctgggagggcgcggccgtccgcgtgtgagctagcgtatgttgttccagacttttttcgtccttgtctggggaaacgtacgcttacttcagctcggtgtatgttgttccggactgttttcgttcttgtctgaggtgccgtacgtttgcttcgtctcggcgtacgttgttccagatgatggggaaattggtctggggaaacgtacgccaagaggctggtgcctgcttggtgcctgcccggtgattgttaatgtccaacgtggaaagcccgcgcggctggcgggaagccacgccgcagggccgtcacgccccaaactgggcggccttgctgccaaatttgcggcgtacggcatccagtgcggcctcggcatcatgcaaacgtgcctgtgaggtctggccgcgggcattgtcggcctcttcgagcatgtcatccagtgaaggctgcacagccgtagccgccgcctcactgagcgaagacgtgctcataccggccaagcgaatagttttgggcaggggagtggcagactccgccgaggctggcagccccaacatgactttcagctgccgcacgcattcggggtacagcacgccggccgtatcggtcggccgctccatcgtaaaagaccgggtctgatagctcaggtcggcgaaccgcagcttcaccgtcagcgtgcgcgccaccagccccttgcgccgcagcgtgctggctacttcgtcgcaggccgaacgcagcagaccgcataccacgcgcatatcgcgcgtatcctcggccaaggtttcctcggacccaatggatttctcctcgcgcaccgtggtgattttgcgggaatccaacccgtgcgaggccgcccataatccacgtgccgcagccggggagccagtggcacgagtcaatgcagcctcatccagctgagccaattcagccaccgaatgcacgccccaagcattaagccgcttctccaaagacggcccgatgcccggaatgccacgcaatggcatcatctgcacgaactcagccgagcgggccgccggaatcagcagcatgccgtccggcttggcattggtcgaggccattttggccaccagtttgttgcaggcgatgcccaccgaacacgtcacgtggaagcgctcggccacctgagcgcgaatccacgcgccgatcgcgctcggccgcccccactccagcagtgcggcggacacatccatatagccctcgtccaccgaaacctgctcgaaccggtcggtgacggtcaaaaacacctcgtgcatgattcggtgcgacatcatgcggtaatacgccatatccaccggcagaaagacgccgttcgggcacaactgatgggcgcgcgcggccggcatcgccgaattgatgccgtatttccgggcttcatagctcgcggcggacaccaccgcgcgcggcccggtgccgatgatcaccggcttgcctttgagcccggggttgcgcgccacctccaatgaggcatagaaggcatccatgtcgatatgcagcacggtgcatccggtctcgtcgtggccccaatcgcgtttggcggcctcaagtctcggtgcggtgctcatgccaccattgtaggaatgccgaacgaggtcatgctcactatgtggcgcgcatggcgcggcgctcattgtcgtaatgccaaatatcgccggaattccaagggtttgcgcactgtgcggctgtttcgcatggtgggtgcgattccacggaatcgtccacattgcgtcactgtccgtaacgccttccaagtcgctgcgcgctgtcccgactctccgagtagcgtaaacctcgtgaagaaggcagtggtcggtatcctcaaccgtgttcccgtggtgcttatcgtgattggtgaggcactggtgatttatttggctacggccgtcgccaaacttgcgttcacccagctcgacccgctgtattcggtgtggtaccgcgtgggattcatggcggtgctgttgctgctgtggtgcaggccctggagcaaggctaagcgagcgcagctgtttcaccgcgatgcccgcggctgggggctggtcgtactgctcggctgctcgctggtgctgatgaataccctgttttatgtggccatcagcaatatggatatgggcattgccgtgtctatcgaatttttgggaccgctttcggtggcggtgattaccggcaaaagctggcgtgagcgggtcggtatcggcatcgcggcggtcggtgtggtgctgttggccggcatatcattggccaatccgtccggcaatggcacgtttttgtatggtctgattgcgattttgatcggcgggtcgatgtggggcatgtacatcatcaccggccggcgcgtggcggctggcggcaattcgctggataatctgtgcatcgccgtgaccatcggctggctggtccagtccctgttccttggcgtgccggctgtggctcatgtggttcaccccaaggccgatgccacgtgggcgcttgagcccggcggatcgctgaagctgctggctctgctgtttgtgatttccctgatggcctcgttcattccctatgtggtggagcagatcacgctgcgacgcaccacatccggcgcattttcggtaatgcaatccatcaatcccgccatggcggtggccgtgggactggcgtttggcgagattcccagcgttggtgaaatcatcggtgtggcgttggtgatttgcgcggttatcgttacgttctccggcgatgccgcgcccgcggacggtcaataatgtgtcgttcggcacgccgtatccgcaggacgtggtacagtaatttgctgttgcgcattattgcgtaacgtggagtcatgcctgagtggccgataggggcaccctgctaaggtgttagtcgtgtaaacggctcgagggttcgaatccctctgactccgcaagtagacccggacatcattgggaaactgatgattccgggttttgttattaagagctggccgttgatgatgtgttgaacaaagcacatgaacgcgaaccgtgggatgccgccatcagagtagcggagccggaggtacgccattgtccgtccgcctccgtgagccattctaccggcatttggggagcggcgcgtcataaagaatacggcatatgacaaggtttttcccgaatattgaagcaatgccgcccttggacggtactctgatagtgagtacagagagtcgcggaatggggaagctatgagccatatcagcggtcaagggcagcatcgttcaatgtcgtcgaacggcaatcacatcgcgttgattgtggcgttcgttgtcgctttggctgtggctttggggctgggagtatggttcgctgccatgcataacgactcaac

SEQ ID NO: 3673 - DNA, 5694 bp, Unknown
  R85_18m  MAG No. k141_48106
caaggtcatcaagctgctcgccgtggtcgagaacggcgaggccggcgtctccgcccgcgtctacccggccctgatcgacgagaaccacccgctggcctccgtgcacggctccttcaacgccgtgttcgtcaaggccgaggccgccgacgacctcatgttctacggccgtggcgccggcggcgctccgaccgcctccgccgttgtgggcgacgtggtgaccgaagcccgccacattgccgctggctgcaccggcccgtccatcccgctgtacaagaatctgccgaaggctccgattaccgcctccaaggctgcattcgccgtgcgcttcctgatccacgacaagccgggcgtgctggccgccatcgccgccgagttcgccaagaacggtgtctccatcaacggtgtgaaccaggatctgaagcccaccatgaccgaccccggctacgacggcgagattcagcagttgcgcatcgtgacccacctgaccgacgaggaaaccctgcgcaacaccgtcaaggccgtgcaggcgctcgacttcgtcaccggtgacccgtccatcctgcgcgtgctggactgacaccgtctaggctccctctgatgaggcggtcgaacggctgcccgtgagttgaaagctgaatacccaagctcccctgacaaggggagctcctttttaaggaacaaccatgaacccaatctgcaatagcgttcacgtgcgcgtgcccgccacgtccgccaacctcggctccggcttcgataccgtgggtctggcgctcgactaccatgacgagctcactttcacgctcaacgacgacccgaacgacggcattgcccacgtgatcatccacggcgagggtgccgacaccctcccacgcgacgaaacccacctcgtggtctccaccttccgccgtgcctgtgccacgttcggcctcggccgactcggcttcacgctggaagcgaccaacaacatccctcaggctcgtggcatgggctcttccgccgaggccatcgtggccggcatcgccgccgccgcggccttcgcccagaccggtgacctcaaccgtccggccatcttcgatatggccgcccagatcgaaggccacccggacaatgtggccccggctgtgttcggtggcctgaccgtctcttgggacttcgaaaccgcggaaggcgtcggctcggtcgccgttcctggtggtgaaccgctgcacggcggattccacgccgtcaactacccggtggacccgtccatcaccgccgccgtgttcgtgcccgactatgagctgtccactgagaaggcccgtcaggcgctgcctagggaactgccatacaaggacgccgtctacaacgtgtctcgcgtgggtctgctgcccgctgcgatgaatcccatggtgctggcccaggccgcccagcagggcaagtccggcgtcgccgctgccccggctcaggatgccgatacgtgcgcttgcgctggcggaacccgtgaatcgccgttcgctgacgagcttgcggccgctcaggcccagtccaacgcgctactgttcaccgccacgcaggacaagttgcaccagccgtatcgcggtaccctgatgccgccgtccaccgagctcattgcgctcttccgctccaagggctatgccgccgccgtctccggtgccggcccctgcgtgctcgtgctgcactacggcaacgcccgcgaagccatcgaccagatcgcatcggagcagcttgcttccggccactggcgtgtgcttcacctgcccatcaacaccgccggcgtcgaaatcgagcgtcgctaagtcgaggagaaggctcccgctggcgggagctggccgccgcaggcggtctgagagtggtccgccataccggcagagaccaccctcagtctcacttcgttcgacagctcccgccagcgggagcataaggacttaagtcatgtccattccgctaattcttgcttccaagtccaagcctcgccgtgacgtgctgtattcggcgggtatctgccccacaattcgcgtctcgcacgtggatgagcctgctgcgctggaagcggccgcccgtgaggaaggtgtcaccgtcgacgatttgagcatcaagcagcgtgtgatgattcttgccgcagccaaggccgaggccgttcaccgtgcgtatcgcgatgcggccaatactgccgccgccgcaaccggcgatcgcgtgattgcctacccgctcaaggccaaggaaatcaaggattcggaacgcgaagccgtcgtcgaagacctgcgcaaagccgccgctggccggcccatcgactattccaaggcggaagtcgccaccacgcgcgacttctccggcatcgacatgccgaccatcaccgaacccatcgccaccgctattgccggacagccgggactgaccgaggcgacagtcggcccgctgattctcggctgtgattcgatgttcctcctggacggcgaatgctacggcaagccgcacagcgaagccgtggcccgcgaacgactgaagcgcatgagcggcgcgaccggtgaactctggaccggccactgcctgatcgatttcgcgaccggacgtaccgtgcgcggcgcaagccacgccaaagtccatttcggcgaattcaccgatgacgacatcgaacggtacatcgtcaccggcgagccgctggaagtcgccggatcgttcacgctggaaggcttcggcggcgcgttcatcgacagcatcgagggcgatccgcacggtatcatcggcctcagcctgccgctggcccggcatctggccggcgaactgggcatcacgtggaccgacctgtggaatgtcggccgtggcgaactggagccggaaagcaaggcctcgggcaaccagcacgctggcattctgccgccggtcgaaaacgtgcatcagcccggcgatggctgggtggactgcgcctgcggccgcaagcattggggcaccaacggtgcgtccggcattctgctggctcgccgcgacccggcgagcggcaaggtgactcacgtggtcatgcagcaccgtgccgcgtggagcgccgaaggtggcacgtggggtatccccggcggtgccactgcggacggcgaatcgtccatcgaaggcgcgctgcgcgaaagctacgaggaagccaacatcacccccgaagacatcgaggtggtcggctcctaccgcgaggaccatggcccgtgggcctacaccaccgtgtttgcctttgaaaagcccggccacaccgtcgagcccaaggcaaacgacgacgaaagcatggaaatctgctgggtcccgattgacgacgtgcccaaccgcaagctcctcaccgctatgaagaccgactggccccgcttcgccgcccgcctggacgagctggcctgtgctggacatcggtagtggtgttggctgggccaatgttttgccgatgagtttacttgggtaatgcgtgtgaaccgcgtgtggaccgggacggattctgctgtcccggttcgtcatttcgtctcttttgggacaaccgggacagatttcgctgtcccggttcgtcatttcgtctcttttgggacaaccgggacagaatctcattcacctgacgccctatcgtgcgatggtcgccgtcggggaatggcggaattccggggttttggatttgcatatatcgggtgttcatggaagggcctgtcccggttcgccaaaagaggccgaaatcccgaaccgggacagccgaatctgtcccggttcgtatgtcgatcgattgaccccgccaccgggacatcaaccgcgcatagacaggacgcttcaatgtctggcgggcatgaccatatcggatgacacacgttccctcgtgcgtttcgccacgacctccgccccaagtcagtgcgaaaatggcatttttagcggtgtggtcagctgtcgcatgcggaaaatcctaaatcaaccgccgaagagacacatcgccgactcggcggaactcgctggtctgcgcgcaatgaggagtgttgtgtctgaatgcgattcagacaatggtcggcgtcaaatagcggtctccagccattaatcattggtgattgtggacattgagcggagtaaacattctagatgattcagggatatgccgaaaatcatatcgttcagagaatgaaataccgcatctcggagtaactgactgtcgacgtgcatggtttgaaatctgatatccaccacgcccatcatgcctagcaaaattacgggaatggggttcggactatttcgcctcagccaaccgggagcttccgaatgctcaatgctgtatgcacttagtgtgtggaaaccagccaatcattgaccaatggcaggccgcagtcgaaaccagaaatatcctcgctcgcagtcaggtgccgaggctcagtgaagttggtcacgtccatatgggatcacgctccaacaattcattcagacgtaggcccataggttcgtttaatgctgcggtgaaatcattccacgctttactgttgagccgaatgatatgagcttcatggatgtcccgatctgcggcggcgagcagattcgataatgcccattgcaacgaagtcatgcctttggactcggccgcttggtcgattctggaacgttgctcttaggtgagtctcatttcaaaacgactgttcttgttattctctgtagtcatactcctgttgtacgacttttgtacggacacgattggtgtgtgcgggatgtcgattgcgatggccatgtgggctcctttgcttggtctgttgtggttccagcttccgaaccggtcttccactgttcctcgtcttctcgagcaatgaacatctgatatatggattgtcgcgtcgactgcgtatctctaatccttgcggatgaggagcgggccggtgatccagaaaggttcataccgcagcccgatggtcggctgggcgttcgctccgtacgctcgggagtatgaacacagcagcatcgcaattgcagcagcctcagccggcgtcgggaccggcggctcagcctcagcagtctcagcaaccccaacagttccagcagccggcatcgcacacccagcagtgggccccggtcatcgaggcgcacgacctggtcatggactacaccgccagcatggcccgcgcacaggcagggcacggcgtcaccggcgtgatgccagccggcacgggagccggttatgcgtcggcgaatcccgctgcggccggaccgggtgccattcaggccggccagccagcccagcccggcttcgccatgccgaccatgcacacgctcgccctgaaccacgtgaacttcacgctccgggagggtgaaacagtagccgtgatgggcccgtccggctccggcaaatccactttgcttcacgcgttggccggcattatcaagccgactgccggcacggtcgtcttccgtggcactgacctgagccatatgagcgacgccgaccgcaccaaactgcgtcgtaatgtcttcggattcgtcttccaatccggccaactgctgcccgaacttccggccgtcgaaaacatcgccctgccaatgatgctcgacggcgtgccctaccgcaccgccacggacacggcgattctgtggctggaacgtatgggtttgcgcgcactcgccatgcaccgaccgggggagatgagcggcggccagatgcagcgcatcgccatcgcccgcgcccttgccgtcaaacctgccgtggtcttc

SEQ ID NO: 3674 - DNA, 8843 bp, Unknown
  R85_18m  MAG No. k141_45828
caagatcggcgaatggctgggccgcaccatggccgccgtttccgccgtgcttgacccggacctgttcgtgatcggcggcggcgtggtggccgtgggcgacatcctgctggagccggcccgctacaactaccagcgtttcctagaaggcagcgcctaccgcggccatgccaagatcgtcgcggccactgcgggccaggatgccggtctgatcggcgcggccaacctggctctgcgctgacgatgtcgctccggcaacgggacgttagtctaatggtgagtcatggccggtgccatggctcactgccgcgctgatagtgcggtcgatgagtttccgctgcctgaccatggaatcgaattccgggttctcagcgatttcctcgtactcgtgttcggtggtcacgccggcgatttcggcgataatctcctcataggacgtttcgacggttcgatgcacgccggtgacgtgcccctgacgtatcacgacaatgcggtcggataccgcgaacacatccggcagatcgtggcagaccatcaccacggaccggccttcggagcgcagtctcttgatatatgcgagcacttccgccgactgcatcaccgacagtgcggcggtcggttcgtccagcagaataagctgcgggtcattgagcagcgtgcgtgctatggccacggtctggcgctggccgacggataaggatgcgataggggagccgacccgaatcgccgagctcagggtcttcagcacggaacgggcacgcgagttcatcgaatcgtcatcgcgtatgccaatctgattgatctccttgccgaggaacaggttcgaggccacgtccaggttgtcgcagaactcctgcccctggaacaccgatgcgatgcccatgcggtccgcctccctgatcgagggaatggtcacctgttcgccgttgagatagatatggccgaatcccggctgcagaaatcccgcgatgaccttgatcagagtggactttcctgcgccgttatcgcccacgatggcgacgacctcctggcgttggatggacagattcaccgatttcaacgcctcgacgaagccgaacttcacacagatgtcctccagccgcagcagaggaggtgtgctcgaattcctcatggtgtgttccttcttctcactcttctcctggtaccggtcactggctgacgtcattgcgaaccgagaactcgatggcgcataatgcgccgcctagcgcgcagttgtcgttcgggtgggatgacacgagtacatcgatgggtgccacggcatcagggaacagcatgcgctgcaacgcttcattgaacggttggatgaatacgtcgccggtcatggccagcttgccgccgagcacaatgacctccggatccacgctgatgcacagatcagccgccacctgaccgatacgcacggccgtgtcggcgatgatgcgacggcaaccggggtcgccttcgttggcaaaggacaccagatcatccagcgtcatattgccgtgtgtgacgctgagcaactgcaccagcctgttttccgccacgacggtgtcaaggcagccgcggttaccgcacgaacagatggcacccagcgggtcgacctggatatggccgatttcaccggccaggccggtcacgccatgcatgatttcgccgttgatgacgatgcctgcgccaaccccgtcgttggctgagatatatacgaaattgcgtttgcctgccgccacgcccatacgggattcgccgtatgccgcgaaattcgcgtcattatcgacgtatacgggaacgttgaacgccgtgcgcaacggggccgtgatatcgacgccgtcccatccgggcagaatgccgggaatcgctatggtgtggtcgctggtggccaccggtgcggccacggccacgccgatgccgaccagctcgctggcttcggcgtcgatgctgctcagggtctcattgatgagcagcatggcgcgttccagcgttgtgtccgccttgtggcccaacggcagggggagcgtgtgctcagcgatgattgacttcgagaagtcaacgatagaaagcgtaagatgacgtcgcgcgatccaaagcccgacgccgaggccctgatgccgtgcaagggtcaccagagtggctctgcgaccgttgcgaacggtgtttttggtctccagctggtcttcgtcgacaagctgatggacgagcgtggacacggtcgcagtggacagtcctgtcacctctgccagttcgacctgtgtcatggcgccgaacttgtggatgctggccagcaagttggcgcggtttgcctcgcgaagcgaggtctgcgaaccgaaaagccttgttgccataagagttcagtgtagtcgttaccggcatgaggcacagcgaggcgcagagcgtggatttttcggcgtgtcgccttgtgatgcgcaaaaaatcgccattgcgttcattggttgaacataaacgacaggaaattcgctttcttgagtttgacaacttaattcaatacggtattctatgagatgaacctgaggttattctcaggttcgggcgaccaaggagggttcgccatcccctcgaagatgaaggagaacaaatgaagttcactaagaagatcgtcgccgtggtggcaggcgttgccatgtgcgcgggcctcgcggcctgcggtggcagccgtagcggccaggcaactggcggtgatgccaagatcgaaaagggcgccactatcggcatttcgatgccgaccaagtccgaagagcgttggaacaaggacggcaacaacctgaaggccaagctggagaaggccggatacaaggtcatcctgtccttcgccgacgataagccggcccagcagaacgctgacatcgagaacatggtcaacaacgacgccaagatcgtcgtggtcgcttccaaggacggcaccgcagtgggccccgccgttgagaaggcccgcgatgcaggcgccaaggtcatcgcctacgatcgactgatcatgaacaccgacgccgtcgactactacgccaccttccagctggagcaggtcggcgtgctcgaggccacgtggctcattgaccagctcaagcttaaggatggcgccaccggcccgttcaatatcgagctgttcaccggttccccggatgacaacaacgccaagtacttcttcaagggcgcttgggatctgctgcagccgtacttcgagaagggcgtgctcgtctccccgtcccagcacggtcagggtggcgtgaccaaggacttcaccgttgaggattggcagaagatctccgtgatgagctggaagaccgagcaggcgcagaaggacatggaatccatccttgactccacctacgcccacggcgagaagctcgacgcggtcctcactccgtacgacggcatcgcccagggtgtgatcaacgccatcgaatccaagcgtcccgacatgaagccgggcaccgactcctggccgtacatcaccggtcaggacgccatggagatcgcagttgccaacatcgccaaggataagcagggcgagaccgtgttcaaggacgtgaacaagctggctgacgccgtgtacgacatggtcgtcgagatcgccgagggcaaggaagtctccggcctgaacggcaagttcaacaacaacaacatcgacgtcccgtccaagctgcttgacccccagaacatcaccaaggacaacctccaggatctggtcacggccaactacatcacccaggatcgcttcgacgagctgactaagtagtcctcatcaggcaatccgtaaacaaacacaatgacatgcggcgcatagccgatatgcgccgcatgtccatgaacacagaactgtgacgaggagtgatgacatgtcatcaaatgacaccatcttgacgatggaaaacatcacgaagacgttcggtccggtcaaagccctcaccgatgtgaatctttccgtcgatcgcggcgagatccacgccatctgcggcgagaacggtgcaggcaaatcgaccctgatgaacgtgctttcgggtgtgtacccatacggtagctattccggcaaaatcacctttgatggcaaggaatgcaaataccatactattaatgattccgaggccgacggcatcgtaatcattcatcaggaactggcgttgagcccgttcctgtccattgcggagaacatcttcatcggcaacgagcaggccaagggtggcgtgatcgactgggacaagacccgcgccgaggcgaagaagctgctcgatcgtgtgggacttcccgaagacccggataccagggttatggacatcggcgtcggcaagcagcagctcgtcgaaatcgccaaggcattgtccaaggacgtgaagctgctcatcctcgatgagccgaccgctgcactgaacgatgaggattccgcccacctgcttgacctggttcgtcagctacgtgacgagcagggcgtgaccagcatcatcatcactcataaactcaacgaggtcgccgccattgccgacaatgtcaccatcattcgagacggttcgaccgtcggtgtgatgtacgtgacgccggagacgccgctcgaccaggaagaactcatccgcaagatggtgggtcgtccgctgcacaacctgtacccgaaccacccctccaataccccgggcgaggaatacctgcgcgtcgaggattggaccgtgcatcatccgctcgacgcggagcgcgtgatcgtagaccatgcgaacatcaacgtgcacgccggcgagatcgtcggtctggcgggtctgatgggtgcgggtcgtaccgaaatggccatgtccatcttcggccactcttacggttccaacatctccggcaaggtgttcgtcaagggcaaggaagtcaagatgcccaacgtgcagtccgcgattgacgcaggtctcgcctacgccaccgaggatcgtaagggcaacggtctgaacctgctgcagaacatccgagagaacgcatccctggcctccctgaccaagatcagcaagggcggggttgtggacgacaaccttgagcgcaaggaagtcgaacagtaccgcaaggacttcaacatcaagtgtcatgacatcgatgtgaatgtctccaccctctccggtggtaaccagcagaaagtgctgctcgccaagtgggttatctcgcagccggacatcctcatcctcgatgagccgacccgaggcatcgacgtcggcgccaagtatgagatctacgaaatcatcgataagcttgccgatgcaggcaaggccgtcatcgtgatttcctccgagctgcctgagctcatcggtatctgcgaccgcatttacacggtgtcctacggtgtcgtcaccgacaatgtcgagaagaatggatttacccaggaatacctgatgaagggtatgaccaaggaaagggaggtggcagcctgatgagcgccgcaactgcaacacctgcaaagaaagaagaaaagaccggcctgctggccacggtcgccaacaatgcccgtcaatacggtattgtcggcgcactgctgatcatcgtcgtggccttcgagatcctgaccggaggtgtgctgctgaagccgaactccttcgtgtccctgatccagcagaacgcctacgtgatcatcctggccattggtatggtgatggtcatcatcgccacccacatcgacctttcggttggttccttggtagccttcatcggtggtgtgtgtgcactgctgatggaacgcgccggagtcaactggatgctcgccatcgtcatcgctctggtcgtcggcctgatcgtcggcgtctggcagggcttctgggtcgccgtcatcggcatcccgggcttcattaccactctggccggcatgttgatcttccgtggtctcgccaccgtgatcgtcggcgaatccgtgccgattacctccctcgaattccgtggcattgcccgtaactacctgcccaacatccttggctggtggggtccgttcgacggtctgaccattgtgctcggcatcctgtgcattgtcggctttgcctggagccagctgcgcaagcgcgcccgtgtggccaaggtcggcctggtgcccgagccgatgagcctgaccgtcctcaagattgtgcttgtcgcggtcgtcatcgccttcgtcacctacctgctggcttcctccggtaacgctgatcagggtggtaccccgatcatgctggtgatcgtcggtgtgctggtcttcatctacaacttcatcctgaccaagaccgtgttcggtcgccacgtgtacgccgttggtggcaaccgcaaggccgccatcctctccggtatcaacacccgccgcgtggacttcctgctgttcgtccacatgggcttcctgtccgcagtggccgctgtctgcatgctttcccgtctggcttccgcaactgctcaggccggtatggagttcgagatggacgccatcgctgcctgcttcatcggtggcacggccgtcaccggtggtattggtaccatcccgggcgctgtgattggtgcattcgtgatgggtgttatcaaccagggtctgtcgattatgggtgttgacaccgccgtggtgaagaccatcaagggcctcgtgctcctgctggccgtcgccgtggacatcatatccaagcgcaagaagagctgaccttcccctttctcctcctcgatgtgggattcgtgccggtgccgctggtgcggatcccacactgttatctgccgtcattcttgtaatcaaaggactttttccgccatgaaactcaccgcgcgctccacctcccgtatgtatgcattgacctgcttggcctgcgttatctggctctggcagtcactggtcgaggccaataacgatggctcgctgttcaattgggccactattgtcttctcgctgtgcttgctagtggtcatcggatggagtggttggaatgccgtcaccgggtggaacgccaaggagactgaggccgccacggcgggtgccaaggatgatgagggcagcactgattggtaacgtatatacggctgttgttgccgggaacatataggtcccggcaaacctgcagcgatatgtgcattgcaagccagggatccccctggcttttttatgccgaaacggaactcgacacgggcgcgcaggtcgttgggtttgtctagagcctgcatatagttacttatggtaatgactattagtaactaattggaggttgggccagcgatgtgcgattcccgaaccgataccaagaccggcttgcttccggtgaatgaggtgcggagcctcctggatgtctgctggaaggccaagaccatcaccgaactgatgccggcattgccgaaaggtatgaaaccgcgctatgtccacgtgatcgacgccgtctggcatatcaacgaaccgaatgggcaagataccggcaccgcgcgcgtgggcgacgtcagcgcattcctcggcgtcactacgccgagcatcaccaagctcgtcggcgaaatggccgacctcggactcgtcgtcaaacacgccgatgccgccgatcggcgtgcagtgacgctcacgctcaccgaacgcggcttggatatccgccgcatctatgtggaggaatatcacgcgcatttgagccaactgctgggcggattgacctcggaccagtgcgaaaccacggtacgcaccttgaccgaggctctgcgactcatgcaggaagacttccaacgtcgtagtcagaatatctgaatgaatggaggagagaacaagatcgtgactcattccgcaacacagctgcctaacggcggcaagcaaccggtctccaacaaactcgtcatcgcggtcgtctcgctcgcgatcctgaccttcctcggcatcctatcggaaacgtcactgaacatcgcctactccacgccgatggaggagttctccatcggcgcctcggtggtgcagtggcttgtcaccggttatctgctcttgctgtcggtgtcgattccgagctcgccgttcatggtgcgcaaattcgccaccaaaacactgttcatcatggccatcgtgattttcaccgccggcacattactgggcgcgctcgcggtcaacttcccgatgctgctcgccgcccgactggtcatgtcgctcggtaccggcatctccctgccgcttatcaccaacatccactggcacgaagaagcgtgattccaacatgcaacgccctattatgacttcgcggtcgtttttgcgcacgccgtctgaagcggctgggcccggcgacgaggcaactattcaggacctcgtggatacgttggaggccaaccgttcacggtgcgtgggcatggccgccaacatgatcggcgtgagcaagcgcatcatcgtcttcgtggacgaagatctcggtggccgtatcacggtgatgctcaaccccgtgatcaccgcttcggatggtgccttcgacacccaggaaggctgtttgtcgctgaccggtgaacgccgcacactgcgctgccgccgtatcgaggtcaactacgaggaccgtcggttccgcgcccgccacgccaccttcaccggctggaccgcgcagatcatccaacacgaagtcgatcactgcaacggcatcgtcatctgattcattcggtgctcgttgcagcccaccccccccgaggctggtcatcgcgattacgatgcaattacatcgcaaccgctatgaccagttttttttatgtgcactggtggggtgggtgttctcagcggtgttggggtgccatgcgctggccggttggcttcgctggaggttctaagcgtcggtgatgtgccaaagagtggcgggctggcttcgctaaggagcgttaccgtcggtggagaaccagtgcgtgacctgctgccgacgctaagcgttcattaagcgtcg

SEQ ID NO: 3675 - DNA, 2506 bp, Unknown
  R85_18m  MAG No. k141_48838
cgaccagttctgcacggtggtgtagcgcacgcgagcgtgcttctcgacaatgatctccacgatggcggcgtgcagtgaatcctcggaccaaatcggagcggtgcagccttccacgtagtgcacgtaggagccttcgtcggcaatgatcagcgtacgttcgaactgacccatggccggggtgttgatgcggaagtaggcctgcagcgggatgtccacatgcacacccttcggcacatacacgaacgagccaccggaccatgcagcagtgttcaacgcaccgaatttgttgtcttccggaggtaccacggtgccgaaatacttcttgacgagttcggggtattcacgcactgcggtatcggtgtcgacgaagattacgccctgctttttcaggtcctcgcgaatcgagttgtaaatcacctcggattcgtactgggcagcgacgccggagaccagacggttcttctcggcttcggggatgccgagtcggtcgtaggtggaacgaatgtcatcgggcaggtcgtcccagcttttagcctgcttctcgatcggcttgacgtaatacttgaaatcatcggcattgaaaccagacaaatccacaccccaatcgggcatgggcttgtcgaggaacgccttgaaaccgcgcagacgcatgtcgagcatccattgcggctcgcccttgtcggcgctgatggcgcgcacgacgttttcgtctatgcctcgttttgcggcttcgccggcggcgtcggaatcatgccagccgtagctgtaatcgccgaactggctgatgatctcgtcatcctgcttgatcttgtcctcgttgacgcgagtacgatcggccacatactggctcatctccacgtcagcggcggcgtttggtgctgtgttttcggtcaccatcctgccttccttgtttcacacatggtcctacgtaaacctaacagaacccaggctgaaacactaccaacccgactgaatattggctgtgcgcatacgtgatgtatcgcacacgtgcacagctatggcaagagcccgtccgcagacgggctccgaagtcgattcatatgcgattgtacggctacagctgcacgtgcacggtagtgccgttcaggcaccagtcatagaaccagtcggacacatcccaaccgatgcccacgcaaccgtgggagatgttgttcatgttggcgatggtggcgtcgctggtgaagctcgacttggcgatacggtgaatggcgcaaccatccttggagaagtagttgacgtcacccacacccttgacgctccagtgactgaccgagccgtcggacagggtcacgttgccactcatgtcctgtgtggggtacttgagccagaccttgaagtcgccggtcggcgtgcacaggtcaccctggcatacaccggtggtgcggttgttgtcctggcccacggaagcatggaaagtcttgatctcctgatcattctcgtacacgtgtaccagacgatcagagaggtctacgaccacatgccgcttggtggccttggtctgcatcgggtcaaccgtaccgtcaagagtgactgccccgttgcccttggccagcgcttcgacggcctgctgtccaacgttcgagtcggtgccatcggcaagggtgactccgtcatgaccttccttgatgacctgcaattcgtcgccgtcattgttgacgatgacttcgcggtcctcatgatcggtcttcagattggccttgatggcgtcgttgtaatactgctgcagcttgccagcgtcgaacaccacataaccgtttcgggtctggccatcggtcagcttcgcgttctcgttcgcgttgatgctcatagccgcggcaagtgcgggtgcgttgatggcggcaatctgatgatcttggaccttgatggccacagggttctgcagcaaggtgtccagcgtggactttgcctggttggcgatatcgtccgtcaccaccggattggtggccttcaggctgacgttgacggtcttcggctcatatgagccaagagactgcaccgactttactgctgcatcggccacgggagcgacatcagcaccctcaccttgggcgccggcgacaacatcgaaaccggtctggtcaccgttcaattgcacagctgcatctaccggcttgacttcgttgacgccgagcttctggttgagcgtatcggagactgcggcaccagcattggccggggcggtggtcacgtccttcttcacccagaatgcgtaacgctgccagaaagcgtcgccgcgcttggcgttcaccacttcggatgcaagggcatccgagtcgacgctgagacccagatccttgaatgaaatcttggcggtcttgccatcataagacaccggaatggcggtgctgttcaccgtgtcatcaatggtggcagcgatttgggactggctgcgccccatcatggggttgccccacagagtcgttcccggcaaggcgtgggactggaagaaccagaagcctccgcccaagccggcacccagcactac

SEQ ID NO: 3676 - DNA, 3911 bp, Unknown
  R85_18m  MAG No. k141_49006
accttggtggcttcggtatcaggggtgatggcaaaaccttcggtgttctgcgtacggatttcatccggagtgtcggtcagcttggtcagctgcagcacaccgttcttgaattcgtaggtgccgattttggcaccggtgttcgcgtcattgtcgctttgggcgagcagctggttgtgctcggcgtcccaagtcagatcgcgcgggccatcatagccggcgttcaccgcggactgcggcaggtcgatgtcggccaccggatgcaccaggtcctcatcattcacggtttgcagtgcgaaggcgtagatatggccggttttctccagtgcggcgaagaacagaccgccgaaatcattgccgaaaccgtccgggtcgtaggtcattacgttcttcgggtcaaggttggactggaatccgttggcggtcaggaccgagtcgggaataaaggctatgccttccaccccaagattggcgtccgctccgtggcccagcgtcacgccgaactgtgtgagtgctgtgatgagattccactcgtgcgtagcggtcagctcttgcgctccgtcgccgttggcgtcggcggttttctcggtcacgtcatactgcaggatggaaggccgcggcacattcttgttttcgttgtcgcgctcggcgccgatgaatatgcccttggatgaatctccgttgatcagcgtgatgccttcggagtccacaccgcccttgccgtccttgaagtgcagctgcttgccgcccttggtctgaccgttgttggtgaaggtccagccatcagtgggatcctgctgccatgtgccgttctggtagacgaacttgttgatggagccagggcccttatcagcggtgttgccgagcgtggggttcagatcgttgtcggccgcccacagcacgccttgcttgccgtctttaccggcttcatacaccaaaccagacagattgccgtcagtgtggtcgccgccttgtcctttggcgccaaattcgccttcggcatccactgtggtcacatcggccaatcccgaccatgcgtccacggtcatggtctcgccggcgggcggagtcggagtcgggtcatcgaacacgttctgtgcaccgggcgtgggcgtatcggaaagcgcgaaagtgccatcgtccttacgggaccacgactgactgtcgctcatcttcttcacgccggttgtatcggtattccatgacgtggaatccaccacatcgctatcggtaaagtcgccgctggtagtggtcagataggcttcgtcggcatcggaacccaggccgggctcggccttgtcggggtcgatgtatgccaccagatatccgccggctttgatgacggtgtccgtattcgttacttcgctggtgccgatggtgtagtgcttcttggctttcttgccgctgtcgtagatgccccagcccttcacgtcaacgtctgtggagccggtgttcttgagctcgacccaatcgcaacgcttgctatccgggtctccggcagctttcgtattgccggcatagacctcgttgatgattacggatggtttggcagccgtgttctgttcggcagtggcctgctgctcgtccgcagccgcagcgggcacgccgatcagggcgatgctgctcagtgtcaccgcagcggtgagcagcgcgatggcgcgccgcgacatcgcggtgaaattgttggtgtggaacattactcccgttccttcctcgggttgtgccgccgcagcatgatgctcttcggcggatgacaccccgagagtatgagagagaaatgaagccgacaccgtatgaaggcaaactcggcagatctccaaactgaactttggctgaattactgctgaagctggttcttggatttgcgtcgaaccgtccgtattccgccgacaatcgcgattacagcggtaccgatggctacgctgatcaacgccggtcgttgcgcggcatggagggtggcgagatccggcccggccgcaatggcgctgttttcacccgccgagctatccgacgccggatgattgcccgcgtcggcgtactgggcattgaccacactcgggccggcaagcgccacctggtcggcggtctcgaccttggccacatcgccgtgcttatccaaggtgacgcgggcgcacagggctttggcccagttgatacgctgccagccgtcgctcgattgccatagggggtatccggaatccaaggcagtggctttcaaaatcgcgttgcgctgatcggcgtgcagttcgggataggccagtcgcagcacgtccgccgccccgcgcggtgccacgaaatcagcgccggactgggcggtgtcttgcgggaaggtgtaggtcaggcgtgcggtgtagacgcgcacggccgaggcctggtccgcgaccggctcggtggccaccgggtccagaaaatcgttggtgtagccgcccgaaccggaggccttggtgttggcgatgcaggcggcgagggtagtgccgtggccgtccgcggcgcagcgggacaccagatagtcccgcagctgccgggacgcgggcacgatggacgaagcgaattcgttatgccagtactgcccgttctgggcggatgcgccaatgcgcccgcccatgatgtcaagcggataatgcacgccgagcacgatgcggttgttgccggcctccgaagtgcgggccatgatttgcggcgcgagttcgggaatcatgccggccagcgcgataccccacgaataggcgccggtagtgtggccggaggggtaggaactgtttttctgcaagttcgagtagccgggcacgtgttcgagccatgagggtgattgcttgatgtcaagcgtggcgggcagtccggcgagatcgttagtgccgccgtagctgctttccgcacggttcagataggggcgcggatgcatggccgcacgttttgaggcgtaggtggaggccacgttaaaggagaagatatcggcgacggcgttgagtttcccggatttgagcccttcgctcatatatttgccaagcaccggaccgagcgcgtccggcatggcttcctcggcttgcagatcggagtcgacgagcgcacgcttgcgttgggcgttcaggccatccttatcgagattttcggcggctttgtggttaatggccacggccaaatcttcgtcgagtttcattgtatcggcgtcgagcaccttgccaccgtgttcggcatcggtgggggcctgccaatagttcttttcgtagtcggagagcaatgccacccaatccgggttgggcaactggtcggcctgtgcgattgcaggcgtcacggctagcgtggccgccaacgccagcggcgcaatggtcgcaatagcaaaaacggaggataggtgccggaacatcttcatatgttccaacctatcctccgtgaaggctacgtagccggagcccagtcaaacactcagtaaattcttcgtgccggcttagcggcgattgagctgactgtcaggcctctgactcgtcttcggacttgcggaacgccgggaattcgccggtttccgggtcaacctgtgactcgggctgggtggcgtcatatccctgttcgtagcgggtgcgccgccagttgcgaatcgaggcgttggtgccacggtgatgcacatggtatttgcgcggcgcaccaccaaacggcagctcttcgacttccttggccaccgcgatctggttgacattggacgggtctccggcggcgatcggcgccacgggctcggcctcggtgggcgcggccgtgcgctgctgcatgcgcgaaggcagccattcggcgagcctcgacaacagccagcaggcgacgaagtagatcaccgcggccatgaccagcgtctgcaggatgttgaagtacatcgagccgagtcggcgcgattcctgcagcaggtcggtatacatgatgatcgagcc

SEQ ID NO: 3677 - DNA, 8241 bp, Unknown
  R85_18m  MAG No. k141_51505
gacgccacccgcgtggccggtccgcaggagatcgtgctcgaatacctgctggcaaagaagttcaacaagcccgtctgcccgcacgccggcggcgtgggtctgtgcgaggccgtatgccacttcgcgatgttcgattatgtggcggtatccggcacgatggatggccgaatgatcgaatacgtcgataaccagcatgaacatttcgtccacccgaccgagatcaaggacggcaactacgtcgctccgaccgctccgggcaacggtaccgaaatgacgctggagacggccgagaagtacctgtatcgcggctgaccgcaactggaaattcataactgaacaacacaacttaacacaacaacacacaaccactccggctggggtgccgaagccccggccgggcgtgacatggaacacccatgaaacgcagaataaggatggacgaaggagttcccatggatctgcatctcgaaggcaaagtcatcatcatcaccggcggtttcaaaggcatcggcaaaggcatcacgctgcaactggcccaggagggggccatcccggtggtgattaatcgacccgacagcgctctcgacgagttcaagaaggatatcgagcagtacaccaccacctatgatgtgcacttgcttgacctcaacgacaccgacaagatcgccggcgtcgtcgaagcaacatacaagaagtacggccatatcgatggcattgtgaataacgccggaaagaacgacaacaaggatctcgagaccactacttggcgtgagttcgaggaatcgcttcacggcaacctgactcactattacgagctggtccacgcggccgtgccgtatctcaaggaaagccgcggatccatcgtgaacatctcgtccaagaccgcgcttaccggccaaggcaagaccagcgcctatgcggccgccaagggcgcgatcctgggcctgacccgtgaatgggccgccgcattggtgcacgatagcgtgcgtgtcaacgccatagtcgtctccgagtgctggaccccgctctatgccgattggatcaagacctttggcgatgaagcggcccagcaggcgcgcctgtcggtgatcaccgacaagattccgctggaacatcgtatgaccaccaccgaagagatcggtaatgaagcggcattcctgctctccgaccgctccagccacaccaccggtcagtgggtgtacgtcgatggcggctatgtccaccttgaccgtgcgctgagctgacaagcagccctttcccgaatattcgcgcggcaattccggagctttgatcattgctccatccgtacgccgtatccgcgtatgccgcccgtatcacccgcgccctgggtcatccgtttaccaacatggcccagggtggtccacttctcgctaggcaatatcggggaaactcgtatcactaaggagtcaatgatgacatccaaaaacacaaccggttccaaggcgaccatcgccattgtgctggtgacctcactgttctttatctggggcctgaccatgaacctcgtgaacgcgttgaactcgccgttcgcaaactacatagaactcagcagcgccgaagcgtcattactgcaggtggcctattacggcgcatacttcgtcatggccattccggccggcttgatcgccaagcgtttcggttataagggcggcgtcatctccggtctgttcctgttcgctctgggcgcgttcatggtgatccctgccaccagcatggccagctacggcctgttcctgttcgccatgttcgttatcgcgctcggcgcggcatcgctggagaccaactgcaatccgtatatcaccaagctgggtgatgaaaagggcgaatcgttccgtatcaacatggcgcagagtttcaacggcgtcggcaacatcgttggcccgctgattcttggccagattctcggcaccaccgtcgcatcaggcgagtccggcttcgacgccgctaaggcgcagttcctgaatgatacccgcacgatatacattgtgatcggcgttgtgctggtcgtggtgctcgccgtgttcgcgctgttcaagctgcccacgcctccgggagacgaagaggaggccgcgggcggcgcctcctccgagaacagctccttcttcggcctgctcaagcgcccgcacttcgcattgggcgtgcttgccgagttcattttcatcggcctgcaagtggccggcatggcggtcttctccgcctacgcgctcaagcactggggcgcgggcatcacagccggcaccgcggcgatgatgctttccgtgctttccctgctgttcaccatcggacgcttcgccaccaccccattgatggccaaattcgatccctcgaagattcttggcgtatacatgaccatttcagccgtgctgatgttcgtggtattccttggcctgggcaaggtctccgtcatcgcgttcatggtggcgtatctgttcatttccatcggatacccgaccatattctccctgacgctgaaaggtatcaagggttccgcggcgaagaccggttcctcggctttggtgatgagcattgtgggcgccgcgttgattccgctgctgctcggtgtgattcaggatgcggcaggcatcgagatcgccatcctggtgatggtcccgggcttcctgttcgtggcatggtacgcattctggggttccaagatcggtctgaaggaggcctgatatgacactcaacgtaatcgattcccacttccatatctgggatccggatgcgcaggatctgccatggctggcaggattgccctcgctgcaacacaagtacacgattgaagacctagccgcacagtacgccaaatttggcgtgaatttcctcggcggcgtatatgtggaggtcgacgcggccgatcacgagcttgaggaccggctgctgtacgagaatgcaagtcctctgatcctgaagcgcatgctgcaggggcgggtaagcccttggatgcgtgtcccgattaatgccgatggcatcagggaaccgctgcatgtggattccgagccgcggggccgtgcgctcgaacccgaattcatcgccggtctacgcgcgatggccgccaagggattgccattcgagctgtgcaaccggggcccggagttgggcgacatggccaaggcgttctcgcaggttcctgaagtgacggtcatcatcgatcatctcggcaacgtgcccgggcttgatgaggaatcgtgcgccgcactcgcagcgttggccgaactgccgaattcgtatatcaaggtttccggcgacaacccggtggacccggacatcgtgaaatacgtgcgggacacattcggcccgaagaaggtgctgtacagctccaactggccggtcgtggaactcaactcgacctttgccacgcacttccaactcatgctggacacgttcggcgaggacgaggacttcttcgaaaacaacgcccgccgcgcttacaacatcgactaaacccaagccccctctgatgagggggctatcgtccgcaggacgactgggggagaggccgcaaacccggtgccgcttgtgcggcacccctattccgtaacgaaaggaacaatcatgacgagcagcgccgaattctcaggcatcatctgcccatccatcaccatcaccaaggacgacggtgacatcgactatgaacgttgggggcagcatctcgatcatctgatcgaggccggtatcaacggcgtgctggtgtttggcagcatcggcgagttctatgccttccctctggacgtcaagaagcaggcggtcgacttcgtggccaagcatgtcgccgggcgcatcaaggtgttcgcgggcgtgggcgataccaacttgaacaatgtgatcgacttcgcgcgggcagtcgaagcaagtggagtggatgcgctcgtggtcgtttcgccgtattacttcggccctactgcgggaggcgcgaaggcgtacttcggcgcggtcgctgaagcgacgaatcttccggtgatcctctataatttcccaccgcgcaccggcagcgacttgaccccggagctcgtggccgagcttgccgccgcgcacccgaacatcgtcggcatcaaggacacggtcgacacaatcagccacacccgcaaggtgattcgcgcggtcaaggccgtgaatccacggtttgcggtgttctccggtttcgacgagtactatctcgtcaaccgcgtctccggcggtgatggcgtgatctgcggcatgaccaatgtggagccggagaccttcgttacgctgcaccgtgcatatgaggccggcgactatggcaccgcaattgaggccgccgaacgcatcagccacctgatggcgctgtacgatcagaccgacctgttcatctccgccatcaagggtgcggtcaaggccaagggactgaacatttccaccctgatccgtgagccagcggtgcaactcactgctcagcagtatgaggcgattaaggcgattctcaagtagtgtatatctcaggcttccgcggaatcctacggtggatttcgcggaagtttttttacggtgattacagttgccggctcagctcagcagcgccgcgatgatcgcgataaacaccgggctggtcatggtgctcatcagaatgccgtcgcgcgcgaaggtgaggcccacgttgtagcgggccgcgtagttgtacacgttctggccggtgggcagagcggcgagtaccacgcaggcgtacagctcggagccgcggaagcccatcacgaaataggcgagcaggaacgcgatgattggcatgatgatgttcttgaggaccgcgaccgtgaagatggccgggcgatcgcccttctgctgcagcggcttggtgccgtgtagggacatgccgaacgccatcaggatcattggcaccgctgaatcgccgatcatgtcgatcgggtcgaaaatgaatttcggcactgggaaccagccgcttttagcggaaatcgcagagaccacaatgcccagcagcgaaccgataagcagcggttgatgcagtggctgcttggcgatttccttgatggagaccttgcccttggtggtcacgtccagcactgtcaggcccaccggtgtgaagatggcctgctgcatgaccagaatcggtgccaccagagccggattgcccagaatgtaggtggcgattggcaggccgatgttattggaattgaggtacagcgaattcagggcgccgatggtggcgtccggggcgttcaggtggaagaacatgcggttgagcaccaggaacaccacgcctaccagcacggcggagaagaacgccacgataatcgagggatggaagatgtcgaagatcggttccttggagaggatggcgaacatcaggcacgggctcgatacgaagaaggagaaccggttgagcactatctgagcggacggcccgccgattcgcattcgtgcggcgacatatcccaccgcaatcacgatgccgataacgcagaaaccttgcatggcgctgattagacctgacataatcctccctttcgccaccccagtgtggcacataaaaatgtattcggccgcaaaatctcatgtagtgggtgtgctgggcccgccgcccacgcggtacgctgttcacatgacgcttgaattgaaccgcaccgcatccactgccgagcagctgaacagcctgctcacccagatcatggagaacttctccgtgtccgaccacgagggccccctcaccgacgaggtcgaggccttccttaacgagcaagagcacctgaccgtccgccgtcacggcgacacagtggtggccagcaccgacttcggcgagccgaaccgtgtgatcttggccgggcacctcgatactgtgccggtcatcgacaatttcccaccgaagtggctggagcccggcgattcgctgattcgcgaagaaatcgcccacgctcatcccgaagaccgcgtgctgtggggccgcggtgccaccgatatgaaggcctccgacgcggtgatgctctacctcgccgccacgctcgacggccgcacgccggaaaccaccccgaaagtcgacctcacctacgtcttctacgaccatgaggaagtcgtcgccgaaaagaacggccttcgcaaagtcgtcgaggcccatcccgattggatcaccggcgatttcgccatcatcggcgagcccaccaacagcggcatcgagggcggctgcaacggtacgattcgcttcgacgtcgtgacccacggcgtggcagcgcactccgcccgcgcgtggatgggggagaacgccatccacaaggcggccgacatcctgagccgactcaacgcttacgagccggccaccgtgaacgtggacgggctcgactatcgcgagggcctcaacgccacgctgatttccggcggcaaaggcacgaacgtcattccggatgaatgccgcgtacacgtcaactaccgcttcgccccggacaagtcgctggccgaggccaaggctctgatgatgggcgcggatgccggtgccgaactcggcaatggcgagcatgtggccactggcggcgtgttcgagggctacggcatcgaaatgaaggacgaaagcccctccgcgcgcccgggcctgaacgccccgctcgcccaagatctggtccgactggtcaaggagcgcaccggccgcgacccgttggccaagctcggctggaccgacgtggcacgcttctcccagctcggcatcccggccgtcaacctcggtgccggcgacccgctgctggcgcacaagcacgacgagcaggtgcccgaatccgacctggccgccatgaccgcaattcttaccgactggctggtctgacacctctcgagctcccctctctgaggggagctgtcaccgcagggaggggagccgagagaacgtcagcctcgccgggccacgcccgcacaaaatatgtggcatactaaaggatggtggttctgcataaccatcagcgtgcgagatggcgtcgatccccttgcggctctcgagaatgagacaacgcaagcgccggtgtccgccacccgcaggacagacttgagacgaagttgcctttacgcggcgcgttttcgcgcggccacggtgagagcgtggtgtgagtcaagcgtataggcctggaaataggcgtcgtgatgcagcgcgccgcgaggagcattgtgcccactgacaaccgtgaaggtttcgtcaacgacggaaccgataattcaaccgtatccaatgccgattcggctgcagccgtgaacgctgcgcctgccgccgcctcccagcccgtcgaacctgttcgccgtcgtcgtggcggccgccgcgtggtccgcggcaccggtgctgccggcgcctccctggaactgcaagtgcaggaacgcaccccgctgttcgaagcccccgcgcttcccaatgccagcaccgcggccgattccaagtcatccgattccggcgattccgatgaatccagcgattccaaggattccgccgaacgtccaacccgccgccgtacgcgccgcgtttccacggccgacgatgccgccgaaacgccgcgtcgcacccgtcgtacgtccgccgcatcttccagcgataccgatgatgacgacgagactccgcgccgtccgcgccgcgccgcttccgcagtggccgacttggatagcgaggatgatcgtccgcgccgttcgcgccgcacggtcagtgccgatgatttcgatgacgatgacgccccgcgttcccgccgccgttcagtcgtggacgatgacgattacgacgaggaccgttcggttcgccgccgctctcgctcccgccagtccgacgatgatgactacgaggatcgcccggttcgctcccgcctccgccgtgcgcctatggatatggatgatgatgacgaagaccgtacggttcgccgtcgttctcgccgtgcagttgcggatacgcacgaggacaccccggatgagcgcctgttcgacgcggtcgaatccctgccctctggccacgagaccgtgcgccgtggcaagccgatgacgtccctgctgttccaggaaccggtgctgcccgccgccgtggatgcgcacgataccgctgacactcgtgatgacgatgttgacgccgacgaacgcccgtctcgtcgctcccgccgctcgcgcagccacgacgatgacgatgcccagccgcgcagccgtcgccgccaacaatacggcggaagagtaacaggtgtgtcgtgcttgacacgcggacaaaaatcatttgatttagtccgcatggtggtgtagattcga

SEQ ID NO: 3678 - DNA, 42725 bp, Unknown
  R150_10m  MAG No. k141_372
cattcacttgcgtcttatcggcaatattagtcaatttgacatgaatggtgtattgtttggcaccgctgggatacgtcttgtcgtaggtactggtcacctcacgctttagataccagtccattttgctcatcgtgccgtcattgaagtacaccccagtcataggttgagcgggcatagactgtagggctcccgatataaccgtgccttcgatacgctgctgctcgtcttcgtgcgagctccatacatatacgtgggattcttcaattgctttgcggaacatagcaatcaattgctcgttcttcccatcaaggttggttagcgcatggttaaatacctgcgtagcagccatggtgaagaaaacattctgctctttttccgtcggcttatctatataagtctggttcaagagaatctgcgcagcattatcaccggtaagcacagtgccatcggtcagtgtcacagatccagttactttcagtaactgttgcaagaacaccggatctacgctaagtacgccatcaacagtcccagaatcggaacgactccacatttgactcgctaattctgcagtgcgaggaaagtcaggagtgaaattaatgtcccgataatcagttgccatctttagggaaaagagatttcgttcatccgcagtaagagcactgatagactcctcttcagtaaactgtccatcagccggaggcgcttcgaatgcacctatactcattttccctttatctacagtaagggttccccaagaagcgggaataccaccggtagcccgtaactcggcattattctgagctaaaacaagatatgttctcgctttacccccagtagagtttacattaagcatgctgggcagcacatcggctattcgactaaccatatcggtcagatcggccagttgcgcaagtttcgttttccctttagcaagtgcttcagttagctgaggaatatgcgtatcaccaatattgttcagctgaatattggcgtccgctacgaatccattagccgcagtaagatctggtgctactgattccaaattgcccagttgaatggttccattggcgaaaccgatatggctgaagtcaagagactccactgaatctgccatttttggaagagcattgttggacacatcctccaaaactcggaccgctttccttgcagcttttacatcagacccgtaatacggaataaactcggctaatccccaaattggctgtttggtctgagcataagttttatcaatatgctgcgaaaactgctcgatgctaatttttgctttctgtgtttccccggattctatctgggattgaacctgtccagcagaaacaatagctgccgacacctcgttcttcgctcgtattgcagatatgctaagccaggcaacaagtgaagcaataacaagcagcagagctcctattacgatgcagataacccgaatccgctttttacgcttgattcgcctcacatgttccggactcatacgacgacggtgcttgcggcgttcagcctccttagcgtcatcagccaatacctctggatctacatgaggagacactaatggcaatgcattatcaacatcatctgcatccaaagatgcattactaagttcttcctcatctcgtcgcggcttctccagtgattctgaagaatcatgcatcgaatcgtctgacatggttcataaccttttcaatctgaagcaactgagtaaatacacatgagttcactcagtacgcgccattggggtggaggactgtgccgacagtacggagaatataaataagatcccccataacggaccaattctgcacataggcaacgtccaaagcctcagattcttcgtcggacaaatcatttcgccctgaaacctgccacgggccagtgataccaggcttaaccagtagacgtgtggcgaaaacctgattatattcatctacttcaaattgtcgctgcggacgtggtccgacaacagacatcgtaccaatgaatgaatcaaagaattgaggcaactcatcgatggatgtcttgcgaataaaatgaccaatcttggtgatacgcggatcctttttaattttcacgcgcattcctaattcctgaccattggccgcagcaacttcggcaagatatttatctgcattcacacgcatcgaacggaatttatgaatgtagaaaggcttaccgcgtagtccaatacgctgctgcttataaaataccgggccaccgtcatcagctttaataagtattgcagtgacgaacatgataggagaagcaaccacaatcgcgattgctgaaacaataatatcaaaaaggcgtttacagaacctggccatcacagaatattgaggtaaacgctgcgtaataattgtggtaccttgaatggatcgaatttgaatttcgtgattggacgtatctgcagccgaagcaaccatcgcgatctccaaatccaacgattccatgcgtacagagaatgtgttgtaattatcagagtatcgacgcaaaacatccgtcaccataactgtttgcgcattaatatcaaggaactgttccgctaagttattgtcgctgtattggagaactggaagggagctcccccaattctcattgatttcacgtcgaagttcctcggcattcaaatcggaatctacaagcccagtctcgggattcaaccgaatcgggcaaacagccaccggccggtagttcaactgttgtcgctgcgccaggaaccgaagcattcgtccgatgccctgaggcgagccgacgatcaccgtgccataggcatactcgcctttcttacggctacgggtcaagaacgcgcgtgaaatcatacgttctacgacagtcaacgcccatccagatgcgaccattagacataatgaggtaagcgtcaactcaaacttaaagaagaaatggaaggcgcactggattatccagcagacggccatgcctttaatcagtagcaggttgagctggtagccatcgcccataatgtggcggtgatagacgccgacttgatgcaacgaccaaatccaaaagcaggtggcgacaatcaagtagacagtagtatcaaaagtaaaaccgaagcggggcgtgtagaatggatggttctcgtgacgcaggttcagtacggtagcgctggcgatgaggaacatagctgcgtccatgagcattagagcgaggttaacgaaaaaacgccaatatagcacatgggaaagctgacgctgacgttgatcgctcatctgtttctgcgtatggggagcacccgcgggtaccgtgttaccttcggcatagtgagacgtctcatttgtgccaacgaccgcaccagcgccgatagacgcggtgccgttatttcgtgataccaatcggatatccctttcttcctctgtcccttgaaccacagttatggatttccctcgtgccctatggcgcaatcagaccggtgaccggatctgactcggcattcaccaagaaaaccactataagggggtacccctttatgcaacataatagaggctacccccccccgtgaagaattgcaccatttcgaagaaacgtctcagaaacatgtctcaccgacgtaattgcaggcaaagaaagcaattggcggaatatgtgggatgttagcggccccattattacggggggataccttatatacgttgcatacgcatcgttgccgtgctggaggggtctcccgacatgccacttgcaggccctttgacctacaccagctattcagacaaagctcactttcagaccgcagtgaccatccactttatgagatgcatctcagaatgccagaatgataaagtcaccataccgatatacgcatacttgtcccgaagccttttagaaccttttagaaccttttagattgttttagattgttttagattgttttagaattcggctggtggcggcccttactgagccgcccaaccgcccggaccacccctgggtatagcgtattggggtgcttttgtcaggttgcccggccaagcacaggaaatagcgacggtcgccgaatacatttgccctcacgtcggtatgcgacaagacgaaaagacgaaaccagcatgccggcatgtaccgcaggcaccaccagtgccgaacatgccaaccgacaccgccagagccaccggccgggcaacggaagtggagagtgtgcgtggctggagagagcaggatcaaaaatcgtcgcggcgaactgcagcgggtgctgagccgcgaggaatcatatgtagacggcaaactcagccgggcggcgttcatctccatcgcgatattgacctttattaccttcgtgggcaacttcacgcagctgcagctgagttccgcgctgccgattatcgtttccgaattccacatctccgtaaccaccgggcagtggctcacctccgtgttccagctggtcatgggcgtcatggtgccgctgaccgcgttcctgacccgtcgtttctccacccgccagattgtaatctgctcgatggcggtgttcacggtcggctccctgctggcatggttggggccaaacttcgtatgggtgctggtcgggcgcgtgctcgaagctgccggcacgggcgtgatgtggccggtgctgcagatcaccgtgttctcgatctacccgctgtcccgacgcggctttgctatgggcaccgtgggcatggccatgagcgtggctccggcaatcggccccaccttgggcggctggcagaccgacgccaatggctggcgttccatcttcctgaccatgaccgtgattggcgttgtctcgctggtggcggccatgttcggactacataatttcggctcgcatgacccgtctgcccgcgcggactttttctcggtgagcctgtcggtgattggctttggcgggctgatgttcggcttcaccaattcggaggcctacgggttcgccgcaccggtaacgtgggggcccatggcagtgggcctgattggcattgtctggttcgtgctgcgtaacctgcgcgctggcaagcggtatcgcgaggccgtagccgaggacaagtcggcactcccccagccgccgctgctggacttggaagtgctgaagaaccgttcgttcaccgtcggcaccattaccgcgtcgctggcatttttcgccttcagttcgattctggtcatcatgccgctctacatccagaccgaccgtgggtattctgccacgatgagtggtctgatcatgctgccgggcgctatcggtcagtgcatctcccagttcttcggcggccgtgcgatggatcgattcggcgcacgacccgtggctttgttcggttcgattgtgttgacccttggtaccttgggcatgtcgctggtggcgatggatacgtggatctggtgggtatcgatctgccagttcatccgtcagatcggcatgggtttcctgctgatgccgattaccacgtggtccctgaattgcctgaacgggccgagcgaagtgtccgccggatcatcggtgacgaataccgcgcgtcagattgcgggcgctgtgggcgcacccgtgttggtgattctgatggaaacatttgccgctttgcataagcagggcggcgcctccgccgtcgccgcttcgatttttggcattcaatgggcgctgcgcatctccgcaatgatctgcctggtaatggtgttgatggtgttcttcggcgtcaagggcgacggtgccggtcgtacgcgagacattatttccctgcgttcgctgcgtgaacggcgtgcgcggcgtatggctgcgaactgacggcagattcaaccattcttaacataataagaagccccggtttccaacaccggggcttcttattatgttgtgctatcgcaggatttcagctggagtctattacgccctgcccattagcgtcaggacaatcagcagcacgttcaacgccacaatcagcgccacgacgatcataaagatcacgtgcttgacggttccatcagcccacttgcccatgagttccttgttatgcgtgtatcgcatcagcggaatcacggcgaacgggatgccgatggaaagcaccacctggccgatgaccagcgcctgagtcgggtccttggcgaaccacagcacaatcagtgccggcaccagcgtgaccacgcggcaggcccacatcggggcgttgacgtgcagcagaccgtgcatgatttccgagccggcgtacgtgccgaccgatgtggagctcagcgacgaagccagcaggccgatggagaagatcgtgccgatcaccgggccgagcacctgcgtgatcgcccgctgtgcgccgtcgatggagtccgtgccagacatgccatgcagcgagttggcggcgagcaccagcatcgccagattcacggtgccggccagcaacagcgcccaggccacatcgattttcgagcctctcagctgcgttttgatcgacggcttttcgccgcctgcgtaatggtcgttcaccagcgtggagtgcaggtagatggcgtgcggcatcacggtggcgcccagaatcgaggcggccatcaacaccgagtcggcgccttggaagcgtggaatcatgcctttgaccacttcgccggggttcggcggggctacgaacagacccgcgatgaagccgaatgtgataatcagcagcatcacgatgatgatgcgctcgaatgtggtctgtgtcttgccgccttggaaccacagcatcaccgtggagattgtgccaatcgccaaaccgccgatgaacagtggaaatccgaacagcaggttcagggcgatggcgccgccgatcacctcggccagatcggtggcgatggcgatgacctcggcctgcatgaagaacatgaagcggccggcatcgctcatacgctcgcccagcagttccggcagggatttgttggtcacgatgccgagtttggcggactgatactggatgagcacgctcatggcgttggcgagcaccagcacccacaccaacaggtagccgtatcgtgcgccggaggtgatgttggccgccacattaccaggatcgacgtaggccacggccgccacgaacgcggggccaaggatgctggccagcgcatggtcatgcggcttcttattgttattcgtccctgctccggccccggttccgactccggcaagctggcgttccttcccgatttccggtgtttcctgttcgatgtctgccacagcgttcgtcatagcggttgccgcagtggcatctgcttcggtgtgtgttactgccatatcgtttgtacctgttcccttcataccgcgcacagttatagcgcaggcatgtttcccgagtcaacagacggacaatctgcggacgattgatggatgaccggcggactggcagctggcatttcccgccatctcgctcatgaaatgtgaaaaaccgccgaaaactcgctcatgaaatgtgccagacggtagaaaactcgctcatgaaagtgtaaaatcattgatatagcagtaattcggaaaggggctcctcatgtatctcaaacgcaaagccgatgcctatctcaatgcatggaaatccgacccgaatcgctccccgctaatcatcaagggccctcgtcaagtaggcaagacagagactatcgattactttgccgcacacaactaccgttcggtagtggaaatcaacttcgttgaggaaccgaaatatcgtgcaatcactgcggacggttatggcgcgaataccatcgtccgcaatatttccctgatcgacccagccaaaaagttcattccgggcgatacgctcatctttttcgacgaaatccaggcccatcctgatatcgccactgcactgaagttctttaaaatcgacggcaaatatgatgtgatttgcagcggttcaatgttgggcatcagctataagcaaatcgaaagcaatagcgtgggatataagaccgactacgaaatgcgatcgttggacttcgaagaatttctgtgggctcgcggatacgatgaggccgtcatcgaaagcatgttcacccacctgtgtgatgctacgccattctctgaagtggaaatgaacgtcttctccacggcatttatggattactgcgtgcttggcggcatgcctgcggttgtcgcctcccatatacgcactggcacgttcgagggaacactgcaattgcagcgccagcttattttggactaccaggaggatatccgcaaatacacgcaaggactcgatcaggcacgaattctcaacgtgttcaaccatattcccgtgcaactcgccaaggaaaacaagaagttccaaatcagcaaggttgccagcggagcgcgtttcaaagactatcgaggatgcgtggaatggcttgaaacctcgggaatggtgaatatctgccgatgtatgtcctatcctgaactgccgttgaaaggcaattatgacgaaaacaagttcaagatatatttcggcgataccggtctgttcgtagcgatgcttgacgacgaggccagtgatgatctgcgggccaatcgtaatcttggtgtctataagggtgctatgtacgagagcatcgtctctgaagcgctacggaaatccggctatgacctgtactactacaaaaaagaggattccacactggaacaggatttcttcgtccgcacgcgcgaatggctggtgccggtggaggtgaaatcgaaaaaaggcaccgccaaatccatgcggacgctaatcgcttcggattcttatccggaaattcagttcggcgtgaaactatccgccggcaatatcggtagcagcgaacacgtgttcaccgcaccatacttcaccacatttttgctccgacggctcctgcgcgcttatgacgaggggcaggcacctatgctcaacaatcctgagcggtagcccctattcgtctgcgggcacggcctggcccgggcaggtatggaggacggcgagcatggcgtccttttcttgggaggtgacggtgagctggtacttgtctttgacgccaatctggcgggccacgtagtcgcaacggtagtcggcgttggtgggtagccagtaggcggcggaagccgaacccttctcctgattggccggaccgtcgacggccagcaggttataggggtcattgccgaattcatggcgtttggcagtggaccagtcgtgcgcaccggattgccaagcgttttcaagggccaccacatggtcgatctgcactttggcgctggtggcgcggccacgtacgaaatggatggtctgggcggtgtacggatcggccagtgtgccggactcgaccacacaggaaccggcgtatttgtaggtgatgtccgtgagatcgcgggcgagcacgtcgtcgcgtacgtcgcagccattgccgtcgacgtcggtggtgcggaaaccgaaggaatcgcggtcgtagccggaggagctttggttgtcgtctacggcgagcgcgttcaaagtgtcggcggctgaaccggtggcagtgtagccaccggtgattttggccacgtcggagctgacctgcggcagtaacaggccgatggtcacgccgattgctacggcgagaacgatgagaatcagcacgcgctccagcggtccagaggcgttgaaacgacggcggaagtgggcgttacgacgtgccatcaatcacgcataggtgaaggtgagggggtcgtggccggcgcgggtggggccgtcgagggcgtcgatggcagcgtgttcatcggcggtcagggcgaagccgaacaggtcgagattctccctctgacggtcggcatgcacggacttggggatgatgatcgtgccgttttcgatgtgccagcgcaaaatcacctgggccgggctgacctcatgggcggcggcgatcttctcgatggtgccgtcgccggcgttgaggtcggcgccacgcgccatcggcgagtaggcctccacggcgatgccgtgcttcttgcagaacgccaccacttcgcgctgctgccacgtggggtgcagctcaatctgattgacggccggccatgcgccggtctccccgtgcagacgcttcagatcggcgggcatgaagttgcatacgccgagcgtgcgtgccatgccttcgtcgcgcagcttgacgaacgccttccaggtgtcggtgctgcgccagtcgaacggcgtgggccaatggatcatgtacatgtccacgtaatcgagctggaggagtttcagggagttgtcgaatgccttgagcgcggagtcgtagccctgctcggagtcgcgcagcttggtggtgacccacagggtctcgcgcttggcgccggtgttgtatccggaagcggcgagcgcacgacccacgccggcctcgttgttgtatccggcggcgccatcgatgtggcggtatccggcttccagcgcagattcgacgacaggggccacgccctcgtcatcgatacgtagcatgccaaggccgacctgcggaatggaatggccgtctttcaaggcgatgtccggcacgttggcgggattgatgtgtccgttggtcatggcttgtgatgctccttcatgtactgcaactacacgccactgtacacggttatgcaggcgatgtgcgggtgctgcaaccaaacggcatgattgcgcccggccttccgtgtgggagagccgggcgcaatcatgacaacatcacgctctactcctgcgaccggccctcgccctattgttcccgggcgcgaatttgccccggtacaggcgtcaatcgattgacgtttgcaccggggcagaaatcgttgtcccggtacgcaatttcgggccattttcgagaaccaggacaagacaatccccaaagtccacataccccgacaaacagaatcggcggaatacagccaatcccgaaatcaacatactgtcccggttctcacgtagaacgattgacgtgcaaaccggggcaacgggaattgtcccggtacgcgaaaaacacccgttttcgcaaaccaggacagtgatttctgtcctggtacccacatcaaacgattgatgcacgaaccgggacagaatcgcatcgctgcgccgagacagacgcatctgacagccgacaaccgataaacgacagccgacagatggcatctggcagccggctgccggcaaccgcatcataatgccgcatcagtctctatcaggagcgcttacgacgcaaagcaagcgagaccccgccggccacgccgagaacgacaaccgcaagacccacggcagtcaccgcgctaccggtattgctcagcacaccagtgatcttgtcgccattcgcaccgttggtcttatcgccctcgcccgtatcgggattgatagtagccccgccattacccgcaccgtccgagccgttgccggaaccaccttcggcccgagcggtaaccgcaaccgtataggtttcggtgacattcggattcgacttgagcgttacggtaaccttcgccgcatcagcgggagcggagaaatcgtaatcgagcgtgaactggtcggcggcaagcgcctgatcgagtttggcgagcgactcgttggtgtactcatcgcgattgattttcccggcttcggccacggccttgtccaggttctccgtggatggcttcaccggagtttcggtctttttgacgagtgagaccttgtccacattgtggttgctcaactgtttggcgtaagtggcgtaggtgccggctttctccgggttggtgaaatgaatgacgaccttggcttcggggagcacttcgcgtatggctttggaacctgcggagaatactttagacatgccgtcccagccggagatgccggcgattttcgcagtggtttcgttgccgacctgcaccatgccgacgtccacgccggcttgtttgaacgtggtcagagtctgcttggtgtagtcgtatacggtgtcggcggttttgtccgcgtcgccttcaaaggatttccacgccttgggcacctgctgcttgctggggtcggcccagaaatcggagtaatggaagtcgaccagcactttcagccctgctgccgtggctcgcttggccatggtcagtgcgcgatcggcgttgacgttgccgccgccatatccttggccgtctgcggtgaacggatcgttccacacacgcagacgcacatagttcacaccggattccttgagcaacgtgaacaaatcctcgacctcgccattggcgttcttgaacgtgacgccgctttcttccagcgagagcatggatgagacgtccataccgccgatgaaatcatcgcttaagccttggatggccttgaccgagacgtcggctttaactggttcttcttcggcggcgtttacagtgaacgtgcctcctgcgcagagcattatggcggccacgccggatgccataatgcgagtaagcgcggtatttcggcgcatgctttttctcctttgaatggtgaacgctcagaacgaacgcccagtgatgcttggcgcttcctttccttacgcgccacgcggtacagctgtgtaccacgcaatcgtcgccttagcactttatgccgtgttggtcaaccggtgtatcaacgcctcgtacggcccagtacagcaacaccagcattacagcaatgtcgttcagcgtgtggaggcgcgggcgatgacctgggattcggtggtgagcagttcggacttggtgatgctgccgtcgatgcgtccgaggatgcgatccactgccgtgggagccgtccagtcaaggcgggaatccatggtggtcagcggaatctgcaggtagggggcttcctcgttgttatcgaagccgatgacctgcacctgcacgggcacctcataaccagcggtgcgcagagcggtcaatgcgccgatggccaactgatcgttcaaggcaatcacaccgtcgaatggcacgccggaatcaatgagccgctgggtcacacgggcaccggctccgatggtccaatcctgatcggtgttgccaatcagctgcggatccaaggagagcccacgcctacgggtctcttcgatgatgccgcgcagacgcagctgcgcgttgccttctacggcattcagcaatgcatcttcgtcgtaaacgtcacgggcaccgatcactgcaagtctggtggaaccgcggtcatacaggtagcctgcggccatggcggctgcggatacatcgtctggggtcacgtgatccacaatgccccacgtggtacgcgcgccaacgatgaccagcggaaaatcaaccttcagatcatcgggcgaaatgttttccacctcgctcatggaaaggatcatgccatcggacaccgtggagttgaacttcttcagcagatcgcgcgcgcctttcgcggagccttccgcatacgtggtgacgtatacggaatagtcgcgctgacgggcggcctcgatggtgcggttggcgagctcggccagatatggcggaatcagcgaaggcacggcgagggtgatgaagccggtgtgatcgcggttgaggttgcgggcggccacgttgactcggtagtcgaggtccttaatgaccgactcgaccttggcacgggtctcatctgtcatacgcccggagccattgatcacgttcgacgcagttttgagcgatacaccggcggcctgagcgacatcgcgtagcgtcactcgacgcttggctgttttctcgtcgctcatgccgcactcctctatccggacaacattgccattctagcgcggtttagcaggacgttttagcgataagaatggcgttgcggttcagcgtatatccaacggcgtcagtctcgcaacggtgggcgatgatgggatcaccttccacaccgttgatggcgacgggctggtttgagcggttgaggtagaaatcgaagcgggtggagccgtctgcggatcggcggatggtgtgcaggatgcggggatctgtggtgggataggttggagtttgaccactctcagtcggctgcgccgacaactcctgccatcgggagccaagtgctttgagcaactgggcaatgtcgtgacggttgaggtcgcagcccacgtagatggcggtaccgttgccataggggcggctggtgatggcgggggtgcgctccagctcccagtcggcggcggactcacctgcgtaagaggcaagcactgtggtgtccgcggctacggaagtcacgtcgttctgccacaggcgggtcgtcagaccattggacaggctgatttcgctgggctcgccttcggcttcttcaccgaggatgttgaattcttcggagcggatgccgagcatgtcgcgtaggagcccgttgccggcgccggggtagccgccgaggccgatgtggaagtgctcgtcgatcaggccggcggcatagccgacgatgacggttccgccggccttcgcgaagtcggcgatacggagaacgtcttcgtcggacaggctgagcacggtgggcagcacgatggttttgtagccggtccagtcgtaggcgagcggcaccacgtccgcgcgcagcccggcatccaggaagccgcggtaccagtcgcgcacgtcgtgccagtggttgagtttcatgctgggcagggtttcggagcgtgtggcccattcggattccgcgctgaacaggatcgccgtgccggcacgctcgagctcagtgtcctgcagcccggcgtcggagagggtcttcagcgccttaccgagctcgcatacgccgcggaagaccttggaatcggcgcccgcgtggggcagcatggcggagtggaacgcctcggcgcccgacttggattgccgccattggaaaaagcagatggcgtcggcgcccatggccacgtgggccagggagtcgcgcatgagttcgccggcccgtttgcgtgtgttcagcggcttccactgcacggctgaggtggagtgctccatcacgtaccacggcttgcccagcgcgagggagtccatgagcgcgtccgagcaggcgagttcgtccaggtgggattcgccctcatggaagtagtgatcgttggacacgaagtccacctcatccgcccatttggcgtagttcatgacgcactggtcggtggagaccatgaagttcgtggtgaacggcttgtcggggcagatctgctcgatggcgtcgcgttcggctttgtagaagtcgagcagcatgtcgttgccgaaccgctcgtaatccaactgctgcgacgggttgaccatggcgtcgccgcccatgtgacgtggcagcagcacctcgtcgaaactgttcacgtgctgcgaccagaaggccgtgccccacgcctcgttcaacgcgtcgatggtaccgtacttggcctcgcaccacgtgcggaacgcggccaaggcgttgtcggagtagtcgtagcggttgttccagccgtattcgttgcccatgtgccaggcggtcacatacgggttgtccttgtagtgttcggcaagtttgcggcacaggcgcagcgcgtattccttgaacaccgggcttgtgggctgccacgactggcgtgagcccgcgttgacggtatgaccataccggtctaccggcagcacctctggatgggattcgtacagccacagcggcgcggcggctgtggcggaggccaagtccacggcgatgccggctctgccgagcctgtcgatcacatggtcgagccactcgaacgtgaacgcgccctcgaccggctcgatcttgtcccagctgaaaattgccagcgatacgacgttcacgccggcctcacccatgagacggatatcctcgtccagcgtctcctcgggccactggtccgggttgtagtcgccgccgaacgcgatgccgcggccggattccgtcagcagggacggccacctaaatgctctatgagtagtcatattaatcaaatcctttattgtatcggctcatggccggtgctgtgtttgccggttttgggctttggctcccctcagtctcactgcgttcgacagcgtcatcggcgctttgatcaaggcgtgaatgctgcgttgcgttactgcattgccatgttgccatgttaccgcgttattgcatcgctacgttgccacgttgccacatcacattgcattgccgcattgctgcgttgccgcatcacatatcgcaacacaaacgcagcaacgcaatgacgaccggagatggcatcgccgccacccgcgaggaaccgcagtgcaacgcggtaacgtaacgcaatgcgatgtgattcccgcgtagttacaggcagttacagattgagtaccgcatcagcaatgcgcatggcggattcgcggtgggagaccagcaccacagccgcgccgcgctccttgtctgcatgctgctcacccacggccatagcgtgaatggaacgtagaataatagcctcgttcaaagcatccaaacggctggtcggctcgtcgaaaagcaccagatcagcattgcgcaggaacacacgagccaaaccgatacgctggcgttcaccttcggatagacggtcgcccaactcgcctacctgagtatcaaggccatcgggcagggaatcaatgagatcaagcacggaggccttggcgagagcctgacgcaaacgagcatcgagaccgtcagctgctgccacctgaacggcatcgccctctgccgattgcgccgccaaccgctgctgtcgggaatcaacggtcttggcacccacttccccattgcctgcaacatttgcagcttcaacctcggactcaggcaaagcaatcagcagattgtctcggatagagccatcaaacaggtggatttcctggctcatcatggcctgaatacgtcggcgagcatgcacatcgacctcgggcaacggcgtgccggacaacgtcacctgaccgcgctgcggatcccagtagcgcagcagcagcttgagcatggtggacttgcctcggccggacggcccctggatacccagcacgccatgctgcggcacgtcaagcgagaagtcggacaggacttcatgctcccccgcatatgcaaaggtgacgtcatcaagacgcatgcccatatactcctgcggcacaacagtgccgttctcggtcacagcgggcacctcgtccatcagtccgaacagtcggctagcggacgcgaaggtctgagtcaggttagcgggcaaggcggcgagcgccaaagtcggttcgaacgagctggcgaacagcacgaaggcggcaatcagagccggaatgctctgcgggttcgcgccggcacaggcaatagccacggcgaccgaagccgctgtgagcacagccaccaagagtccgctgattccggtgaaacggccgttgaccttgctgagtttggcgtgatccttccacaacgcatgggtacggtcctcgatggcctgcgcacgttcctcgccgcggccaaatcggatgatttcgtccaggccgcgcatgtcatcgagtatcacatcgtcgagttctccggcagcgccacggatggcagggccaaggttacgtacgccggtggcaaagaatcgcggcacaaggatgccgataaccaggtgggcggcaatcaacgccagcgccatccatgggcttagggtggcagccacaatcgtgtagatgatggtggaggttaccgcgatggccaccggactgatggtgtgggcaaagaagatctcaagcagttccacatcggtggtcagcatggcgataaggttgcccttacctttgcccgcgagcttggccggcgccagtctgcgcaacgcggcgaacgccttggaacggaagagtgcgagcagatggaatgccacattgtggttcagatattgttcaatgtatcgggtgatgccacgcagaagagcacagataatcatcatgatgacggcgggcgcaacacccatgccccacaccggattaccggtaagtgcaaatgccgcgataatgccgaacacgggcaggaaagtggccgaaagatggccgatggtgccggcggtggaggccgctgccatcagtcctgccagaggtcgggcttccttaagcagtcgcctgatcacttggaatgtgctcattttggaagacgaatcgctatttgcaacaccagccggagtctcagccgaggcctgctcactcccgccaacggaagccgtcggcaaagctgactgcaggcggtcaaccgtcatacccgcctctgcgcttacgcgcgctgcgccaccctcagtccgactgtcgtcggacagctcctgcttgcgggaaccaacctgcagcacacgccgagcacggccttctccgaagttctcaatatctgtctgcgtggtaaacagcttggcgtagacgccgtccgccgtcatcagctcggtatgggtgcccctctcaaccgacttgccgtgttcgagcaccaccacttgatcagcgtgttcggcgttggccatgcgatgggtgatcataataaccgtcttgccgcgggattgcgccaattcgcgaattgtatccaggatcagctcttcggattccatgtcaacgctgctggtcgcctcatcgaacacaaataccggcgaatcatgcaggagtgcgcgggcgatggcgatgcgctggcgttggccgccggacaggttggcggcatcggactcaatcggcatgcccagtccgttcggctgtgcgtgcacgaagtcggcaatgcgcgcctgctcgagcgcggaccacagacgggagtccacggaatccggcgaatcaggaatctcgtcatcgggcaaggccatcagaagattctcgcgcaatgcgcccgcaaacagatggctgctggcaccaatcacagtgacggctccggccagtgtttcgcctgacaaatcggatacctcgacgccgttcagcgtgagcgaacctcggtaaccggccagtgtaccggcgagcagcgaggcggccatggacttgccggaaccggagatgccaacaatggcggtgaactgaccgggccgtgcggcgaaggtgatgttggtgagcgcaggagcgacggcggaattggggctggtttcaccttgcttatcggtctttgcggatgcggacttggagtcgccgtgcccggcatcatcataggaatagccgacgtggtcgaagcggaccgtcagaccgtcgtcagcggaatcggaatcgttggccggcagggtcgccgtgccatgctcgggctccggggtgtccagcagagcgaagatgcgcttggtggaggtcatgccgttcatcgccacgtggaagaacgagccaagctgacgcatgggaataaagaattcggcggacagcagcacgatgaacagcagaccggtaagagacagcgggtagcccaccccgaacgggatgagatagtgcaggccgtatgccgcgtaggcaagcacaccaggcagatgtgaggccagtgcgattggcgaccagccggacgtaccattggcaaaagcatcgccaatatgcgtgtattgccataacgccacaccgatgccggccgcagcaccgccgtaggccacgatatccatggcggtcagcgagcgcagctgaatctgcaacacccgcatggtcatcacgcggaagccttcagccttcttgtccatttcggcggcggcacggccgtcggcgtcgaagttcttcagggtttcgaggccttgcaggttgtcgaggaatgcggcacccatgtcggtgtatcggccccagtattttttgaaggcgcgggcggcggtcatggatacgatgccggtgacaataataatgagcggcgcgcagacgagcatggtcacggcggctggcatgttaatcggcgcaatcacggcaaacagggtgaccggcgcaagaatcgcatagaagagctgcggcaggaacagttcaaagaagctttgaatctgttcaacaccttcgccggcggattgcaccacatccgaggtcttgatgcgggttttgtaggacgggccgagtgccaccattttgcggtacagcttggatcgcaaagccagcttgactcgttcggcggcttcggtgccgagacgggtggcgtgcgtggtggccgtgtaacggaccgctatacagaccagcgcaagcagcacgtaaatcatgacgtcgccagccatgggcagcacatccgcgccgtgctgatcagacaacggcacggggcaggccgcgccttgcgaagtgccgccgcattggagcagcggcggtgccacagcggtcagcaagctgttcaacagcatcaccagcgacagcataaaaccaatgttggcaagcagacctacccacatcagggccactttgccggctatgagttttttcaagccaggcgccaattggaacagtcgtttgtcgaacatggttcgcttccccttgccgtgttgttgcggtgtgccctcgtcatgtgtacctgcgctccacattccgcgcaatcccattcaccttaagcgaacgccctcgcacacgccagacttttaaagtgagagaggccacagaattatcgattgcggagtgcgcatgctagacgcgccaaccagaaaaaatatgcttcgatatcaggggctgaagcatccactacacccaatacgtgcatttatccgtttcgaggaggctaatttttgcgtttgccggaggcctacttccgtttcaaggggctgatttcgcatttgccggaagtctatctccgcttcgaggggctcctcatccatgtaatcggaagtataaacggctacacgtcaacgtcattccgccattttagggccgtgtctacttgggcatcagcccctcgaagtggaagtagacttccagataaggcaaaatcagcccctcgaagccgagaaagcacgtttctacggtgtcagaagccgacggaacgcaaaagggtcgtctgcacgcagacgacccatatgatcaattcgccaatagacgcagcaaacgcggcctagtgctgctttttgcgcggcgaccagtgcttcggcggcggccgtacttatcggacaggaagccggagaagccggcgccgatcacgccgccgaacatgatggagctgatgaccagaccctgcagggccgggctcagcgcgtacttgtcctgcaggaagtcgatggctcccgaaatggacacggtgtcataaccgtagagcaaaccggttagacacggcgttgtatacaatccacaaaaccagacagacaacttctccattgcccacaacgcgcgcaaccttacgccagcgtaacctaacttgtcagaatggctcgattttgtcaacagccatcatgcaacgcacgtaaggacacggcccgcttatgcttgaccactacaccacgcctggcgaatccatcgaaatccgcgacaaccagaccatctactccctacttaccgatcgccttgcccgcaccggcgcggacacggtaatcgccgccaagaaaatcggccccggccgctggcagaacgtcaccaccggcgaattccacgagcgcgtggtctcggccgccaagggcctgatcgcgctcggcatcgccaagggcgacgcggtgaccatcttttcctccacccgtctagaatggggcattctcgatttcgcactggccgcggtgggcgcggtaagcgtgccgatctatgacaccgactccgccccgcaggcccagcgcatcatgaacgattcggtggtcaagctggcctttgccgacaatcgcgagcgcttcgaccggctcgactcggtcaaggaccactgccctgccttgaagcagattctcatgatcgagggcaacgcactgggcgcgctcgaaggtctgggcgtggctgtttcggacgaggaactgaacgagcgcgtggccaccgtgcgcacggacgatctggccaccatcgtctacacctcgggctccaccggcaacccgaagggtgccgaactgacccataagaacttcgtgtccatcaccatcgccgcctcgcaggcgttgcatgaggtggttctcgacgaccatccgcgcctgctgctcttcctgccgctggcccactgcttcgcacgatttatccagtacgcctccatcgcctccgatgacggcgtggtcggttatctgccggacaccaagtccctgctgccggacctgcgttcgtttgaaccgacctacctgctgggcgtgccgcgcgtgttcgagaaggtgtacaacgccgcctcgcacaaggccggtgccggctggaagggccgcctgtttgtcaaggccgccgaggctgcgcgcgtctggagccgcaaggagcaggccggcgagcagcacacgtttgccgaaatcgccgagcgcgccaagtatgaaacgctcgtctaccgcacggtgcgcggtgctctgggcccgaagatcaagtatgtggcctgcggcggcgcaccactttcgcttgatctggcgcatttctacaacggcatcggtctgccgatgattcagggttatggcatgaccgaaaccgccgccccgttcgccgccacgcgcgtgaccgacaatgtgatcggcaccgtaggccagcccgcgcccggctcctcgattcgcatttccgacgaaggcgaactgcaggtcaagggcccgaacgtgttccgcggctaccacaatctgccggagaagacggccgaggcattcaccgccgacggctggctcaggaccggcgacttggccgagatcgatgacgccggccgcatcatcatcaccggtcgaatcaaggacattattattaccgccggcggcaagaacgtctcccccattccgctggaggaggagatcgccaagtgcccgatcgtggagcactgcgtggtggtgggcgaccagcgcccgttcatcggcgcgctggtgacacttgacccggagtcgctggccatttggctgcccgcgcacggcctgtccacggagacgccggtcgaccggctcgccacgaacgccgcggtgcgcgaggagatccagcagtacgtggacaaggcgaatgcgacggtctcgcgtgccgaatccgtgcgcaagttcgccgtgctgggcacgcagttcacgcaggagaacaagtgcctgacgccgtcgctgaaggtagtgcgcccggccgtcaaccgcgtgttcgccgatgtgatcgacaacgagatctacaacggcaagcggtgaaacgcgcggttcgtaatccgacacaaaaaagggccttttgaaccgcacctccgatcatcgaatctgtattactccagtccaacaatcggggtgcggttcaccctcgccgggcacttcatcattcatcactggcatggttccattatcacgcacattatggcgcagagcgaatacggcaccccggcaacgcgagtgggtcgccggggtgccggagcgcgggggtgccagaatgccgaagggccgggataccggagtgcccggtcgccggggtgccgaaatgccgaagcggtgtatgggtgccgcccggcccaggtgggtcacgcccgggtcagtttcttgctcctgagacgcagcacgacatcggcggagtcggcgacgcgcttggaatgcgtcaccacgattacgcatttgccgagctgatgggcggcatgctgcagcagatgaatcacctcgtcggtcatctccgggtcgaggctgcccgtcggctcgtccgcgaggatcgcgcggcccggggcgaccagcgcgcggccgaccgccacccgttgacgctggccgcccgacaggtgcatgatgttgcgcttggattcctcacggctcaaacccagttcctcgaggatcttcatatcggccttggtgctgaccagccgcaggttctcttcgggggtgaggtagtcgatcaggttatggtcctggaacaccagggacacgtgttcccgacggtgcttcgcatagcccgatgcggcgatgtcctccccctcgaagcggaccactcctcgggagggggcgtccaggccggccagcagagacagcagcgtgctcttgccggcgccggacgggccggtgatcgcatacatcttcccggattcgaaatccgcgctgacatccgagagaacaaggatcttcgccgcgccgtaggcgtaatcgacatggtccagttgcagacagttagacatgattggtgactcctaacgcatagaggaaagaatggatttcggggatttggacagtacggcggcgcatgacacggcaagggccacggcgatgaccgcgcatccgagcagcaggatgagcaccgtctgctcaggcggcaaggcctccacgtgcaacgattccaacggcgcgacgcccgaatcgcgcaacagtcgggaagacacgtatcccgacagcatggcaccggtgcccagcgaacacagggcggcgaccgccgccatgagtccggtttcgatggcgagttgtgcgacgattcgcatcttgtcgatgccgagggccagaagcgtgcctatctcatggatgcgtgagcgaatccagaagaccagcgccatcgccagcaccagtacgtccgcgaggcagacggacagcagcaccatgcgcaccagatcacgcaccgtctgcacggattgcaggacgccggagagccgggccgaatcgtcggtgacgtcgtacttgccaccggccatggtcttggcctgactgaccgccgcggacaggtcctgcggattatccgacaggcatcggatcatgccgatctggtcgtttccggtcagagcggaggtcactcgcctgcccgaatagatgaggttctcggaagtgtccgagggcagggggctttgggcctgcacgttgccggagaagatcccggccacacgcaccgtggcgttgcgcccctcctgccggagacggaatgtcgagccgaccgataggccgttctgcagcgcgaagtcgcggtggaccagcacattgtcgccgtcgcccgagatatggcggccctgctccaggcggtacaggccgctctggaattcctcggacaatgaggaatcggtggtgcccagcacgctgacctgcatggccagatcggagtccaatcgggggccctgccgaggcatgaccgggcgcgcgccatccacctgcgccaaggtcttcgtcgcataggcggtcttcgtcacaccggggatacgcgagaaccggctcgcctcctcggcgctgatgggattctcgccggcgctgacggtaaaccctatgcccatgcccgcgccgatgccgtcggacatggtacgcagggccgtcgagactccgacctgcgccaccaggctcgtgaagaccatcagcatcagcagaccgatgatgccgctgcgtaccggcttgcgtacgatcgccaacgtggcacgcttccacacattcatgctcatcatcgattctccgacaggtctcgcggcgatttgcgcagcatcggcatgcacgccaccgcgacgcacaccagcatcaccgccaacaatccgagcgccacgtacagcatggcggtcccgtcgaccgacaccgtgagcgaatccagggtgcgcaccgacatgctggattcaaggtcgccgccgacctgccccatgctgctcagctccttcgccgcggaggcgttcacggaatggagcgccgtggtgccgagccattgggccattccctgcgcgcacagccagccgagggcaagggacggcagaccgatcagcaccatctcggtgaggtattgggcgaccagggagggcttgccgacgccaagggacaccagtatgcccatctcctgacggcggtcgttcatccacagcagcagcatgagactgagcacgagcacggccgagacggtcacgccgatcagggcgccgcgcatcatggagcgcacgccgcgggcggcatgcagcatgctcgacgaatactggtcgttgcgcgtgatctgatagttgttccaatccaccgggagtttctttgcggcgtccatggtcttctccacgtcaacgcccttggacagcacgaaggtggcgtcctggtatatttccttgccgtccttgtactggtacagatcgcgtgtggtatccagatcggtgtagatggtgttggcggtgagttccgctcggctggatacctttctggcgctgtcgcccttgaatatgcccacgatggtggtcttgacggtcgccgtcgaatgtgattcgttgtcggcgtcgtaggcgttggccttgagcgtgagcgtgtctccgactttgagcccgttggctttggcgagatcctcatggatcatcgacgtgtacttgtcggaggccttcagatgccgtccttcggccatgccgagcgtgcgcgacgtgaacacgttgagtttcgacgaatcattcgtgcctatgacgttggcggcgttgccgaattgctgctccttggtcgcatcgtaatcatcgccgccggggaccttcgccacattcgcccccacgagatcggcggtggcgttctgacggaccatatacgaatcgactccgggcagttgggcgatcctgcgcacgtcggcgggacgcaccatgccacctccgcgaggcgtgagcatgctgccctgcaggttgctggccagcacgaacccgccgaccgcttccttctcgattcgtccggcggcctgttgagctgcccgagaaaccgcgatcgtggatagcatgctcgccgttatgatggtcaatactataaggagcactatggttcgtactcgttttctgagcacatagcgcaccgaccgtgcaacgaacgtcatcaatacctcctgtgggccttgggcttttcgcccaaaatgcgaaacatgccgcgtttcgccggttagttagccgcgacaatacatgatgcacctcaagatacgggaagagatacgccttgggcgaaaaacggaacagcggcgaatgtcgtttattctggattttggtccatctcgggccgcgtcgatacgtcggcccgagaggaatcagcgctcgcgcctcaccttcgaggcggcgaacacgaggagcggcagagcggcgaacgcatagttctcgcattggatgtacaggtatgcgaccaggacgagccagcagatgacggtcttgtgccagacgccggattcgcccggacccgcgccggcaacgccatcaccactattgcccccggcaacatcagcaacgtcggcaacgtcggtgacacaaacaccgtgcgccagcccgtcggacgatgcgccatccgcaccgccacggcataccgtcctcccgcgcgtcatgcagaccatcgaggctccgaccagcatggccagcccgatcagcccgtattcggcgatgacgctggtatacgcgcacatcgtccacaccgtgtccgcgttcacgccggccgcgaatcccgtggccgcgccgccgttcataccaagaccgtccagcagccgtccggctttggccgcgccggcccacaccgcattgatgatgttgcccgcgccataaccggtgagcagcgtccacggatgggtgagcaatccgcatatcggatcgaggctttggtagatccgcgcgaagaacgagccgtctccctcggccccgttctccgcgatggcggagagtctggaatccgccagcacacccagcaggcccagtgcgcatgcgccgagaatctgcagcatgccccggacgcggcgtgcgccgtcatgccaatcggtgcgcgccacaagggcgatcagcaacgccacgacggaatcgatgacgattctggtgccggcttgcatgagcaccgcgccgacggcatacgtgacgatgaggtcacgcagccgtttggcgtagatgcggtcgcgcccgcgcatgagccacatgagcggaagcagtatgccgaacaggtgcatgccgatatagctgggttcggcgaacaggaactgcggacggccgccgccccacaccgagttgtcgctgatgtattgccggtacatgaggtgcgagaaatagtcggtcaacggtttggcgcgcagacggatggacagccattgcacgacgcccactccgaaggaaacccagtatgatgcgatgagaatccgcaatggcgtacgccacggaatgcgtttgatgtcgaacgcaagggcgatcgcacccaaagtggcgagcacgcccagcaatccggtgatgctcatgaacgcggcgttgaggtggatgccgaacttcagccatcccgggatggacaggattatacagaccaccggtaggaggaacattggcaggtaccggttggctgcgatgcgcagttgccgccaattgcataggcagtacacggcgaacagcgccggactgattggcgaccagaacggcgcgtacaggccaagcgtggtgccgtccaccggaagaaaagcgacggccagcaacagccaaatgacgttgcgttcctgcgatgtcagaaatcgcaggaacgaccggtattgcggtcggccatgatggttgcccgcgtcgatggtgtcgttgcgtacgcatgcctggttcatgtgattctccctccccgtcaaccttactcgttcatcacgatgcgcggacggggcatgctttccccgccgaacgtgcaatggcccgaacattgacaaggccgcaccgaatgcccccatcattggcacattgtgcaatctcgtcgcgactggctgacgaaataatgttggccgaccggttacattggttcggtacagtgacggcattattggccactggatcaagcgatttgcggcagaacgacgaaagcgacacttgggcgaaaagaggcaggcatgaccacgaatcgaccgctcattgcggtgactccgctgatggattacgggcgcgatagtctgtggatgctgcccggatacatggaggcgataatgcgggccggcggtacgcccgtcatgttgccgctgaccgatgacgccgacattcttgcgcaatgcgccgaacggtttgacgcgtttctgtttacgggtgggccggatgtgggaccgatggttggtgcagtggcctccgccaccggccgtagcgaggtgctctctcctgagcgcgaccgaatggaatcgattctgctgccagctgtaatggcttgggacaagccgattctgggcatctgccgtggcattcagttcatcaacgcggcactgggcggcacgttgtggcaggatttgccaagccagcatccgagcgatatcgaacaccatatgaatccgccgtacgatgcgttcgggcacagcgtttccttggtgtccggcactcccctggcttcattgttcgcggggcagactgagattgcagtaaacagctaccatcatcaggcggttcgtgatgtggcccccggtctcgaagtcatggcctttgcgcccgatggcgtgatcgaggccctgtaccggccggcaagccacttcctgtgggccgtgcagtggcatcccgagtttctctacaaggtagacccacggtcgcaggcgatttttgatgcgtttgtggggagttgccgataacagcaaaaggggctgctccggttttccggaacagccctttttcagcggtagcagtcagcagactgatttagtcatcggtgctggcttgccagcgctgattggcgcgtgcggagaccgccgtccgaaggcgaggggcgtacgaaggtacgtcgaacctgaggaaaggcggtatacgctccgccaatcagtgctggttgttgagacggtggtacatctcggacagctccagttccttctcgaactggcgagcggtggtgttctcgtcgatgacggcgagctcaacaccggcgatgcgggcgaagtcttcccaagcctcacgaccgacggaggtggtcatgcaggtgtggtgagaaccaccggcggtgatccagcactcaacagcggtcttcaggctcggcttcggctcccagacggcgcgggcgcacggaagctccttgagggagccctgcggctcaacgacgtcgacgacgtccatgagcaggcggaagcgttcgcgaacgtcggacatggagaccacgacggcgtccttggtgggcttgccggagaagaccaggcggaccgggtcggccttgccgccgatgcccagcgggtggatctccagcttcggcttggcgatggtgccgatggacggggaaacctcgagcatgtgggagcccatgtcgagctcgtcgccctcggtgaagttgtaggagtagtcctccatgagggaggcgccaccctcaaggccgtagcccatgacggcgccgatgcgcacgaggacggcggtcttccagtctccttcagcggaaaagccccagccgtactcggacgggaagcgctgtgggccaacgcccggcagctgtggcagagcgccgaggtcctcgaaattgtcgacgccggcggtgcagccgttggcgcgcatcatgttgaccatcgcggcctcttccttggcggcgatgaacagggagtcgtacttggcgtccagcagagccgggtcgacgtcgtacttggccttgtagtcctcgatgatctccttgacctggtcgtccttgacggcgtcgtacgcagcgacgagctcgttgacggcccaagtgttgatggaggcgccgaacacgcgctcggcctcggtcttgtcgccctcggtgacggcgacgttacgcatgttgtcgccccagcgcatgaccttcatgttgttggaggcatcccagccggcgcaggcgcgggcccaggtgccgaccttctcgacgacctcaggatcggtgtagtggccgacgacaaccttgcgcttgatgccgaggcgggagacgatgtaaccgaactcacggtcgccgtgggcggcctggttcaggttcatgaagtccatgtcgatggtctcccacgggatttccttgtggtgctgggtggccagctgcagcagcggcttggtcagcacttcgaggccgcgaatccacatcttggccggggagaaggtgtggcaccaggtgatgacgccgatgacgttcgggttggcggaagcctcgaccatgaactccttgacaccgtcggaggacttcagggtgggcttgaggacgatcttggccggaatcttgccggtgttgttcaggtagtcgaccatttcagcggagtgaatggcgacctggcgcagggcttcctcgccgtacaggtcctgcgaaccaacgccgaaccagatttccttgccctcgaaggggttttccataaccatagggttacttcctttacttctttgtttatgggggtttgtttaagtttcattcgccgaccgaggctcccctcagagaggggagccaagacaccaccgtgctggcggagtcagcgctgatttgatgtgtgtgcccgcaacgcggcggacactccatcaaatcagtgctggccgtagacgttctggtagcggtcgttgagcttatcgatgtcggcctggtcgatctcgatgatgtcaccgagctgacgggcggcccacatggtgtgagcgacttcctcggtcatggcagcggccttgacggcgccttcagcatccttgccgatggtgaaggggccatggttctgcatgaggacggccggggacttcgggtacttcttgagggtctcgacgacacccttgccgatcgcctccgagccgatcagacggaacgggccgaccggcaccgggccgccgaactcgtcgcccatcatcgtcaggccgcacgggatgttctgaccagtggcagcccaagcggtggcgtaggtggaatgggtgtgcacgacaccgtagacgtcgggcatgttgcggtagatgtaggcgtgggaagcggtgtccgaggacggggcttcggcaccgtcgaccacgttgccgtcaaggtcgcacacgaccatggaggacggggtcaggtactcgtagcgcaggccggagggcttgatgacgaacaggtcggcggtgtgcagacgctgggaaacgttgcccgcggtccacacgaccaggttccacttgatcagctgctggtgcaggttggagacgacctcacgaacctgcttgacctcggcgcgaacctcggggccgtaatcagccaaagttgccattattggttttcctttccactgtgatggatggacgttttttcaaaatctcaaggacctctctcaatcgagggaggtcagaacggcttacttatcttcgaggttgatggtttcgatggcagcgtgctcgatgggcaggcccttggtgaagcgggcgaagaagtcctcgaaaccaaccacatcggaagccaccggcttctcagtggtggactgggcgtccttgaacacgaaaccatcaaggaagtcagcgaggttgctgtgatcctcgttggtgttccacaggtagttggcgagcacggccataccccaggcaccaccttcggcggcggtggacatgaccttgatcggggcgttgaaggcagcggcgagaatcttctgagccaccttcggagtggtgaagatgccgccgtggcccacgagagagtcgacctgcacgtgctcctgcttggtcatcacgtccatgccgatcttgaccggggagaacgcggagaacagctgggcgcgcatgaagttgccgagggtcatgttggcttcggggctgcgggcgaacagcgggcggccttcaggcagaccggccaggaattcgccggaacggaacggatagttcagcaggccgccgcagttggcgtccacgtcgtcggcgatggccgcgcggaacaaggtgccgtacagcataccggcatcaaccgactggccgatggccttggcgaactggccgaacaggccgacccaagcgttgaggtcggaggtgaagttgttggcgtggctcataccggccagattgccggccggggtggtgaccaagtcaacctcagggtggagggccttgagcttgtgctccagaaccaccatggcgaagatggaggtgccggcggagacgttaccagtgcgtacgcgcacggagttggtggctaccatgccagtaccggcgtcgccctcaggcggggcgagcacgatgccgggattcagggcaccggacggatcgagcagcttggcgccttcctcggtcagctcgccagccggagtgccggccacgagcggctcaggaagcaggttctccagcttccacggctgggctgcgacctcaggcagagcgtcgaacttctcgatgaatgcggtttcgtaagtgtgagtggtcgggtcaatcgggaacatgccggaggcatcgcccacaccgaggaccttctcaccggtgagcttccagtgcacgtaaccggcgagtgtggtgaagtaagccacctcggagacgtgctcttccttgttgagcacggcctggtacaggtgagcgatggaccaacgctcggggatgttgtactggaacagctcggagagcttcttgtgagcttcggaggtgttggtgttctgccaggtgcggaacggcaccagcagttcgccggcttcgtcgaatgcgaggtaaccgtgcatcatggcggagaagccgatgtggccgacgtgcgtgagcttctcgccataggcggtctcgacgtcgttggccatggaggcgtaagcggactgcaaaccgccccagatctcctcggtggtgtagctccacagaccatcctccaagtgggaggcccagctgtagtcgccggaggcgatggtctggaagttgtcgtcgatgaggacggccttgatgcgggtggagccgaattcgatgcccagcgtggtcttgccagcgcgaatcttctcggcgatgtgggcggcctgctcggccgcgttgtcggttgctgccatatctttcctttgccttggagcgccggcgttgttatccccttccttggggaggatgttagcgctcacaatttcaaaaaaacattgtaccgataacctgcattcgacacaacttataccgtgtcacgcatcataacggtttgataacagcgccaatttaccgccgaggagccggccccaaggaccgccgagcacgcacctcggcgggaatcagccccatgccgtgctgggtggtcaggaaggtcggctcgccgccctcccccagcaaacgcagcgtctcgcgcatggcggccacgccaagcccctcgaaatcgggatgcacggtggtcagcggtgggtacatgttatccacgccagacatgtcgtcgaatccgaccacgctgatgtcttgcggaatccgaagcccatgctcatgcaacgcgcgcatgacgccgacggcctgattgtcgttcgcggcgacgaccgcagtgggcaacgccatgccccgacgcccatactcatcaatgagatgattcatgtgcgcatatgcctcagaggcatcccacgtatggcagcgcacgatctgtgaatcgatggatcgggaggcggcgagcttgcgccacgcatccagtcgggtgtgggcgtcgcgccattcgttgggaccggcaaaatacagagccgatttgtgcccgtattcgcccagcaaggccaccactttggccattgcaccccactggtcgataccgaccagtgcagtgcgacgcttgttttcggtggagataaggcccaatccctcacgcacggtcatttggccgtgggtggcggtgacgatgacgcgcggctgagtgactcgcgcacggcaggcggcggcgaacatcacgtcggtcggggtcaggaagatgaaggcgtcgacgttctgctcgttgaaggtgtcgcacaggttgtcgaattcggactgcatgcacaaggcctcgtggaccatcatcacgctcatgaacagaccgtgttcgcgggccatggattcgatggatgagatggaggaaatcgggccgaagaatttgaggcctccggcgatcagccctatggtgcgcgaacggcgggaagccagtgcgcgcgcggagttggaggggcggtagccgagttggtcaatggcggcctggactcgcgcacgggtggcgtcggaaacgtccggcgagtcattgatcacacgggagacggtttggtggctgactccggcgagcttggccacttcgaacatggacggacgtttgcttggcttgcggctggtcaccatgctacctaacctccccgctggcggccggcacccatgcgcggccaggcttgtaccttaatcaatactgactttagcgcgtccacaacagttttgcgttagcgctcacactgtcgtgtcgcacgcggctcaggtcaggtgccatgagacacgatggagcggagtcggcccgtgttcggcgatggcggcacggtgtgcggcggaaccatagcccttgttatgagcccattcgtaggcggcgtaacgtgggttgctttgcgcgaggtcgaccatcagccggtctcgggtcactttggcgatgaccgccgcggtggcgacggtggcgcaatgctggtcgcctttgactttggtcgttatatcggctggaatcggcacgtccggcgcgtcgaacgtgttgagcgccttggtgatgtaatcgctcggcccgtcgagaattccggcgactttgggcagggcgcgaacgctttccccacaatttccaatggattcccctacggagtctcccggacgaccttccacaatctcccccgcagccttttttgccgtcaatccccctccaagccgtaagccaagttcgcgttcgacttggctgagcgcgcgcagggcggccacgccgagcgcataggtgatgccccattcgtcgatctcggtgttgctggcctggcctacggcgtaggccgcgcaccagtcgcgcagttcgtcgaaaatcgcctcgcgcctatgttcggtgagcattttggagtcggccacgccgtccggtacgccgaggtaggtccgcccggacagttcggcggaatcatcgccgtcaagcggcgccaaatcacaggcccagatggcggcgcacccgaccatcaccggaccggcgagcgcgccgcggccgacttcatcgaatccagtaataaggtcatagccctgggccgcaaggctgcgttccaagtcaagtgtcggggtaatcatgcgcggctcccatcgtctcacaatggttaggattcagacggtccaggttcaaatggttcaggattcagacggcccggaactcaatcgttcaaagactcacacggttcaaaaaagactcaggaatttgagccggaagcgtcaggcacgtccttgaagacttcgtggtggtcatcaatcgcaccaagccggtcaagcggccagtatctcgcgattccgactccgaccacatcggagatgggaaccaagccgcgatcgccgtcatcctgatgatagcgggagtcggcggaattggcgcgattgtcgcccatgacgaacacgtggtcctcggtcacggtcaccgagaacgggaaggcgctcgggtccacgccggggcgaatgtaggaggtctcattgatggccacgccgttgatggtcaccggctggcccgcgcccttgcattcgaccacgtcaccgggcaggccgatcagtcgcttgatgaggtacccgccaccgggagcgctgctctgctcctcgttcaaccagttgttgggatctttgaataccacgacgtcgccgcgctgcagatcgaagatcttgggggtgagcttgctggtcaccacgcgatcgccgggcaccatggtgtccatcatcgagcgcgaaggaatctcgtaaaagccgacggcgaaaatgcgaatcagcagcacgataagcacgggaacgccgcaccacaggaaaaagtcgcgtagggtgaagtggtcatcatccatcgatgatgctgccgcggcattcgcgccagcggaagaagcggcgtgcgccgggcgcgccggtgccgggggaaccggggacggggcgatgccgtggtcggcgacttggaacgtacgggaatcgcgggcatcggcctcgtcatcatacgaggtctggttgctctccggattgtcggaaatcgggaattcgccgttatcctgatcgtcctgcataccatctcctcgcgattcatgctgccggatatgaggggtgccggcgcccgtccatcatacgtggaaaatacggaaacagcccgaaaccgaaacggttccgggctgaatttcacggtttattcgcgcacctgcatcatcaggcccacgattgcacccgcgaatcgactcacttagcggagttgtcgcggcgctcggcaatacgagcggccttaccgcgcagagcgcgcaggtagtacagcttggcgcggcgcacacggcccttacgcacgagcttgatggagtcgatggacggggagtgcaccgggaagcgacgctccacaccagtgccgaagctgatcttgcggaccacgaaggtctcacgcacgccagcgcccttacgagcgatcaccacgccggtgaaggtctggatacgggagttgttgccttcctggatcttcacgttcacgtcgacggtgtcgccgggacggaaggccgggatttcctcagccggcttcatgtgcttggcgtcaaaagcctcaacagcgttaaccattgttttccttcagtgctgccgcatatcagccacagatctggggccatccacgcgattgcgcatcacgtgcgttggcctgttctcgttatccctcgggtttgcccttgggaagcctgccgatccgccgaaagtcaggccttgcggccgttcggactggacccatggagacgtgggcttatgcggcggcccacttctcgacacagcaatcgtcaattgtacggattattgcggacagaatggctgcctgatggcattccaacaccaaggcactgcgacgtagttgacagacctgcaggcgggctttatcttgggagcgtcggtaggcgaggctaccgcagggatatgggttgctgccgctaacagtggagacactgcacgcaggtcagcagttcttgtcggatcaaggcatgaactaacgcaattccaccgccctgcgatgctgaagcttgaacgatggctcgaatcggcggattcgaatactttccgcccctcctgctggtcgcatggataccgacgatggtattgatctggcgtttcagcgcacggcttgaaggaggtgagagtccgatggacggtgattattccagtagttccgccgccggcaacagtcatagttgcggtggtgatgaccatgttttcttgtattccgttatccggaagtcgggctctcgcctgtagtgttccttggctccccggataacccttgcataattcgtctttcctatgcatagggaggtcttttcatgaccatgttttcattcaatcgcgtcggcgcgcgtccaaatgcgtcggcccgcaacccttccaccgccgcgtccgaccgccagccattcgccgtgcgcctggcctccgacgtactggtcgcggccggtattctggcgctgttcggtctgatcgcttggattctgccggcgatcggcgaaccgatcggcccgaaaggcgtgccgtcacaagtcagtacgcatctcgccgacctgccgtattacgcgctgcgctcggtgttccgcatgctcgtggcactgttcttctcactggtgttcacgttcatctacggcacggcggccgcgcgctgccgccgcctgagccgcgtgctgattcctctgttggatattctgcagtcggtaccgattctgggctttctttcggccaccatcaccatctggatggtgctgttccccggctcgatgctgggcgtggaggccgcgtcgattttcgcaatcttcaccagtcaggcctggaacatggcgttctcgttcacccggtccctgaccagcgaaccaactgaactcgacgaggcggcccgctcactacagctcacacgctggcaacgattctggacactggacgtgccgaacgcgatgattccgctgctgtggaactgcatgatgagcgtgggcggcggatggttcttcctgaccgcctccgagatgatctcggtgaacaatcgcacctatgcgttgcccggcatcggcagcttcgtggcacaggcggcggccgaggagaatctcgcggccatctgctgggccatcgtgacgatggtgctggtggtgctgcttatcgacgtactgctgtggaagccgttgaccgcgtgggcggagaagttccgcattacgcaaagcgagtcggcggtgcgcaagaccagtgtggtgctgaccatcattcgtcagtcacatatcgatgagatggtggcctggctgttcaggcctctcggcgacctgttcgacacgctggcccgcccgttgggtcggaccggtggacgttgggcggcggacgtgaagtccgcacgcagccgcgcgcttgacgtggtattcacagtgctggtgttggcagcgtgtgcgttcggactggtgcagcttatgctggtgattcatcgcgatgcgggattcggcgagctcgggcaggcgttcgtgttgggcatggtgacgttcctgcgcgtggcgctgcttacgctcgtctgctcggtgatttgggtgccgattggcgcgatgatcggcatgaatccgcgcgtttcgcggtttatgcagccgattgtgcaggtgctggccagcttcccctcgaacttcacgttcccgttcgtcacgctctggttcgtggcatgcagcgtggatatcaactggggcagtattctgctgatggcgttgggcacgcagtggtacatcctgttcaatgtgatcgccggggccagccagattcccgacgatctgcgtgagatgacgcgcagcttccagctggggcgctggcagcggtggcgcgatttgattttgccggcggtattcggctcgtgggtcacgggcggcattacggcggccggtggggcgtggaatgcctcgattgtctcggaaatcgtaagttatggacggcatacgctgaccgcctccggcttgggcgcgtatatcgccgaggccaccgaaagcggcaacaccgtgaggaccatcatcggcgtgaccgtgatgagcgtgttcgtggtggccgtcaaccgcctgttctggaacccgctgcagcgcatggccgagcgccgtttcgcactgaactaaagacttaaggagaataatatgactgttgcaatggaaaccattcgttcgctgcgggcgatgaccccgcagaacaccatcatcgaagcccagcacgtcggccagcgcttcacggccgacaacggcaccgaactcaccgtgttcgacaacatctcgttcaacctgtacgagggcgagatcgtggccattctgggccgttcgggtgccggcaagtccacattcctgcgtgcgctggccggactggtcaagccgaccagcggcacggtcaagtatcgcggcgaggccctgaccggtccgaatcccggcatcgcactcgtgttccagaccttcgcgctgatgccgtggctcaccgtgcaagacaatgtggaactcggtctgaaggcgcgcggcgtaccacgtgcggaacgcaccaaactggctctggatgccatcgacatgatcggcctggacggcttcgaatcggcgtatccgaaggaactgtccggcggcatgaggcagcgcgtgggcattgcacgcgccttggtgctgcggccggacgcgctgttcatggatgagccgttctccgccctggacgtgctgaccgccgaaaacctgcgtcaggaagtgctcaagctgtggtcgagcgaacagcgcagcatcaagtcggtgcttatggtcacgcataacatcgaggaagccgtggagatggccgaccgagtggtggtgttgggctcgcacccggggcatctgattgccgatgtgcgggttgatctgcagcgcccgcgcgaccgtcacagtgtcgaattcgaggcgatggtggaccgactgtacgcgattctgaccggacaggcctcgcagcctacgcaacaagccgaggctctatcgccatcggcatcgctcacgaacgcacccgtcacgaacgcacccgtcacggacgcatcagaccttcagcccgccaagaccatcgagaaaatcaaggagcatccgctgcccaacgccacgccgggcgggctcgccggtctgctggatgtggttgccgagcatcctcacggcatcgacttggcagatttggcctcggctctttcgttcgaggtggacgacctgttcccgctggtggatgccggtacgatgctgcgcgtcatcgtggtacgcgacggccatgtgcagatcaccgaagcgggcgacgcctggcataaggcggacattctgcgggccaagcaggtgttcgcctcactggcgatggaacacgcgccgctggtgcgcaacattgagcatgcactgcggaagtctgcggaaggcaagctccgcggcgagctcatgctggacctgctgcgcgcccgttactccaacgacgaggcgcatcagcagttcgccatcgccgtggagtggggccgttacggcgaactcttcgattacgatgccgatgacgatctgctgagcttggatgaggcgaataagggcgaataagcgaatcagccacgtgagttggccagatagtgcctttatgcctgcaaacagatgccgaagcggaatatgaccatgttcgactcatctgactgacagcaatccgtatatgcaaagtgcccggcatccgaagatgtcgggcactagtcgtgagagagactccctcagtcagctacactgacacctcctctcacccgagggggcaccagaggaacgaatcagaactcgcgacgtgggcagtcgccagactgcccaccagacagcacagccgcggtcgcgcgaatcacgaattctgaccgagcaaagcgaatcagaactcgcgatttgcgcggtagaacttgatcaggctctgggtggaggcgtcctgggcggcgagggcgtcgtcgtcctgggagatggcctgggtgatctgcttggcaagctgcttgccgagctcgacgccccactgatcgtaggagtcgaggccccatacggtgccttccacgaaggtgatgtgctcgtacagggcgatgagctcgccgacggcgaacggggtcagagccacaccgaagatggaggtggtcggacggttgccggtgaacacgcgggccgggacgatctcctccggggtaccctcggcgcgcacttcgtcggcggtcttaccgaacgccagggccttggtctgggcgaagtagttgcccaggaacagctcgtgcacgtcctggtcgccgtccttggtcgggttcggggtgttgacgaacgcgatgaagtcggccgggatgagctgggtgccctggtggatcagctggtagaaggcgtgctggccgttggtgccaggctcgccccagaagatctcgccggtctcggaggtgacgggggtgccgtcccaacgcacggacttgccgttggattccatggtcagctgctgcaggtaggccgggaagcggtgcaggtactggtcgtacggcagcacggcgtgggaggcgaccttgaagaagttgcggtaccagacgttcagcataccgagcagcaccacgacgttcttctcgaacggggtgttggcgaagtactcatcgatctcgtggaagccgtgcaggaactcctcgaaacgagccgggccgaagacgacggccagggaggtgccgacagcggagtcgacggagtaacggccaccgacccagttccagaagccgaacgcgttgttcgggtcgatgccgaattcggcgaccttctccaggttggtggagacggcgacgaagtgcttcttgatggcctcggcgttcttctcgtcggatccgtcgatggcgcccttggccttgagctcttcgagcagccaggtgcgggcttcacgggcgttggtcagggtctccagggtggtgaaggtcttggagacgatgatgaacagggtggtctccggatcgaggcccttggtcttctcggccaggtcgttggggtcgatgttggagatgtagcgggcggagatgcccgcgtcggcgtacggcttgagggcctcgtacaccatgacgggacccaggtcggagcc

SEQ ID NO: 3679 - DNA, 17881 bp, Unknown
  R150_10m  MAG No. k141_395
gtcaccggagtagacggcgtaccgccctggttaccggtatccacccggttggcggcgtcctgctgttccttctggtactgacgattgtaggaatcgacctgggaagcgatcagtacggtctgggccgcctgcttggcggattgggaatccagactgtcgatcatggaagacagttcgtcacgccttgtttcgccctcctggcgtagcttgtccaaagcgtcacgttcgctttgcgcggtttcggcggcggtctgtgcggaagcggccttctcatcggactgggtcttgagcacagcgatctgcttttcgatggccgccagacgttcgccacggttcttcgacgtgctcagtgaggtcgcggcggaggaagccgcattcgcctcgttgcgggacaacgcgtcccgggactgcatggagttgacgaagtcctgtgtgctggtggcacccgtcaccacgctcatcacgtcggaagcattcgagccgtgcatctcgtcacgggccagctgggccacggcggcgtgcgcgtcatcgtagtccttgccggtctgcttgatccgctcctcgagcgtctccttgtctttctgcgcggcggaaagacgtttggatgcggcgtcggcctcgtcctgagcggtggcggcatcctcgttggcctgcgtgaccttggcctgcgcggcgacaatcttgttgttggtcagatcgtccagctcaagtaccttattcgccaggtcctggctggcaccggccagctgctgcttgagttcggcctcgcgctgtaccgacgcggcgtgctggttctgcgcattgatcaggtcggaataggtgtctgcctgggcaggctgtgccgagctgaacgccagacctcccacacaggctgcggcggccaccagtgccgccagtgcgggcttgatcacacgtacgttcgtcatatgtgaatagtcctttcgctcacttaagccaataccataacatgcgaacctgagaggcttgcacacgatgtcatcacatttctcgcgggtaagccggtcgcgttacgccctcaaataacgccgcaacgagatggttgaagcgatgatggacagcagtatcgcgcccacaaccaggaacggcgatatcaccagtaccgtgagctgattcacataaggaatccatgtaacggatttcgccagccagccggtgacgaacacgttgacgatagccgaaagcatcaggcacgagagcaccgagccgatcagcgaggcgatggtgccctccagaatgaacggcagacgaatcgtccagttcgaggcacccacgtacctcatgatttcggtttcggttcgtctggatgcggcggacatacgaatggtggttccggtcagcaggatggcgaccaccaccatcacgccggcgagcacagccgtaaccgccgtggctcggttgagcacggcgaacaccgggtcgaagatctggcgctggtcggtgacgtcctccacgccctccttgccggagagcacttcggagaccacctgatatttggtggggtccttgagcttgagccagagggagtcctgcatatcgtccgcggtcagcgtacggccttggaattcaccgttcgggtactgcttggtgaaggtgttgtcgtagaaatcctgcttgctgacatagtcgatgttggagaccacgtcgttgagttcatcgcgaatggttttctgcagtgccgtgatctcattggctgagggcgatttgccggaagcacagttcgcggactggctggtgccgtcgggacatagccacaccacgacctcgaccttgtcgtaccagtcgcccttggctttggtgatctgcgcctgagtaagcaccgaagcgccgatgaacaggaatgagatgaaggtgaccagcgtcagcgacagcagcatcgacaggttacgggtgaggttggcccacgtttcggacagaatgaatcgtgctcgcatgatgatcccccttactccttcgcgccctcagcgggttgatcgtcggatgtttggtctgcggcggactgctcgtcggcggactgctcgttggccggcggtgcgggtggttccggcggtgcgggcggctccggcggggccggcggctcggcggcggatgacacggacgtatcggcaaccgcggcggtcgcggcggactcgtccttgaacgggtcgaacgcctgggtgctttccagggcggcggcctgctcatccaacgaaatgcccttgccccaggtcagcgtgtcttccagcggcgcaaacgtctcgccatagcggccggtgcggccggaatgcacggaattggccaaacgggcgatgccttcggacggctcgtcactgccctcgatggccttggtcgccgccgccagcacatgatgggcggtgtcggacttggcttcgacttcggcatccgggaagaacagggcggaatcgtaggagccatgagcctcgtcacgcacgatcttgccgttgtgcagttcgaccacgcgcttgcgcatcgagttgacgatctcttcgttatgcgtggccatgacgatggtggtgccggtgcggttgatggcgtccagcacttccatgatgcccagcgaagtggtcgggtcgaggttgccggtgggctcgtcggccagcagaatctgcgggtgattcacgtaggcgcgggcgatggccacacgctgctgctcgccaccggagagctcatgcggatagttcttttccttgccggtgagtcccacggtattcagcaccttgggcaccaacgatttgatggtggaccgccgcgtgccgatcacctcaagggcgaacgccacgttctcccatacggttttgttattgagcagcttgtaatcctggaacacgaagcccagcgaacggcggtactgcggcacttgacggttggtgatgcgccgcagatcgttgccggccacgcgaatctcgccgctggtggcctcctcctcgcgcaacagcaggctcaagagcgtggtcttgccggagccggacgcacccacaaggaacacgaaatcaccgcgttcgatatcgaggttgatgtcgtcaagcgccggtcgggtgcctttgggatagatcttggacacattgtccagtgagatcagtgccataatgctgtttactcctcggtttcggcggcgcggcgctgttcatggcgccagcggatgccggcctcgatgaacgcgttgatgtcgccgtcgaacacggcctgagtctggctggtttcgtagccggtgcgcaggtccttgaccatctggtaggggtgcagcacgtaggagcgcatctgatcgccccagctggccttgatgtcgccggcgagctccttcttcttcttggcctcctcctcgtggcgcagcacgagcagtcgggactggagcacggccatggcggaggcacggttctgaatctgcgaacgctcatcctgcatggtcaccacgatgccggtgggaaggtgggtgatgcgcacggccgagtacgtggtgttcacgccctggccgccggggccggaggaacagtaggtgtccacgcggatgtccgtatccggaatgtcgatatggtcggtggcctcgaccagcggcaccacttccacggcggcgaagctggtctggcggcggccctggttgtcgaacggggagatacgtaccagacggtgggtgccgccctccacggacagacggccgtaagcgtagggggcgtccacctggaaggtggcggacttgatgccggcctcttcggcgtaggaggtgtccatgaccttggccttgaagccgttacgctcgcagtagcgcaggtacatgcgcaacagcatctgcgcgaagtcggccgcgtcgacgccgccggcaccggagcggatggtcaccacggcggaacgttcgtcgtattcgccatcgagcagggtctggatctccatctggtcgagatccttctgaatctcgccgatttcgctttgcgcctcgtccagagagtcctggtcgccctcctcgtggccgagttcaacgagcgtttccacatcgtcgatgcgctgggaggcggagttcagacgcttcagctgcgattccgcggcggacagccggctggtgatcttctgggcgttttccggatcatcccacaggcccggggccgcggcctgcgtttcgagatccttgatatcggccttgagccggtcgacgtccagcgccttggcgatggattcgtatttggcgcgggcttcgccgatcgcctgggtaaagtcaaattctgccatcgtggtttaccttactgttgattctttgagattctttgggaagtcacgtccttgttgacagccttcgcacattcctctggcgttggcgggcattgccgcgccacacacgcatccgcctgcaatccatgctgccagaaggttccgggcctgccttgccgatagccggccgggcgacctcacaaatccctcgcatcagacgtgttcaactgcgggcacgaatatgcgaaggcaacgtcaaagccccgcgtaaatcgccgggatgatcagggagccgagcatggccacagctatgacgacacacaccacacgcacgatggtgcggcggcggttctcacgctgctgtcggccgtcctgatagttactcacgagaccaatagtgtactcaccgcttacgaccgcaggacttgccgccgacgccagccctgccggcgggcccccacggccctttcctttgcgctttcagcgccgccagatggtgtttcatggccaccagcatgatgtgcgaatcctcaaggcccaagtggcgttcgttgtgggcggaatcaagcgcgccctgacgtttggcgtaggcgtcgagcgtgttgtctccgtaaggatgctcgttggtgggtaccgcgccggggtcccactgccggctcatcggcagggtatcgatgatggtgatgcgcccggcacggtagctttccgcgtatccggcgacgttcagcatgaaccagctatgttcgaaggtggcgttatgcgccacgtacggctgctgggtaagccgcgcgagcaggccggcctgggcttggggccattcgtcgaagagtcggtacccggcctcgctgctgcggccgcgtacatcgatgccggtgagtttggcgatgagggcgttgccgagcgccgcgttttccggcggcacgccaaaagcgagacgggactggccgtaggcgtcgccggcggcgtaatagccctgctcataggcgtatgtctcaggttcgccggccgggcgcggactggccatgttcatgaactcgaagccgacgtcgatgatgtagtcacgcgccggatcgatgccggtggtttcgatgtcgatgcccatcaccgcgtccacgtcgcggccgggcagataggcgtcgcgccagtcgggcttgggatggtggccggtagcgttgccagacgaggcggcaccacccggcgaagtcgcgccggagagattggcgcgggccatcgccgcatcgcccgcacgcttctggaagcgctgggccttacgtcgttcggcgcgtgcgtcaagaatcaccgccgtacggtcttggatatcgtccaaggcgactgttgtggggaacttgacatcgctgttttcggcagcagtgtttccggcagatgcgtcaccggtttcaccgctcagattcagcatgccttggtcatcgttcgatgggcggctgccggagtacggcctgagcacggcaacggtagtcctcccccgccgttcgcgactgaccacccataggtgttgctgttcgcccagatgcaacagcgtgttgatgttgtcgttgagccgacgattggcgtaggcgagcgcgcgaggcagacgataggagccgatgaatcgatcgtaatcggtcatgaatgtgctgttgcattgggcgatgattgattccagatgctcgcgtgtggcgtaatcgaccttcaatgcgtcgtggatagcttgtggcgtcagttccggttggtccaacccgagctgaggctgtgctgcggtttcgccatattgctcaccatctgcagcaagcgccagcaatacgctgatgccatgcatcaggtccagcgaacgcacccagtcccagtcaatggtggtgccgtcggcgtctttgggcatggacgccgcccattggggaatgtctcccttggcggcgtccagccatgtgcggtcgatcatagtgcgaagccgagttcttcggcggcctcggtgggtaccgggtcgtcgcaccaataatcctcgaggttttcggtggtggtcagcgaacggatttcggcgcgatcgatatacagttcgccgctcaaatgatcggtctcgtgctggaagatgcgtgcgggccagccgtgcaacggctcgctgtggtgcttgccgtcttcatcatcccattcggcggtgatgtcgagccaacgcttgcgcacggcctggtatccgtcgaagctcaggcagccttcgtagaacgaggcggttttgtcgctggtgggtttgtagctcggattgatgatcacgtggaaggggaattccgcgatttcgcgcggatcatcctcgtcgtcgcgcacgtggtcttcgaccacggcgagcgcgagccccaagccgatctgggtggcggcgagccccacgccgggcgcctccagcatggtggtgtgcatcgtatcgatgagtttggcgagcgtacgcttggaaagctggccatggtaggccaccgtccgttggcgcaacaccggttcgccagcctgcacgatgggcaggagcttctccttgccgccggttttgatgagttgttcgacatcacggttgagttcgaggtcgactttggcgttctttccaaacattgcttttccttagggaagggtgctacagcgcgagttcttcggcgacgatcttggcgaggcgggtgcagacttcgtcggcgtaggcctgggtggcggcttcggccatcacgcgtacgagcggttcggtgccggaggggcgcagcaacacacggccggtgtctcccagcagttcctcctcgcgggccacggcatcctggatgcgcttgttggtggcggcggctttcttgtccacgttcggcacgttgatgagggtctgcggcagctgcgggaagtcggcggcgagctccttcaggctcttgccggacttgacgacctcgttgcacagggtcagtgcggtcagggtgccgtcgccggtggtggcgaattcgcggttgatcacgtggccggactgctcgccgccaagcgagtaatcgcccttgagcatttcctcaagcacgtaacgatcgcccacggcggtttccacggtcttgatgcccatgtctttcagggcgagcttcagaccgaggttgctcatcacggtgaccacgagggtgtcgtggttgagcttgccttcgcgctgcttggcacgggccagaatgcccatgatctggtcgccgttgatcatgttgccgtcttcgtccacggcgaggcaacggtcggcgtcgccgtcgaaggccacgcccatcacggcatcggtggccttgaccatggcctgcagctgctcggggtgggtggaaccggcgttcttgttgatgttgtagccgtccggcgaggcgttgatcacgattacatccgcaccggcacggcgcagggcttcgggagccaccacggaagtggcgccgttggcgcagtcggccacgatcttcaggcccttgagcggcttgggctgggttttgtcatcgttcagcggagcgatggtggccaccagatgatcgatgtacaggttggtggcggtggtctggtcgtggctcacgcggcccacgccggcaccggtcgggcggtcccagtcctggccgagcacggcctcgatgtcgtcttccttctggtcgggcagcttgaagccgccgcgtgcgaagaacttgatgccgttgtcgggcatcgggttgtgggaggcggagatcacggcacccatttcgacgttgagcacggaggtcaggtaggccacgccaggagtggggatgatgccggcatcgatcacgtcgaagccgccggcggccatgcccgcggacagggcggaagccagaaaatcaccggacacacgggtgtcacggcccacgagcgcgcggcggcgtccctcaggctgatcgtcttgggtgccggcgtcgccgagcacacgcacggcggcatcgcccaaatccaacgccagacgtgcggtcaaatccctattggccagtcctcgaacaccatcggttccaaacatcttcggcatatgaagttccactccttgtatcgcgttacccgcaccatcgtagtcgttgtgctccaccctaggacccgactcggcaaaaaacgccacggaatctgctctaggaccagacaatggcattcccgagccacaccgaaccctacccaatcggacgaatcagcgaatcaggcgcgtcggccttgaatcactccacgggtgcagtgtatgccagctgtgccacgaacagcccatcatctctcgtgacgatttgcgcacggccgggaacggcacgcttcggcttgaccttgccgataagctgcccctcgttgggatcgccggacagcaaaataccggtcatgcccaaatcctggaacgattgcagcagaggatcatacatggctcggctggcaccaccggtacgccgggtaatcacgacgtgcaggcccaaatccgacgcttgcgccaaatatggtgccaacggcttcagcggattgccgcgactggtggcgaccaaatcgtagtcgtcgacgagtacgtacacttccgatccggtccaccatgaacggttgcgcagctgttccggggtcaagtccggccccggcatgcgggtcttgaggtaatccgcgaggtcgaggaactgttccgtggcagtgtcgtcattggtgatgtacgccccgagatgcgagtccggtatctgtgcgagattggctcggcggtaatcgaccatgaagatcttcgccttaccatccgggtagcctcgcacaatctcgtgcacgagaagtcgcaacagtgaggatttgccggatttggcgtcaccgaatgcgtagaagtgcggctctttctgcagatcgagcacgaccggtgccagcgcgttctcattaataccgaggacgacccttcctctggtcagcaattcggcggccttcggttgcttcataaccgcggaaatcatcggttcgtaaggaagcttcgtgggtagcaagcgcagctttggaccgggcttgcccttccacgcggcatgcaccttgttgacaagatcggcaatgccatccgacacggtggctgcctcgtgattgctgtcaatacgcggcaaaacggcaagcgtatgcagtttcgccgggctgagtccacggcctggcgcgcccttaggcacggtcgtcgcgatcctgcggtcgatttgggaatcgccgggatcgccgagacgcagttcgagcttggtgccgatgaggtcgccgatgttggctcggatttccatccaacggttggcgctaagaattacgtgaacgccgaaagtcaggcctcgcgccacgatttgctgcacctttggttccagctcatcgtaatcgccgcggaacacaccccatccgtcaatcaccaggaacacatcgccgtaaccatcatccacttggccggctgccctgcgcctgcgataagtatccatgccgtcgatgcgctgttctttgaagaaccgctcgcgagcgtcgataatgccggaaacctcggcgagcgtacggcgtactttctcttcctcattgcccgcggcaacaccgctgacatggtcgagtccttccagcgtggtgaacgtaccaccgccgcagtcgatgacgaagaactgcacctccaatggcgtgtgagacaacgacaacgaggtgacgatggatcgcagcatcatgctcttaccgctgagcgggccgccgacgaccgcaacatggccgccagcgccggacaggtcaagcgccatgacgtcgcgcttctgttcacgcggcttgtcttccaacgcacaaggtgccatcagcgcgccgcgcttacgccacgatggcgaaatcaggccatattgcgcagtgacggtgaggtccggcatgaactcgtccaaggtgttcggcacgaccagaggcggcagccacaccacgtgcgccggcctgcccttgcctcgcatctggtcgacggcgtactggaacgtcgtggtgtctccatccaagcccttgggtacgccggacacgtacgcagcacggaatctggtgatggttccggccggtgttttgaggtaaccgatacccggcaggcttggcagttcgtatgcgtcggggatacccagcactgcgcgggattcggacgcggagaacgttttgaggccaacacgatacgacaaatgttcgtcaaggccgcgcaacttgccctgttcgagtctctgagaagcgatgagcaggtgtacgccgagcgaacgtccaacagcaccgatacgcacgaaggactgtacgatgtcgggttttgccttaaggagttcggagaactcgtcgaccactaccagcagcgacggcagtggatcgaggtccgtgcgcccgccgttgacgcgcgcatcctcgtattcggtgatgttcgccagattaccggcgtcgcgcagcagttcctgacgccggttgatttcgccgtccagcgcatcttccatacgatccacgagggaggcctcgtctccaaggttggtgatgatggacgagatgtgcggcatgccgcccatgcccgcgaatgtggcaccacccttgaagtcgatgagcacgaagttgagctggtcgggcgaatggctgagcgccaaagacagcaccaatgtgcgcaacacctcggatttgcccgagcccgtggcgccgacgagcacaccgtgcgggcccatgccgtgctggcccatttccttgatgtcgagatatgcggtgctggtgtcgtcgtgcagtccgataggcacacgaagacgttccttgcccgtacggtaggcccacagtttggcaaggtcaatatgacgaatatcgtcaatacccagcaatgccggcaattcgttggatttcttgtgcccggcagacgaagcggcctgtgcggattccgcatcctccacttcgtccggggcgctggcgagccgctgagcgatggcgagggcttctcgcaccgtaagcgcatccggcttgatgtcgaatggcttgatggtcgtggagaacagctccacggtgccttcctcatgggtttcgagcacattgaggccctcttcaaccgttgtctgagagaacagcacacgcagtacattgtcttcttcaaggtcgccccattcgtcgggcaggtcgatcacggtgacgccgtcaagaccatccgaagcgaatagctgagtttccttggcgagttgctcccggtcaaacccgtcgttgaccaccagcacatgtggcacgatttcatagtcgctaccggtataccggttacggtcaagcgcctgcgatcccacgagcaggtcaaccgcgtgtatgttcgaggtgaccatataacgcccatgccccactgtggaggcaagtgcctccgccggttcttgggcgagttcgtcgttcaatcccgccgcttggggcagcaaccgcacccaatcccactggccgatgcgagcctcggaagccaatacgacgatacgcaggcaatccggggcatgccaggtagccgcttggcacaacaccgcgcgcgcaagcgcctccgtacgctcaagatcgcccagcagctccactcgtttgaactgccgcatgttgacaacgtatggcatattgcgcaacgattcgtgcgccagcatgaaccggtgagcggccgatgccgaaactgggtctagttgtgccaatggcggcagctcaggcgcttcgagcgtgatgcacagaggctcatcatgcacgccgaagcgcagttgcatgaagtccccatcggattggatacgctcccatcggcgtgcgggttcctgcgcgatggcggtaagcgattgcggtgccggagcattccacaacgccgcgttacgctgtttgcgcccggctgtgcgcactgttttacgcaagcccgacaagtaggtaaggtattcgcggcgtgacgaggtgaggttcgccatgcgctgggagcgttgacggaagccgttgaccaccacgaatcccagcgaggagaccatgaacatgccaccggtgagcatgccggtcaggccggaattggtcatgagcatcatcaccatggcgctggcggtacccagcaacggtaccagcgaggtcagcagcgtattgacgccgtcgctgggctcaagttcaggcggctgctggagcacgacccgcccttttggagccttaggcccttcaagcctgttctgttgggtttcggaagtcatgaacgccgccccctgcttttcgccatgatgatgctacagcccatatcgccgagtgagatacgcgcacctgattgaatggcatgtcgttgctgagcaacgagatcgatttcctcgccgtcttcattgacgacgcgggtgccattagtgctgttaaggtcggtaatccacatatgtccggcggtgatttccaaacgcacgtgattacgcgataccgtgccggtgcgatcgggaacagccaacaccatatcaccgttctgttgcggtgatgggttacgcccgagcaccacattggaaggaatgaccaacggctcgcgcgagccgtcttcgaagtaaatggtgatttgcttgggtggcacgggcggcactgtgccggggcgcgcaggcaaggcattgccaaccggattggcagccggggtgggcaacgcgacatgcttcgccctcttcgtggaaggctgcgacacgggaagcggcatgggtttcgccgcagatactgagggaacggagggcacggaaacggcagaagccctcggtgcggcgggaaccgcacgaacgttggggactggggaaacagccggcaccgatgacatcgacggcactgcaagtggtgccgcgggcgtctttgggatcactggagcgggtaccggtgccgaagcagatgcggatactacagatgctaaggccccggaggtagtcgactcgtgcatcgtggaggaggaaatcgtatggaaccgaagctcctgtgatggcatcgcagtcgtgacttgcttgtggatatccacctcggcgagtctggcgaccttatccgcccatccctgcttaagttcagatcgggagaacaacggcgaacatatcataatcaacaatccgatgacgaataccatcgaagagaccgtaagcaccagatatttgacgaaggctctactgagtcccgctggcagtattccattacggtggtcgttctggcattcaacacgcactgtacgcacaccaagtgctactttgcccggggtttcgccgcgcacggcctcccatacggcaagcacaagaaccatttccacggctatcatcacgcataccaccagattgtgagacagcaccatggccactacggtgcccagcgccacgcagcatacgtcgatcagtgaagcaacgcattgtttgccggccgaggccgcacgatatccggtaatggtacgttccttacgcgaaacgactgatgttgctgcggccgctaccatgacatactcctgagaaactcaagtgcgccacctgcgaggaacgaggctgccggtatcagcatcatggagatgaagcacaacgcatcgccgattcgcgatagcgccagagaatggaacccattgtgctgcaccaccatgctgaatcccaacaccagtcccaacgcggcgaacgtgaccatacaaatcaaggggatcattgcctccccttcgggaattgcctgagtggcgtgcccaacccagagcaggggaatcgcaataccggccgcgcgcatcacatatcgttcgaatggtcgcccggattgacgcggcttcagttcgaagaacagcatcagcagcatactcagcaccagaaagccgatacggtcatacaggctgtggtagtcggtccactgtgccaatgcggcatatcccaatacactcagcaccacgcatagcgtgaaccccgtggagtattgtgccaggaacgaatccatatcctgccgaacatccttgcgggtcagcactcgcgcttcctcgggaatgcttccgcgcaccgtccatcgccgggtcatgtaggtccgccattccaccagataacgatcgggcacatgcaccacgatgttcggcatcatctggataccgcagacgcttgcggcaaccaccatgccggcaagcaactgcactgacagatcaaacagtacggttgccgcgctggccaaggccaatggcaatgccacgaacgacaccgcgctcaccacaccacgcaccattggctcgcgcacgcatacggacatcaacgccatatccgccaccgcgatgcctgatgcgcagaacacggccacggttgccggattacccgactcaagcaatgtggagacggtagcgcccgcgcatatggaaaaacatgctccggctactaccaaccacaccgccatcacacggttatgccatacgatttggcggcggcaacggctattacataccaatgccgccacaatgaacacggcaacgagaacgaacgtcacccaccgagacgagcctgccatgcgcatggcaggagtcagacgcatgaacagcaacgaggtcatcgccgcaaacagtacggcgacaatcaacgccaccctgttgaggtcgcgtcgagttaccccctcgtgctcgctgtgcatatgtcgttccttctgccgcctcttctctcaagacgccattatatgggtttgcggcccggtgtgtgctcttccgtctaattacggccggcttgtgcctcgaaagcatgcagcttgcgcataccggcatcgagttcgctacgacctttggccgcctcgttgtcttcatcgtcggtgtccgtaacatagtcgcgcacatataccatgctagcttcgaggtagccacgcacttcacgggcctcgggcgatttgtcgatgccggcgtagatgtcgtcttcgcaggtcttgcccatatcgatgcgctgttgcagcacctgccaggcacggccgtactcacctttgcgccgcttctcctcgatgtccttgcttttttcggcgatggtagcgtcgacctttgccttctccttttcgaatcgggcacgttgctctttgatctggttggataaatcgtccatctgcttcatgaacgcttcaaattccggggatgccatggttgctccttttgctgttcttccgggtatgcgtatacgtccgaatagggattaacggccgccgaacgtaccgccgcctgaacctccgctggagcttcccccaactgcaacaactgaaccacccgtggaaccggatccactgccaaaggtcatcttcacgccttcggagacgttcaccaactgctgcatggtgccaatgcagttcgcgaatccgctaaatgcggtgtacaggttgttcaggcagttgacgatatccataccccactggatggcctgtgtgacttcggcggcagccgtcactgcgaccagcaccggacccgcaccggggatgatcagttcgccggcgataagcttcagcaaggatatgatttcgtcgatggtgtcgagaataaggtcgaatgcagcctctgcgttctgcgcgagcgcattcaatgcctgcgacatttcggtgcagggctggcaaccttgacctgccacctcacctacggcattgttgcgttcaacaaatttatcggcggaggcaccagaccatgacgtctcattcacattgctggacatatcttggatggctccttgtacgccggaaagcgaagccgacaatgcatcccacttggcggcagtgtcttggagctcgtcccagtcaccgaagaatggcttcttcacccactcatcaacaatgctcacgccaaagagatacttagagacgaagtccacaacggtcacggccatgcgcacacgggatattcctatgctgattttgccgcttaactcatgcgctgcttttcttaccgcattgttctttatgtctttagcaagctgatcggaggccgattggacactggcagatactcgtcctaaaggaaaagcatcaagatgcagcatattatcggcagcatccctcttataatcgatatgcttcaatatctctcttgggactgcaccggtattcgacagaccaactttctgcccaagcacgtcgataagttttccagcctgcttggtgtcggcgaactcacctacatgctggtaaaaccgtaaatcacgtttgatgtcgccgaggtcatccggcacatcgacagtaatgggaccgaactgaagatcgttgttgtagtcatcatcgttgctgtcagccattatgcgatgctccttacgttaccggtgttgatttcagtttgctcgggcaatgtcatgacatccctgtcggcgtagagcgcctgcagttcttccaccgagcgtccaagagggtcattgcgggagatttccgcccagacgctcgcctcggactcctgctgcatcttctcgtaagcggccgccgagtctccgatgcgtacggaggcatcataatcgccgtcgttgtcgaagtcgatggcggcgtactgggaatcgccatcttcgaatacgctcacgcgggaatcatctccactgtccggagtgagggtgatgtcgtcacgaccgtcattgtcggcgtcaaccgtaaacgagttgcccttattcgcagtgttgttgtcgctacccgggggcaacggcacggtggacgagtcctgcttggacagggtgaccgatccatcgtcgtttatagaagcatgcgtaccgccctcggtgaggttcacggaatagtcgtcggtcgcatcgccatcggtgtccagaccaacggtattcgtggtgtccggtcgggtgactccaggaacatctggctgatgagttccagttccgggattggtgtttcccgttccgggagtagacgttccaggattccatggagttactggcacagtggtgttctgatcatcaccggaagcgtccacagaaccagtattctgccccgcattcacatcttgatcgtgacctggctgcgctgctgatggggtctgcggcgtcgccgacgattgaggagcctgttgcaccggctggtactggccggaatccgtgccggagccagctccaccgcccgagccagagccaccgccagaaccgcccgaaccggcaccgcctccgaaaccaccgcccccgccaccggtgcctccgggcattccaggatcaacagatgactcattgttgttcttgttctggttgtctcgaatttcttctagcagctggatgattttgttgagcagttccttattcgactgttccgtggctttggtgtctttggcggtgccttctactgcgctggaaatcgaattcagcatcgattcgatattgcccaaatagctgacggtggaatctttggcaatgccatagaacggcttaacaaaactcagcagaattccgaaattcggacttcctgaactgacaaattggcttttcgcgctggcgaattgagaggccgcctgattgaaggaatcagataccgtgcccaaatcatcagggtctacctgcataagcgatgcagccataacgcatcattgcctttccccctagttccttgtactcttcacaattggttaccccattgtgttctccattgtgccatatgtacagcgttcgtcaatgtttcctacagattcaatcggcgattcctaactgaattctggggaggcatgccatcataggcgtgttcgccgtaggtcaagccacctgaatacagccacatcccgtaatgcgcgccacgcggatcggacgacaaaggaaaacgaggatcacactgatccggccacctcaccgga

SEQ ID NO: 3680 - DNA, 37157 bp, Unknown
  R150_10m  MAG No. k141_532
ggcatcatcgcacgcgtctgcacatacctttccgaacatcaggtcaacgtgcttgacatttcccagaccatcatcgacggttacttcaacatgatgatgattgtcgactacgccaacgcggacaaggacttcggcgcgatggtcggcaaccttgaggacctcggcgacgacatcggtgtgcgcatccgctgccagcgtgaggaaatcttcaccaagatgcaccgtatttgaggcggcccgctcagcaggccgccgcacgcgaggaggcggaaagcccggtgggctttccgctgacggagccatccttatccctctgatgagggtgaccgccaaactagtctttaaatatcctgtaaggaacaaaccatgctgaacatcatggaggtccacgagaccaatcagatgatcgagcaggagaagctcgacgtccgcaccatcaccatgggcatctcgttgctcgactgcgcctcggacgacgtcgacaagacctgcgacaacatctaccgcaagatcactacctatgccaaggacctcgtttccaccggcaaggccatcgaacgcgactacggcatcccgatcgtcaacaagcgcatcaccgtcaccccgatctcgctggtcggtgccagctcctgcaagacgagcgaggacttcgtcaagatcgcccacgcgcttgacaaggcggccaaggaggtcggcgtcgacctgatcggcggctactccgcactcgtctccaagtccatgaccccggccgaggagttgctcatccgctccctgccgcaagccctttccgagaccgacatcgtctgctcgtccgtgaacgtcggttccaccaagaccggcatcgacatgaacgcggtcgaactgctcggccacatcatcaaggacgttgccgagcgcaccgccgacaacgactcctacggctgcgtcaagttcgtggccttctgcaacgtgcctgacgacaacccgttcatggccggcggcttccacggcgtcaccgaaggcgacgcggtcatcaacgtcggcgtctccggccccggcgtggtctcccgcgcgctcgatgcggccaagggcaaggacttcgaattcctgtgcgagaccatcaagcgcaccgcgttcaagatcacgcgcgtgggtcagcttgtggctcaggaggcttcccgccgcctcggcatcccgttcggcatcatcgacctgtcgctcgccccgaccccggccgtgggcgactccgtgggtgaagtgctggagaagatcggcctcgagcaggtcggcgctcccggcaccacagcggcgctcgccatgctcaacgaccaggtcaagaagggcggcatcatggcgtcctcctacgtgggcggcttgtccggcgcgttcatcccggtctccgaagacaagaacatgatcgacgcggcttcttccggttgcctgaccatcgagaagctcgaagccatgacctgcgtatgctcggtgggcctcgacatgatcgccattccgggagacaccaccgcagccaccatttccggcatcatcgccgacgaggccgcgatcggcatggtcaaccagaagaccaccgccgtgcgcgtgattccggtggaaggcaaaggcgtaggggagatggccaacttcggcggcctgatgggctatgcgccgatcattccggtgaaccagaccagctgcgaggccttcgtgacccgcggcggccgaatccctgcgccgattcacagcttcaagaattgattcggtagggtatctgctttcagagaggtacatttggcccctcgcggagagctatctgctttcaaagaggtacctatatgcggaaaccccgggtatgagcgttggaatatcaacactcatacccggggtttctcgattgcggtacctctttgaaggcagatagcattctgcaaacgctcgaatgtacctctttgaaggcagataccagctcgaattacctttctggaggtctattcccgtttcgaggggctgattccgacctttctggaggtctacttccgtttcgaggggctggtatatatgaagaccccgagtacaagcattgatatttcaacggccatactcggggtctcgtcctttgacagccccttgaagcggcagtagacctccggcggatgccaaatccgcccctcgaaacgcaggtagccttatattcagcgttcatcactgcgcgaagctcagtgtttccgctctcgcgcctgtcggcgttcgttcggcgtcgttactcgaaggcccaccgggccttctcctcacgctccgcccgcaaaattgagctggcgccaggcttcgtagatggcgatggatgcgcagttggtgaggtttagggaacgcagggacgggcgcatgggcagccgcacttgttcggccacatgagggccctccatgatgtccatcgggtcggggatgtcgccgggctcggggccgaacagcaggatgtcagtcggcttgtattccacctcggtgtagagcttggtggcgtgcgcggtgaacgcgatgatgcgcgaattgggcatcgactccaccagattgtcgaaattcgggtgcagcaccacgtgggccatgtcgtggtagtcgaggcctgctcggcgcagcttggtgtcgcgcaggttgaagcccaacggctccaccaaatgcagaatcgtgccggtcactgcgcacaggcggatggccgaaccggtgttgccgggaatacgcggcgagtaatagcacaggtgcggcgtcacggtttcggtggcggcggccttctcggcggaaagcatcgcgtccaccacggagatggggttgccgtgtgcgtcggtcaccagctcgtccggcccgtaattcgacttgcgatagccgtattcgaacattttctcgactttggtttcgggattggctggatttggtgtgctctgggggttgtgttttgcctcgttcgtcatagctgctaagaataagaacgatgaacgacacagcaatttctttgcgattgggagcatggtgggaggccaatgcgcgtgacttgccatggcgcttcggacgggccacgccgtggggcgtgctggtcagtgaggtgatgagccagcagacgcagatgagccgtgtggtgccgtactggaccgactggatggaacgttggcccgacgcccgctcactcgccgaggcccccaaggccgaggtgatcaccgcatggggccggcttggctatcctcgccgtgcgctgcgattgcaggaatgtgcccgcgtggtggccgagcagtacgccgacaaactgccgcgtacgtatgacgaactcactgcattgcccggcatcggcgattacaccgcctccgcggtgctgagctttgcattcggtgagcgcattgcggtgatcgataccaacatccgccgcgtgctgagccgtgtgttccttggcgtcgaatctcgcgggggagcggccagcccggccgaacgcgcgctggcgaaccgcatgctgcccaaagacgagattctcgggcgcgatgctgacgtcgccgataatgccggtagcgccgaacataccgtgaacagcactatccgtggcggcaaacgctcccgactgcatcgtggcgaacgcccatcggtcacatggaaccagtcggtgatggaactgggggcggtgatctgcacggccaaatcgccgttatgcgacacctgcccgattgcggatgattgtgcatttctcaaagccggccgccccggactgggggagcggcgcacccgcccgcggcagcgattccaaggcactgatcgtcaggtgcgcggtctggtgctcgccgcgctgcgcgagcttcccgctggagtcacgttgcccagggaagatgccgacaagctttggaaggaccagattcagcttgccgcctgcatcgccagccttgacgatgacggcctgatcgagattctggacggcggcctgcgattacccagctgacattgtgaaaatggcgggctccccaagcgtgtatgggtgtggtgaccgtagactggaagggttatggcagtgcagaggaacacatcaggcgcgagaacggcacgcggagccggcaccggggacaatgggccatccggcgggcccgcccgaaacgaccgttccggcaagccgcgcaagcgcaggatcagcaaaaagcagcaggccatctatcgtcgtcggcgtatcgtggccggcacggtgttgctgctgataatcgcgctgattgtattctgcgtgtacagccttggccggggtatcggtgccgtgaacacgatgattcaccatgacgaggtgtatgcgatttcccgcgacgccacgccggcgccgaagaaagtcagcaacgtcaaggattgctcggccagtgatgtgacattgcagctttccgcggcctcccaatccgtgccggtaggaggatcgcttgatttcaccgcgaccatcgtgcacgaggggtcaggcaactgtttggtggatggggccgattccggccgtgtgctcaccattacttccggtcaggaaacgatttacaagtccgatgtgtgcccggcggattcacgtctgctgctgatgtccaagggtgataaggacgttcagaaggtcacgtggaataccgatgcgaacgccacgctcaccgaatgcacggatgagtcgggttgggccaaggtcaatgcgggaacgtacgtggcgcagctgagtttgaaggatcatccgaaggtgaagagcgatccggtgacgtttacggtggggtaggacctgcggttggtgtttggacgctgggtctctccctcagtctcgctccgctcgacagctccctcgtcagcgggagctaaaaatgtcctcgcatatcagtattcttttgactttgcatgaggtgtgtcatattgcgggcatgccgtcgacaatgaagcgtccgcataggcatatggtggccatgccggcgctcccaggggaattaccacatattagcgagcgataaggaacgtccattggctactgagtctacgacgaacaccaccaccatcatcgcacgcgccgaccagcatgacattgatctgcacaaggcgtcggatcgcgtgaacttcggttccatcaaggaacccatcgatgtgccctacctgctgggcgtacagaccgacagcttcgattggctgatcggttccgaccgctggaagaagcgtgtcgaagaggatgaggctaacggcaccaacaccgtggcccacacctccggtctcgacgaggtcttcaacgagatctccccgatcgagaactttgcacagaccatgtccctgaccttctcggacccgtacttcgaggagccgcgccacaccgtgcaggagtgcaaggagaaggattacacctactccgctccgctgtacgtgaacgccgaattcgagaacggcgacaccggcgagatcaagtcccagaccgtgttcatgggcgacttcccgctgcagaccccgcacggcaccttcatcatcggcggtaccgagcgagtcatcgtctcccagctcgtgcgttccccgggcgtctacttcgaccgccagcaggaccgcacctccgataaggaagtcttcggcgcgaagatcatcccgagccgcggtgcatggctcgagttcgagatcgacaagaaggaccagccgcaggtgcgcgtggaccgcaagcgcaagcagtccgccatcgtgttcctcatggccatcggcatgaccaagtccgagatcgcccaggccttcaaggactacccgctggtgctcgacgccctggagaaggaaaccctcgagacccaggacgaggccctcgtcgacctctaccgcaagattcgtccggccgacaccccgacccccgaggccggcaagaacctgctggactccttctacttcaacaccaagctctacgatctggcccgcgtcggccgctacaagatcaaccgcaagctgggtgtcgaggccgatttcaacgaccgttccctccaccaggaagacatcatcgccacgatcaagtatctggtggccctgcacgacggtgcggcgaccttcccgggcaagcgcaacggcgaagacgttgacctgcgcgtggacgtcgacgatatcgatcacttcggcaaccgtcgtatccgccaggtcggcgagctgatccagaaccagctgcgtaccggtctgagccgtatggagcgcgtggtgcgcgagcgcatgaccactcaggacgccgaggccatcaccccgcagtccctgatcaacatccgcccggtgaacgccaccatcaaggagttcttcggcacttcccagctctcccagttcatggatcagaacaacccactgtccggtgtgacgaacaagcgtcgtctttccgcactgggccccggcggtctgtcccgcgaccgcgcctccatggaagtgcgcgacgtgcacccgtcccacttcggccgtatgtgcccgatcgagtctcctgaaggcccgaacatcggtctgatcggctccctggcgaccttcggccgcgtcaacccgttcggcttcatcgagaccccgtaccgcaaggtcgtcaacggccatgtgaccgacgaggtcgagtacatgaccgctgaccgtgatctcgaccacgtcatcgcccaggccaaccaggaacttgacgagaacggcaacttcgtctccaagtccgcccttgcccgagtcggcgaggaagaggcggtcgatgtgccggtgagctccgtggattacatggatgtctccccgcgtcagatggtctccctcggtgcctccctgattccgttcctggagcatgatgagggccaccgtgcactgatgggtaccaacatgcagcgtcaggcagtgccgctgatcgaatccgagcgcccgctggtgggcaccggctccgaatggcgcgccgccaacgattccggcgacgtcatcaagtccgagaaggacggtgtggtcacctacgtgtccgccgacctgatgcgcgtgatgtacgacgacggcaccaccagctcctacaagctggccaagttccagcgttccaaccagaccacctgctacaaccagcgcccgatcatccatgatggcgagcgtgtggaggccggctcggtgctggccgatggtcctgccatccagaagggcgacctggccctgggcaagaacctgctcatcgccttcatgccgtggaacggctacaactacgaggatgctgtgatcatctcccagcgcctcgtgcaggacgacaccctctcctccatccacatcgaggagtacgagatcgacgcccgcgaaaccaagctgggcgccgaagagatcacccgcgacctgccgaacgtcggcgaggacgctgtggccaaccttgacgagcgcggcatcatccgcatcggcgccgaggtcgaggccggcgacatcctggtcggtaaggtcaccccgaagggcgagaccgagctgaccccggaggagcgcctgctgcgcgccatcttcggcgagaagtcccgcgaggtgcgcgacacctccctgcgcgtgcctcacggcgagaccggtaccgtcatcggcgtcaaggagatcacccgcgaggatgccgaggaggacggtgacgagctgcccaacggcgtcaaccagatgattcgcgtctacatcgcccagcaccgcaagatcacggtgggcgacaagctctccggccgccacggcaacaagggctgcatctcccgcatcctgccggaagaggacatgccgttcctggctgacggtactccggtcgacatcatgttgaacccgctgggtgtgccttcccgaatgaacctcggtcaggtgctcgaactgcacctcggctggattgcccactccggttgggacatctctttggatccgaatctggaagccgagtggaagaagctgattccgtccggtgccgagaaggccgagccgaacaccccggtcgccaccccggtgttcgacggtgtcaagcctgaggtcctgaagggtctgctgtccactacgctgccgaaccgcgacggcgaccgtctggtcggccccgacggcaaggccaccctgttcgatggtcgtaccggtgagccgtacaccaagccgatttccgttggctacatgtacatgctgaagctgcaccacctggtcgacgacaagattcacgcccgctccaccggcccgtactccatgatcacccagcagccgctcggtggtaaggcccagttcggtggccagcgcttcggcgagatggaggtgtgggcccttgaggcctacggtgccgcctacacgctgcacgagatgatgaccaccaagtccgatgacgtcgacggccgcgtgcgcgtctacggtgccatcgtcaagggcgataacctgccgccggcaggtatccctgagtcgttcaaggtgctcctgaaggaaatgcagtccctgtccctgaacgtcgaagtgctcaacgccgaaggcgtggccatcgacatgaaggacgaggacgacgatccggccagctccgctgacgacctcggcttcaacattggcgcccgccccgacgcggccgccaaggaagaccagaaggccgaagagcccgaataccagtgatccctcgggctgcatgcggtcaatacgccgcgtgtagctccgccaacgtgaaataaataacgtacagagacctttccggtttgcactacccctcagtcagccttggctgacagctcccctgacaaggggagcttgggaaggtctcaagaacagaaacggattaacaagtgctggacgtcaacgcatttgacaagattcgcatcggccttgccaccgccgatgacatccgtggttggagccacggtgaggtcaagaagcctgaaaccatcaactaccgtacgctgaagcctgagaaggacggtctgttcggcgaacagatcttcggcccgacccgtgactgggagtgcgcctgcggcaagtacaagcgcgtgcgtttcaagggcatcgtctgcgagcgatgcggcgtcgaagtgacccgcagccgcgtgcgccgtgagcgcatgggccacatcgagctcgccgccccggtgacgcacatctggttcttcaaaggtgtgccttcccgcctcggctacctgctgaacgtcaccccgaaggatctggagcgcgtgatctacttcgcctcctacatggtcaccgaggtgaacgaggacgagcgccacaacgatctgcccggcctgcaggacgagttcgattccgagatcaagcgccttgagcagcgccgtgactccgacatcgaagctcgcgccaagaaggtcgaagaggatctcgccgcccttgaggagaccggcgaggccaagggcccggcccgcaccaagctgcgtaacggtgccgagcgcgatatggccgccatccgcacccgctacaacgaccagatcgcccgtgtggacgccgtcttcgacaagttcaagaagctcaagcccggcgacatggtcgacgacgtggacctgtggcgcgagatgcaggaccgctacggcgattacttcgacggctgcatgggcgccgaagccatcaagaagcgcctgcagtccctcgacctggagaccatctccaaggaactgcgcgaggagatcaaggacgcttccgagcagcgtaagaccaaggctctgaagcgcctcaaggtcgtcaacgccttcctgaccaccggcaacaagccggaggccatggtgctcgacgtgatcccggtcatcccgccggacctgcgcccgatggtccagctcgacggtggccgtttcgccacctccgacctcaacgacctgtaccgccgtgtgatcaaccgtaacaaccgtctgaagcgactgatcgagctcggcgcccctgaaatcatgctcaacaacgagaagcgcatgctccaggaagccgtcgactccctgttcgacaacggccgtcgtggtcgcccggtcaccggtgcctccaaccgtccgctgaagtccctgtccgacatgctcaagggtaagcagggtcgtttccgtcagaacctgctcggtaagcgagtcgactactccggccgttccgtgatcgtggtcggcccgtccctgcgcatgcaccagtgcggtctgccgaagccgatggccctcgagctgttcaagccgttcgtcatcaagcgcctcgtggacctgaactacgcgcagaacatgaagtccgccaagcgtctcgtggaccgcggcgacgccgaagtgtggggcgtgctcgaggaggtcatctccgagcaccccgtgctgctcaaccgtgcacctacgctgcaccgtctgggtattcaggcattcgagccgatcctggtggaaggcaaggccatccatctgccgccgctggcctgcgccgccttcaacgccgacttcgatggtgaccagatggcagtccacctgccgctgtccgccgaagcccaggccgaggcccgctcgctgatgatggcttccgacaacatcctgaagccggctgacggtcacaccgtgaccatgccgtcccaggacatgatcctcggtctgtactacctgtccaccgtgctggaaggcgccaagggccagggccgcgtgttctcctcgctggaagaggccgaaatggccctcgaccgccacgagatcgacatgcaggccaaggtgctcatccgcctgcccgagagcttcgtgctgccgaagaactgggagcccggcgaggtcaaggtgctcgacccgcgcgaaggtgaggacgaggtcgtcaaggaagagcgcttccacgacggcaccgtgctgttcgccacctcctacggccgcatcctgttcaacgagaccctgccgaccgactacccgttcgtcaacgatcaggtggccaagggccgcctgtccaagatcgtcgatgacatcgccatgcgttactccacccagcaggtggccgccacgctggatgccctgaaggatcttggcttcacccgcgcaccgtggtccggtgtgtccttcgcgttctccgacgtgaacgagccgcccgagcgcgacgagaagatcgccgagtacgaggccaaggccgacaaggtcaacgccaactacgagatgggtctgctgaccgaggaagctcgccgtcaggaactcatcgacctgtggaccgagtgcaccgccgaggtgtccaaggaagtcgaggagaagttcgacccgacctccaacctggccatcatcgtgcagtctggtgcacgaggcaacatgatgcagatcaaccagatcgcaggtatgcgaggcctcgtggctaacccgaagggtgagatcattccgcgtcctgtgaagtccaactaccgcgacggcctgtccgtgctggagtacttcatctcccagcacggtgcacgtaagggtctggccgataccgcactgcgtaccgcagaatccggttacctgacccgtcgtctggtcgacgtctcccaggatgtcatcgtgcgcgaagaggactgcggcaccaaggccggtctgcccatccgcgtcgccgagcgcgacaacgacggcaacctggtgctcgtcaaggccgccgacggtggcccgtactcccgtctgctcgccgccgacgtcatcgacccggccgacggacagaccgtgctgtacaagcgcgacgacgccctgtccatggacgtgctcaacgacctcgtggcccacggtgtcgaggaagtcaagtgccgttccgtgctgacctgcgagtccaagcgcggcgtgtgcgccaagtgctacggctggtccctggccaccaacaagctggtcgatgtcggcgagaccgtcggtatcgtcgccgcccagtccatcggtgagcctggtacccagctgacgctgcgctccttccactccggcggtgtggccgcggcctccgatatcacccagggtcttccccgtgtcaccgagcttttcgaggcgcgtaccccgaagggcgaggcgccgatcaccgagttcgccggcagcatcaagatcgtggagaacgatcgcggtcgccagatcatcctgaccccggacgccgattccggcgcgccgaaggaagacggcgtgatcaagccgatcacctaccaggtctccaagcgcgtgccgctgaaggtcgccgacggcgaccacatcaaggtcggcacccagctggtcgaaggttccgtggaccccaagaagatcctcaccatcctcggcaagcgcgccgcccaggtcaacatcgtggaggaagtgcacaccgtgtaccgctcccagggcgtggatatccacgacaagcacatcgaggtcatcgtgcaccagatgacccgccgcgtgaccatcatcgactccggcgacaccgacctgctgccgggtgagctggtggacaatgcccgcttccgcgagatcaaccgcaacatcgtcaagaacggtggccgtccggccgtcggtcgtccggcgcttatgggcatcaccaaggcgtcgctggccactgactcctggctgtccgccgcatccttccaggagaccacccgcgtgctcaccgaagccgccctctccgagaaggtcgatgacctcaagggcctcaaggagaacgtcatcatcggtaagctcatcccggccggtacgggcctcgcccgctaccgcaacgccgtggtcgagcccgacaaggccatccgcgacaccatctacccgaacttcggtctgggcggcgatggcgatctcggcgacgcgaccttctccgacgccgacctgtccgacctgaacttctcgaatctcgagttcggtgatctgaagctcggcgacgacttcaacccggatgatttctactccgatcagggcggtcagcctgacatcgaggagtaaccctcctccccccccgataagatggcccggaactcgtgtggttccgggccatctcgcattttcagacagcagtattgttcttgtcgatttacgggggtagtgtggcaacttaggagtgcgggtaccgctcccagtggtttgtggctcggtacgtgcacggaagtcgtaagagaagagacaagtgttggagggccacctatggtggggttaaacacattggtcggcaagcggtacaagatccttgcccagatcggcaagggtggtatgtccaccgtctatctggcaatggattcctcgctgaacaagcaatgggccatcaaggaaattcgcagtgcctctgatccggtgcagcgcgacttggtcattaagagcctgaccgtcgaagccaatatgattaagcgcttcgatcacccggcgattccgcgtatcgtcgacctgatcgaagaaaagggcagcctgttcgtcgttatggattacgtcgaaggccagaccttggcgagcctgctcaagaaggaaggcccgcagtccgaagaagacgtggtcgattggggcatccagctgtgcgatgtgctcgactatctgcaccgccgcaagcatccggtgatcttccgcgatatgaagccctcgaatgtgatgctgacccctgagggcgcaatcaagcttatcgacttcggcattgcactggagaccggcaaggatgcggacagcaagccgctggtcggtgacgaccgccagctcggtacgccgggcttcggcgctcccgaacagttcgccgataacggcaccgtggacgcacgtaccgatatctacgcgctcggtgccaccctgttctacctgctgactggctcacacccgcgcaagaacggcattgtgccgattcgtgagatcaacccggagctttcgcagggcttggaactggtgattgccaaggccaccagcaagaatccggacgatcgcttccagacctgcgccgacttcgcgtatgcgctgaaacactacaagcaggaagacgccgcataccgcaaggcgctgaattccaagtggtggggcttcctcggcacggcgatcgcctccgtggtctgcctggccctcgccggcggcagcctggtgctagccaaccacgcgcagaacaccgattacgactactggatgaaccaggcggcgcagaccaccgacgcatccaccgcagaagccgcctacgtgcgcgcagtggaaatcaagaccaatgccattgaaccgtacgagcagctgatcaagcgttacaccgctgacagtgatttcagtgacgacgaagagcagatctacaacacgctgatcaaccagcacgccgactcgttgcgcaaggactccaccaagtgggccgagctgagcttcgacaccggccgcatgtattggtactactactccggctccaagatggccggccaaagcgcgtccgccgccaacaccgatccacagcgatacgcccgcatccgcgccgcttcgcagtggatgcacaacgcggcacaagagagtagcttcagcaacgtcaagctcgccaagatctacgccgacatcgccgacttcaacacggagatcgtgccgctgatcaacgaaggatccgattcaggcaagtacaagccgtacttcagcaagctgaacgaactggtgaagtccgccgctcaggaagataacggtgtgatcagcctcgaatccgcgaacctgaccttggacgcgttgcgcgtgtacccgcgcaagttccgcgcggacggcatcacgcaacagcagatgagcgatttggccgatgccgccgcatcgcttgccgacaagaccgaaaccaccaccgatgagctggatgccagcaagaaagccgcgcaacaggccgaaaagcccaccaaggacgccatcgccaacgctttcgttgatatcaagggggacgccaagtgaacgccgatatctataggactctggcagtcgtattcctggctttggccgtgattcttgcggtcgtggccgtagtgctgttccgcaagttcaacattcccgccgtgcgtgacgccctgaccggcaagcgcgcggaacgtgagatcgccgaactgcgtggagtgcgcgccggttcgtgggccaacgccgagaatctgggcgaaggctcgcgccgcaagcgcaagaagggtgccctttccgataccaccaccggtacgcatgacaccagcgacatcgaattccgcccggtgaccggtaccggttccggctctctgggttccgccagcaccaagggtggcattactcgccccggcgaagacaagccgtccgcagtgcccggtgccaagcaaaaggcttccgccgctccggccgtggtggacgaggaagacgaaagcacccgtctgggtaccaaggccgcactcgaatctgtggttgagattccggtgtccatggcttccgccgccgaattggcggacgagggcgagacctcgctgatgcaattccgcaagacgaatgaagcatcgtctgacgacgatgaatcccgtaccatcctggttcgtggagggaagaacaagtaatgagcttcgtaactaattccagtttctggcgtaagtcgttgatcggtgcggccgtggctgtggcggctcttgccatgggtgctaccgccgtggtagccagcgccgattcgacttccgacctcaagcccgagcagaccaccggctccgtggtgtccgcacgctccttcaaggccgtcaaggcacagccggctgccgccactacgccgaagatggatctggcttggtatgccgccgataaggacggcaaggtggccgataatgcccagccgctgaccgatggccgcaccaatgcctcgaatgttcgtctgggcgtgacgattactgggtttgatggtttccccgcgggccaatttgaccgtaacggacaatacgaaggtgcggataaagacaagattgcctttaccgtgaccgtgggcatcttgggcgtcaaggaagtcaagtatggcgacttccaccgtacaggcaatgtgcaggacggctacacctacaccgttgagccgaatgatggtccggcgttcgctctgagcggtgatccggttacgctcgatgtgacagttgccgcgccggctgatcctacagcggcagatgccgccattgacctgaatcagttcaaggatggcgacggcacgagcaccatcacggctcctcaattgtcttatgacagcaccaagcccgccgccgtggatacggcggtgttcggcgacgttgttgatactgattggctgaaaggcaaagacaaagacgcgaccgacggtacctggttcacgaccacgtcgccgtccgtaacctttactccggttgcggctgaggcagccaatgtcgtgtcttatgaggtgacgtatccgaatggcaacggcaccaagaccgatacggtcaaggcagatgaagcatggaccgtgcctaacggcaagaccgacctgaccaagaccacggttacggtcaccaattggttcggcagcgcttccgatgcgaagccgttgagcgatttgctcgacgcgaagaccgttattgttgacccgaatgccggcactggtctgtccctgaatctgaccggtaccaccccggataagggtgctgtcaacaacggcaccacgtattacagcaaggtcggcggcttctcggtgagcagcacgagcgcatacttcgccgatgaactcgccctgctcaaggcgaacggtatcaagttgctgaccgttccggctgccgacggcaccggtgccacaatcccggtgtgcgatgcagataatcttacgaatggtgccatggactgcggcgatgccggactggacctgaagaccggtaaccacaccgtaagcctgaactccgcgctgccgggcacgccgactgtaacgcagtcgttcgccatcgacaccaccgctcctaccgttgcgtggaagggctactccaagaacggcggcattgatattccgttcggaaagacactcttcgcagtcgaccgtaaagaacgtgccctgaccttcaccgttacggatgatggtgccggtgtgggcaaggtgattgcaagcggtatcgatcctgagacgggcaagcaggccacggtcacgttgaccaacaacggtgacggcacctacacattcccgctcaccaaggccggaacctacgatttgacggacttcaccatccaagccacggacaatgcaggtacgcagtccaaggctgaaaaggtaaacgcaattgccggcgataagttcacctacacgaagattcgtatcggcaagaatgtccagccgaagaccacggtatcggtaagcggcaccgactacatcaacggcactcccaaggtcacactgaccgtcaagaacaacccgtggctggcggacgaactgaagggtctgcaagaaggtgccggcaccaagggcctgaacctgctcaccagcacattgaccgccggtgacaagaccgtgtacgggggcacattcccggtggccggtgccacggtgaacggcgccggtgacgagatcgtcatcgcagcggatgccgccaagccgttgattgacgccaagaacacaaacggccagtatgccattacggtaaccgataaccccacattgctggcagtgttgggtgacgtgaccaataacgccaagaccttcggcgtggatacgcaggctccgagcttcaccggtgccgcctaccaggcaggcagagatgaactgacctccaccaaggacgattccatcagtgtcgtgtcccgttctgccgccaccatcactttggacgcgcgcgatctgctgcccgattccacggcaacaggtgccggcaaagacgatgcacaaacctctggtctggcaaaggtcgaagccaaggtcgattacaccacgtggaatggcgataaggtcaccggcaagtggaccgaacttcagcgtgtgaacaacgaccccaacaaggtccaactgacgctcggcgaccaggacggcaagtacacgctggccggcgtatccctcagagccaccgataaggcgaccacgaagcccaatgtcagcgatgccgaaaccacattggccacggtgaaggccgcactggccaagtccactgataccaccgtggccgctgcggccaagcagctgccggatacgctgggcgtgagcaagcagaccgcgaaggcgactctgcagctcaacgatgctgacccgcagaagacctacaaggaagatctcaccaacatctccctcaaggtcgccggtgaccccgcgttcgcctaccgctgggatgtggtcaaggctggttatgccaatacagacttgctgaccggcgcggtgcaatacggcgacgccggttcgaagtccttcacgttcaagatcagtgacgccacctataaggacagcgtcatcacgctgggcaccgcaaacctgcccaagcggaccgaaaccgacaaggatgccaccggcaagcagttcaacggcgactaccagctgacgctccagaagaacttcggcaacaatgtcgagctgttcaacgctcaaagcaccggcactaccaactacctgttggacaccaagcgcccagtgctgaccaagatcagcggtccggccggtgccaagggcgagaccatcgtcgataccaccgtgcaaggcaagagctacacggtcttcgccaaggccggtgcacagacgttcacggtctggatcaaggacttgctgcccaacggccagtcctcgaacgactccgccaagaacgaagcccatacgtccggcatcaaagatgactccgttaagctgaccattcctgacggcactgatctgaagggcaagacgcttgccgagggcaagacggtgaatgtcacactcgacaacgaaggcaagggacagttgacccttgatcaggaaggcttctacgacctgagcaagatcacggtaagcgtcaacgacaacctcggcaacgcgctggacaaggaaagcttcaagaaagctccggttcaggacaatgtcaaggattacgacgccgtcgttgccgatgtgaacggcaacgacaccaaggcatccttcgcggtcaccaagtccgacaactccgtgcccgactccagtgataacaacaacaagtacttccgtggcaaggtcaaggtggcctacaccatcaccgaccactggttcccgatttacgccaagctcaacgccggcaagacgaacctgctcgctggtagtacttcgaacaccacgccgttgaccggtggccagaacgagcagaacatcaagccgttggatgccagcgatgcacagtggactgaaggcgatggctacacgtggacgctctccggccagaagctgttgatcaacggcaagaccgacgaagtggaaggcaattacacgctgcacctcgcctatgccggtctacaggcaaaggccaatgaggcatccacccagtccaaagacgtggtgctcgactggaccgctccgaagctgggcgacctgaccgcttccagtgaagcaccgaagaagtgggattggatcttctccactgatgtcttcacggccacgctgaacggcatcagcgataatgtgtccggtgtgactgcggactccaccgcgttctccaccaagcacttcgacaactggctttccggcaagaacgacccggctcccgtctatgcgggcgacgcggccgccggcagcatcagcttcacgatggatggcgacagccagcgcgtctacctcggcgagaccagcctcaccattcgcgatgaggccggcaatccggtcgacaccggcaagctgaatgcctacgaaggcgtgaacggcaaccaagccgccaacgcgctgaagggattgaacggcgtggccatcgacaccgtggctcccaccatcgcggtctcctacgacaacaacgatgtgcgcaacggcaagtactacaaggcccaccgtaccggtaccgtgacactgaccgaatcgaacttcgatttctccaagaagtatgagggcgatcgcgtggtcgtcaccacgtcgatcgacggcaagaaggccaccattccggtctcctccttcaagaacgcgaacggtgacctgaagacgtacgtggccaccttcgccgccgacagcgacggcgactggactgtggacgccgcctacaccgatccgggcgatcacccgtcgaatacgattcacgaggagttcacggtcgacaccgtggctccgaagctgaccctcaccttcgacaacaacaacgtgaagaacggcaaatactacgcggccgatcgcaacgctaccattcgcgaagtcgagcgcaacttctccgaggacgaatcggtcatcaccgtcaccgccaaggacgataacggcgcggacaccgcagcccccggcccggcgggctggcagcgcaccggcggcacgcgcgaatccaccgagtggacgaactccgtggcattcacgggcgaggcgcacttcaccatcaaggccaccgccaccgatctggccggcaacaaggccgaagaggtgagcgaacccgagttcgtggttgacaagaccaagccgcagatcaagatcgaccgcgtggaagacaagaccgcgtacgccggtaccgtggcaccgttgatcgacttcaacgatgtcaacatcgacatgaagaacgtgagctacacgctggtcggcgaccatcgcggcgaactcaagggcgacaagatgcccaagaacgtcaccaccgatacggccaacgaccgcaccgtggacttcacggacttcgaacgcaaggtcgacttcgatgacgtgtacaccatcaaggcgcacggcaccgatctggctggcaacacgttcgagaccaagaagaccttctccgtgaaccgcttcggctccacctacacgttcgatgcggacaccacgaacctgcgcggcacctacctgaagaaggcgcaggacgtgcagataacggagatcaacgtctccggtcttgacctgagcaagcgccagatcgtgatcgccaaggacgacaaggcgaccacgctcaccaacaacgactacaaggtcgcgacctctgacgacaagggctggagccgtacggtgtacaccgtgccggcatcccgctttaactccgacggcttctaccgtgtgcaggtgcagtccatggacgaggcgggcaacctctcgcagaacaccatggacaagaagaacgccgaccgtaagggcactgccgaagtgaacttcgccgtcgactcgaccgcgccgactgcttcgctgctcggcatcaagtccggcaccgtgtactacagccagcagggacagcccgcatcggtggacgccaaagacaacctcggcatcaagtccaccgaagtgtatgtcgacggccagctcaaagacagctggaagggcgatgccacgctcaagtccacgccgagtctgacgttcgacgccgacgccaagagccacgagatcgtgatccacacgatcgacaaggcaggcaacgaggcgacgtccacctacgacaacatctacgtggcctccaactggtggcagtacgccacccacaccccgtggctgcgcaacacgatgatcttcggtgcgctggtggtcttggccgccatcgccggagcgattgtcgcggtgaaccagcgcagaaagcagtttgcgtaccgcaagaacccgttcgagcggtgaggtgactgcactcgtttcccgttaacgagggttgtttgcggggcgttgcggtgagtaattgctgatgccatagtgggccagtccaattgattctgggctggcccactaccgttgatgagggattgcgtgatgtggtgttggctgggtatgggttgtctggtcaccggctgtggtgttgaacggcatcgcttgtcgtgcgtagacgttgtgtgtgttcgaggatgtgctggagtccctttcatttgtgcatgcctgctgcgaatctatggggcagagcgatgatataaattaatcagaagataggcgaggggagaaactgatgaagggtttggttaccatccacgatggcattgcggatgtgcgtttcactgcctatctggatgtgtccggtgatacgtcgatatccgctattcttccttcgctgtccaatattgtgggatttcagtcgcctttggattccatgggtttggccatagacggtagaactgtgcctccgaccattaccgtgtcgcaggcgggtttgcacgagggctcgtggatttcgctgttgaagcgtgatcggaaaccattgaatccttatgccaataccggtctcaatgatggttatgtgcaattgcggtttgtcagcggcgagaatgcgggcgctgtatatgatgtgtctgtcggcacgatgtcgataggcacattgctgaatcctgaacgaaactccatgaatgcggatttcatgttggatgtcggggcagacagtgacgtacgcctgattccgcatgtgcgtgaaggcaagctgcagaagcgcaccgcatggtaccgcaagcgcaagcgggaaattcattccggtgttttcatcgatggcaaagaagtcatagaaccggtatcactgaataacagcaccgaaatcgtgctgccggaatgcattgtcaccgtgacccacggccgtgagacttccgtgccggtggatactgaagaaatggaaggtcgctggctgttcgctaggccgccgaagattcgcgaggtggtcaaacagcgaaagtttacgctgcccggagaaccgcagaagccagagaaagcgccgattcccctgctcacgagcctgctgcctctggcaatggctgcagtaatgtgcgtgcttctgaagagctatacctatctcatgttcggtctgatgagcccagcgatgatgattggctcgtatatttccggtaatcgtgccggaaagaagcgatacaagcagcagatgaaacgctttgcggaaaacacgaagcgtattcgcggcgaggcgcaaaaagctgttgatgctgaggtggcccagtcacgacgggagtatcctgatcccacacaggtattggatatctgcgctcgtcacaccgcacggttgtggaaccgccgctccactgatgaatcgtggctgcgtttgcgtgtgggcacgggaaccatagactcgcacatcacattggaagacccccaaaaaatggagtttgagcgggtcaccaagtggcagttgaagaattttccggtagcggtatctctgccggatgccggatgtgttggctgcactggaaatgccgacgtgttgtatccggtggtgtcatggatgaccgcgcagatggcggcattgcattccacccgtgatctcacgttgtatctgctgtctcctcgccttaaggatcgaggtcaggcgattgctggcattgattggtcgtttgcgcagtggttcccgcattttgcgccgcatttcggccagaatgcggtgcgtaccatggcggttagtgcggatgatttggctctgcgtatttctgagctgacgacgatgctggatgaacgcagcagtgagcaaaagcggcagtccatcaaacactgggtggggccagcggtggttgtcatcatggaacatgcgcacgtgctgcgctccatgcctggcatcatacgactcctgcaggaggggccggcacttggtatatacgcactgtgcatcgacacggatgagcgattattacctgaggaatgccagaccgtgattactgctaccgcgaaagaccttcgtgtggaaagcaacaaagccgacgatgtgtttgacatcatgcctgatttggtatcgcaggattggcttggtgccgtggctggtgcgttggctcccattgaagatggcagccctgccgaagggcagtccgccattcccgatcacagtcgtctgttggatttgctggatttgacgcctacgccggagcaaatcgaggcgcgatgggcaatgtacccacgttctacagcgtgtgtgattggcgaatccgtggatggtccattcggattggatatttccaaagacggccctcacggattgattggcggcaccaccggttctggtaagtcagaattattgcaatccttggtcgcatctctggctgtggccaatacgccacaagcgttgaacttcgtgcttgtggattacaaaggtggcgcggcattcaaggattgtgtgaaactacctcacaccgtgggcatggtcaccgatttggataatcatcttgtttcccgtgcgctgacttcgctgggtgccgagctcaactaccgtgagcatttactggcacgggctggagccaaggatcttgaagattatatcgatatgcgtgaggccaagcccagccttccagagataccgcgattgctcatcgtcatcgatgaatttgcctcgctcgcccgtgaacttcctgactttgtcaccggtttggtgaacattgcgcagcgaggccgttcgctgggcattcatctgttgcttgccacgcagcgaccgggtggtgtggtttccccggaaatccgagcgaacacgaacttgcgcattgccttgcgcatgactgattcctcagagagccaggatgtgatcgatgcaaaagatgccgcactgatttcaaaatccacaccgggccgtgctgtggtacgtttgggttccagctcgctgatcccgttccaatcggcgcgtgtgggcggaagatatatcaatccgtcaaagaataagggatcacagcagactcagactccgtttattcgttcaatggcgttctctcaactcggcggcgcggtgccacaacggccgaagagcaagaaggacaagggcgatgtgaatgtgaccgatttgaagatgcttgtggatagcatcaacgaagtcgcgcgtcgtgagcatatccctcagcagcggcagccttggctaccggcattgtccgaacatgtggatttgaaccagctgaaagagtttgaggcctcgaccgataaagatagtcaggggcatgtgattatcccattcgctttgggcgactatcctcaacgccagcaacagacagtagtgtctatagatgccagttcctttggcaatatgttcattgtcggaacgtcgcgttccggtaaatctacggcattgcgcactattgcctattcaggcagcatggcttatacgccgagagaactgcacatctactgcatcgacgcaggcaatggcgcgatttcaccgttgactgctttgccgaatgtaggcgcggtggcgttacgcagtgagacgcagaagattgagcgtctgataggcaaacttgaagcggaaactaaacgccgagcgagtctgctgtctaaagatggttacagcagcatcgatgaatacaatgcgagcgatgtagctgcacgtgaaggcgcattaccgcacatattggtattgctggattcatgggatggtttcaactcagtattccagagctacgatggtggctccctgattgagcgtctgcagatactgatgcgcgaaggcccatcttcaggtgttcactttattctcacaggagatcatctactactagccggtcgcatgtcggtgctttcggacagcaagatactgctgcgtttggtcgatccatccgattacacggaagtcggcatgtcgtcacgtgatgtgccggaaaacattcctgatgggcgtggataccgatcggaagatggcgctgaaatccaggttgcaaagattcacgaaggtctttccggccaagaggaatcagaattgattcgtgctagcggaaccaaactgaagtctggtcgtgaccgcggattgccacgtgcggtcatgcccttcactgtagagcagctgcctgaagagattactttgtccgcagtgcacactcgtatcagcgactatggcgatgattatcttccggaacgtggaacaaaacaccgcattccgctcggcatcggtggcgaagacaacgagccaatattgttcgatccaggtgagacgcccatgttgccgatttacggtacgtcgcaaagcggcaagaccactatgctggtcaccattgtcaatggcgcgctagccggtgggtatcgcgtgattctcgcagcccccaagaacaatgcattgcgtgcatttgtcgataagccgggtgtagaacggataatcactctgccatctgagcttaccgaggaactgctctctcaatatgcagatgatcccaaaacgttatttgtgttcgatgactgccaactgctgaaggatgttccagcttcgaactggttgcaatcgaagatcggtgtacttgatgctaattctgcgggattcgtcgttgctggagatgcggcggaatttcccactggattcggcaattggggatccaaggttaagacgattcgtcaaggcgtgttgttgaaaccggacgaggtgatttaccaagatctcatcaatattcgtcttcgccgcgcgcagttgacggctgatgtgccatctggccgaggatttgtacatatgggagcattgtccgttactatgcaggtggcgtccagcgaacctatggatggagttcctgaagccgagcctcaggatacactgcttaccgcagtcgaagcaataccggctccacctatgccacaagagccgcaatcggagacgccagcgatacctccagcaccgcgcacggggagatgacgattatgtttggcaagaagaaaaaggcatcaggcattattgctggtacgagccccgcgcaggtgtatcgggaactgcctgtgctgccaagaaccagtcagaccagtatccgagatgaatggagtcgtgccgctttggaagggtcttcatttggcgaaccaccagtacgtgctggtcaaccggtctctgccgaagtgaatctgcccttgcatcgcaaaattccgcggtatgtgatggagttttcggatgggcagcgcattgaggtgaaatcgagatgtggtgccgggcggatgccatctacggcagaagatggatatgaggcatttgcggtgctgcatgattccagccagcagacttcgcgcagacatttcgaatttggtgtgaccgctatagggcaggtctgggtgatggactgtgattctgccaatggtacatggttggaatctcatggttccagaattgaactgcctaagcttaccaggaccagcatggttccgggtgatgtgttacgtttcggcggcatgagagcaaagttggtgcaggtcagctagttttaagagcatcgttctactgttcttattctggctcaatgtattgtcaagaccgtatatcgggggtattcttactcatggatgggcatggttgtccattcggcgtcggcggcggtatggaccggtggcgtaaggttccgtatgggaagggttagtcctatggccaacgtaaatgtaacgtatgatgacatccagcgtgtgaagagcagccttgagagtggccgccaaagtcttgtcgatacgcttgatcagttgaacaagaccgtgagcgagttggtgacgagcggcttcgtcacagataaggcttccggtgcttttgagacttcgtaccagcagttcactaagggtgcaaccgatactgtgaatggtcttaatggcatgcagcagttcctgcaaaagacgcaggatgctttgaccgagctcgattctcagttggccagcgcgctgcagtaatactgcctgaattggcaagtgagcggcctgcgatgcagggggtttgaggcattgcaggccgttgcttattttgtgctgttttccagtacttgtattgggagagtgtatggctgagtccaagatagtcattattgatgagtccattgtccgtatgaagactggctttgagaacattcagcagacactgaatttacgtggcaatgatgatatgaaacctgacaagggcaatgtgggatacgccccggttattaatgccttgagcaaattcaatactcaggtttcatccacgaagaataaatacaagattaaaaccgagaaattggttgattttctacagaatgtcaaaaccggttccgatagagtcgatgagcagattcaggcttcgttgaaggttgatcatacttctggcagtgggagctgacgtgtctggtggtagatgattgattctacaggcatgaggcattgagcttctttaggccgtatcttcaagggggatgggattgacaaacgagcaatatgttatctccgtggttccaccacaagggtggcatgagattgaagtggatccaaaacatcgcgagatagaaattgaacgtcagcttggtcagttgcgctatgttgtgccatcgtggcgagcggtttatcccgcgttgcgccgttacttggtgaaggcatatgccgatgcgtggaagtccggtgtccgatatgcaattgcgacggatattgatcctgatgatgctgtgcaggtaatggcgacattcatgattgcacaattacctcaggccagtgtcttaggtgatttggatgatgaattggacgcagttattgaaacgctttccagcgaacaggctgaacttggtgatggtgaattcatgtcgttgcagaaagtgaatttgccgaaaatggggactgcggttcaggcgcaatcaataacgtcgttggttgatgacaagggtgatagaaccgatcgtcatgtggcgtcgcttcgaactttcatcccgtatggggagcatgtgtttgtggtaactggtgccactccgcaaattgatattgctgatgttttgtttaatttgtttgcttcgatgacggatacggtgagtattgagtttgtgaattccagcgcgtatgcgtcgacgagtggggaggaaatatcgtgaatctcgatggtgaggattggggttttgtcgggtattcggggaatcaggttcctgggaatggtggattcactgccgacttggcggggcgatactcgaacctgcaaggcactttcaataagatggcagatgatttggatcatttgcagaccaaggaaggcatgagcggcgaatgggtgaccaagttcgttgacaaaattggtaccatgccgaaggatttccgcaactttgccacagggtttggggatgtcgcgaaagcactgaacacgtggagttcagacatcgatagctatcagcgtcaggcttccagtgccttcgtggaggtggagaatgccaagagagcgcaggcgaatgctcaacagaatgtagcgtcaagccggcgtgaattcgatcgtgtgcaaagtgcgtattccaatctcagccctgatgccagtgacgaggattatgagcgtgcacgggatcgacgcagacgggcgcagagcatggtcgaccagtatgagcaaggactgtccacggccaatagagatttggaagcggccaaagcagcggtgcataggatcgtcgacaactataagaaggctggcgatgagcaggccaaggctattgccgctgccacgcgtgaatcgccgaagttgcatggttttgcggagcaatggcagtattccgatgcttggcagattaccgtgaagattcttgaggtcgcctccattgtccttggtgttattgggttgttcttcggcggttggattgccgttgcttccgcggcggtggccgcgctgctgttcgtggacaagctgttggccaaggcgaacggtgatgcgtcgtggtgggaagttgtggtatccggtttctgggcattattggatgttggggccggcttgaaagctgtaagcaagattgcaaatgccaagagcgttgctacaacaattgctaataaggtcgctctgaaaaacggcaagggcatttttgactctccggttaccgccggaatctataagagagttttgcgttctcagatgtggcagccgactaagtggggtaagcggttattgaaatctaaggatgctgcaggtggtttccggaagatgcttgttagcgaaggcggcaaagcaatgcaatccggagagaacgtattgagtgctatacgtcatgatggaataggaaactatgccgctaatttggctcgtcagggttgggatgctttaggcaagggaatgcataatgttgggcattcgttgaagaacagcggcagggcatggaatcgtttcgtttccggttggcaggatgcgaaacaggccgcgaatgccgctcatcctaacccaaacaacacggtgatgagggatttctgggatggtcagttcaagagattcggagattggagcaaaggccatgggtggtccatcggcaacacagttatgaatgcccgaaccgggtataccgattttcggggtatccacgacatgaagaatatcgcggctgtcgacacccatcggacggtgtgggacaccatgaattttggtcagcatgttgtgtcgtatgccaacgcgacgtatgacacgttgaatacggcgaaagtggtgaagccgtttgtgaatccgactgcggatggtggtctgcagtggaagcattcgccacaggattatttcaagacgctcgttccggatccagatcagttatggaatttcaagaccatacatcaggcaccgggaaagttgtccgatggggcggctgaggcatctaatgccattcgagttggtatcagtgatctataaaggatggatgattgacgatgagcaggaaatcggatgctgctgagcgtgggcgggaggcttacgcgcggtggaaggagctttcggaggatgagaagaatgaggatcttcgtcggcgtcttctcgcctccgatcagaataatcccgtggtcagggatatgttgaagactgtcgagaaggatatccggggtcgttcctcggcgaatggtggtccgactctggagtatgagagtcatggtttgtttgcgctgacggttcctcatctgcatggtccgcgtccggggcgtcgtgcgttcggaatgcgtggcgtggtgttgaagtctttgtggttcctgtttgtttttgtggtgtccgtggtggtgcaggtagtgttcatggatgcggcaaaggcgaatggggcgggtgattggtggccgttggcggccgtccccaacgtcgtggtattcgctctcgtgttcacgtcgatggcgctatccccgtttctcatgttgttgttcggcggtatttggcctcgactgtggggtttgtcgattttgttcggttccttggcgatgcttgcggctggttcgtttgtgggtcaggaggttggtcgtaggtggttgtgggaccggtatgtggcgactggcttgttgaagccgggggatttcgtggactggtcgtctgatcgtctgtctgcgcctttggcgcaacccgcgtcgggtggttggtgggtgaccggcttggtggccggtgtactgctggtgtcgggttccctgttcctgtaccgggaggatcggcatcgtgggtcgaacattcttcctcgctatatatcgtatggtggcggcgtggttggtctggtcgcggccatcggcatcgcgttgacccgtcatgtgagcggtttcgcgttggtggcggccccgttcatcgccttgttcgtcgggcttctgtggttcccgttggatttggcggctgcctgtttttgtgtggataatcgtcgtgagtcgtgtggcgagtggccggccgcgttctggctcaccgccgaggcgttgttcgtcattggcgtgtgtacggcgctgcccatggcgtgacgtctggttgtgtgctgggatggtagtgcaaaggagggtgagtggggatgtccattcggttggatgagcgacggtatgtcgaggagttgaagcggctggttgcggatttccggatgtggaagaatccgctggttccgttgccggatggcttcgaggacgatctggcgtggaggtcctatcgtgtgttcgggcagacgagtcccgccgatatcatcgctttggccgtccgcacccgtgatgaggatttggttgcccagggcgagggatttatatctgattcagtctccatgattgatgatgaggacgtgttcggctggctgttccgcatgatttggggcaaggagttgcagcttcgccagcagatagccgatgcggatgtggagaatctggacgccacttttgatttcctgacttcggcatgtcggttggcggcccatattcttcttggctggggcgaaggggacgcttccagcgcgtatatcgcgaggttgttcctcatcgaacagtacgatgaggcgctcaattgcattcttccgtactccaatgtgtcgttgaacgcgaacgaaaccgaattggtggtgtcggatttgcgcgatcgcgccatagccgcggcgatgcggcgtggcgagaccgccgcgatggagatgaagctgcataaggcggaagacggtcctcattattcgtcaggcgaggattctaccgcgtctgacgacggggaggggcttgacgtcgcggatgatggccgtccgttcccgcaatccgatgtactgtacctgttcgatgcggaccacgtcatcgaggcgtatcgctatttcctcgaccatgccgatggcgatgcggatggtgatggcgagcttgataatggcaatccctggcgcaggccggatttcgtgcaggacaagctgctgaccttggcgggagcgggaatcgtggagcctttggtttccaccgcgttggagcagggtgatggagaccggctcgaggctgcgttgaatctgcttaccatataccggggaatcgtttgtgatgacggcatactggcgttgcccatcatcgccgcgcgcacgttgcgggattcggacgggctgcggcccgatgcggatctcgaccaacgtatgcggtacctggagtcctcgcgtgacctgtgctcgagcatggcggccatgctgctcgcgcgcattcccgatccctcatggagccgcagactggccatggatctcctgaacgccgatatggagtcgtatgtgcggcacgttcgcgagctagccgagtcgtgagcattcgcttcggaaggtcttgccgtatcgggttggatgccaatagaatcggtttgattggtgttgccgagaaaactgtatgaaggattgcacgaacaacaaggaggttgctgggtggccgaaaacctgacgattgtggaagaatcagtaagcacgctgatgcaggggtttcaacagtattcgtgatcggctaaatctggatgagcagattaccgagccgagttctgacaatgtcggctgttccgagctggtcgatgcggttttcgcattcaaccatcaggtcagtgatacgaagaacaagtacaagaagaagacggagaatcttcgtggcttcttggaaaacgtgaaaaccgggtccgatgaggccgatgaggcgattgccaaggccatttccgatgccgtgcaccaatcttgactgcctgctatgagcattatcgaccggcgatggggagaatccgttggctgaattcttacatatttcattgatacctccacagggatggagagaaatcctgttggatcctgctgaccgggaacggcagattcggcaggctcttgaaccgatgaaacacgtcatcgccgactggcgagaagtttatccggcattacgcaaatatctggcgaactcttacgagcaatcatggaaagctggtgtacgatacgccataaccacggaacttgatgatgccagccccatattggtaatggctacattcatggtctcagtgcttccatccgctgtgccgtatggtacagcggatgaggaattggatgccatcgtggagtcgctgctcacggagcgggaaggcctgcccgaaggtgatgaactgcacatgagcaaaacgtcattcaataaactcggtcctgcggtacaggcatcttctgtagaaaccgttcatggccaacaaggtaagcccgtaggtaggttggcgatgttgcgtacgttcatcccctgtgcgggaaaggtaattcttgctaccggcattacgcctcaggtggaattgtctgacacgttgttcgagctgtttaccagaattacggcgacattgcgagtctcggtggaaaccgaatcggacgaatcggatcaataggggagttggggaattatgaagaatctcgattatttggactgggccgtagtgggccagccggacaatccgatgtcgggtgataccgagggaatcgcgcgtatggcatggaagtacaagtgtttgtcgcgggatttctccgaaatggcgtccgcattgaagaatctggacacaaaggccggcatgcagggcgagtgggttgtcaagttcgaggagaagctgcaggatcttcctagggatttcggccgatttgctgacagctttggtgaggtgtcctgtcagctgcgtggctggatgcagtctttggacgggttccagtcggatgccaaaacccagttggaacgtgccatcgccgcacgcgacgagaaggagcggtatgagcggctgtcttgtggggcgcgctcggcattgacgcaggcgggggcggtgtttgacgagttgcccgatgccgccacggatgtgcagcgcaggaatgcgcgtgaggcgaaggaagccgcacagcagatgctggacgggtacagcgaccatgtcgagaccgcgggcgatgagtgggcagatgcgaaacgtcgtgtacgtgatatccgcttggcctatgagagtgatacgggcggcagacatcgggtccatgggatgtggcgaaaatgttcattccggggcttgcccagttgaatgatgcggcggatgcggtgaacaatgccggtgaaggatttgtttatgcgggttccgcgattcgttcctttatggtggagaggtgattgatatggtgagaagtggtggtcggccaccgtgggagcgtggagccgctggtgtgggcggtgatgccgaggctggcggttctgatgtcggcggtgagaatcgtgttctggcgaatggcgcgttgggcgagttcatcgacatgtgcattcctgtgggtggcaggcgtgtgttcactcgtttgggggttgccttgtggactatcatgtggtttgtgctgttccttgcgcaggtaggtttgcaagcccggtatgcgttcttcgaacgtgattccgctagaggtggtgtgtggttcctgcagatggccggtatctcgttgtcgagcgattggtggcctgtggcggtctttttcgacgtgggtgttgttccgggactattgctgtggctggctgctcatgttatgcgcaagccgtggattgctgttgccggggacgttctgattgttcagtgtgtcgccggtgccgtgggcgcggagattggaaagaccgttatgtatgcgatgtatggtccccatgtcgaaagtttgattgactccacgactggacgtccggacagactgtattacgacagttctcctgctgtggtggtgcctggtttggttgtggctggggttgccgtggtggttgccgtggtgcttgtggtgttgcgtggggtgggtgtttccccgcgtgtgcgtgtgggtggcaatgtggttgccggtttgggattaatgggcatgttgtgggtcggcccggccgatgcgaatcagttgttctgggtgaattccgtgatggcggtcggcatggtgttgttctggattcccggtgagcttcgtgcgatccggcgttgtgtcttggaggggcgtgatgcctcgtggcagcctgtggctgctggtttcctggtgcttgatttcgtcatgttgatgctgcttgcctacgcggccgccacgggtgtgtgatgtgggtgcggcgtgtttgctgttcggatgttggtatggagggtgttgctgtggttgttgacggtgagggttttgtcgggtgtgtccgtggtttgagggatgcgttggctggtttgcctgttgtggttggcttgttgccgtcgagtcgtgcggctcatggggttgtggcgcgtggctatgacgtgttcgggcagggggcgttcggggatatggtcgcgttatcctgtacggtctcgccaggggcgggcgcagcgcgtgcggaggcgatgcgttttcttgatggggtgatatccgtcgtggggaaaagcggaatggtcggttggctgtttcgtgtgttgtggcgggcggatggttcgttgttggatgcgtatggtcgtgttgccgaggggcggatgccgttgccgggtgaggagagtgctgacgagttggaggggtatgttgatgcggtgtgccgtatgggtgcgtgggtgttgttgcgttggtctcttgatgatgatgtgacgcgggtgtgggcggatttgttgttgcaggggcggtatctggaggtgttggatggcatgatgccgtatgtgtcggtgtcgttcgattctcggggtgtggagcggatgaaggaggtgctggccttccgtgaatccggtgctggtcttggctcgtcatcgggttcttctgtttcggttgccgatgctgttggtgtttccacggattctgtggatgcggatgttgctgatgctgcatgggatgccgctctgtcggatgcggcgatcggattagatgccggagtggtgcgtgcgtcccgccagtatgtgttcgatagcgagcatgtggaagcggcgtgcggggttctggctggtgtggaatccggggatgcgtgttctaacgttgtggccggtccgtggctggataggaatttcgtggattccaaggcgcgtgggcttgttggcgcgcgtttggcgtcgttgttgatgcgtgcggtggacgagcgtgatggggaggcgctgcatgaggcgttgggggtgttgtcggattgtcgggattgcgtgcgtgggtacggggttccggcgttgcccatcatgctggccggcatggggcaggatatgacggctcgtcgtggtggccggcgtgacgatggttcgtcgccggaggcgctggatatgagtgcggcggctgcggtggtggcgttgacatggatcgcggacgtgaaggcggctcgcaacatgggattggcgttgctcagtggtgatatgcccggatacgtgcgtctcgccgaccagttcttgaatggttccgcggagatgggcgtcaggtcaatggagggctaagagcaagtggcaggtgtggcttattgggtgggcttttcgatagtgctggtggaatgcggttgggtgcccatttcttttgtgctgttgttggtcgccctgtttatggcttgggcggtgctgccaagcgaagtggcgattgcccgtcaatgcgccagcaagcgggtcgaaccgttctggatgtggtattccgccgaactcatctgggtcgagactctgttcatattccttgccatcatggttgccatctcaggaatctgacatggccggtgaagcttaccggggctcatgcgcaacgaaccatttccaagcgggcacttgtttgatgacataattgctgttgcggtattcgcgctcgattccatcgccgacgatgatggttccttcatggagcttttgttcggccatgagttcccagagcgcgcgggtttctctctcgatggtccgattatcatccatgcgtgccgtgacc

SEQ ID NO: 3681 - DNA, 37647 bp, Unknown
  R150_10m  MAG No. k141_777
ggagttacccgttcaggtgagctcctgcgactgggcttgaaccagtgaccgtccgattaacagtcggatgctctgccaactgagctacgcaggaatgtctgctgtgtttgagatttctctcgcgcacaagtcatacatcttacatgcctgccacgaaaaagcaaattacatgcgtgtagggcatgtcgcgccgaattccgcagaatcggactcatcgaatacccactcatacaacatgatgacgatgcggcgatactgtcacgcgaaatttcattgtggataacttcggaagctggaaccacataggtcgttctggctggacatcctgtttcggacccctcaaggtgggtatcaccggcaaagaagccggaatcgcatcacactcacactatggggaggaatctcatgaatgcaccactgttgtttgattggcgtcgcgacgaagcccgacgtgccagcaggcggcgtcagcaggcgcgtcagcgggctcaggaacggcaacggcgtatggatgccataatcgcgttggccgccgttatcggcctgctgcttgccttgggagtgggactggcatccacgcctcagcatgttgcgcatgcggatactgcggtgaccggagatgcggcatacacggtggaggatttcaccgatatgtctgatctggcgtggcgcaatggcaatcagtgcgaatcccggttcgactggccggtcgacgatccacaggtcgaacaacagttcgagcggccgatcaacccgtgggcaccaggtcatcgtggcgtggatcttgctgcggagcaaggtaccgtgattctgtcaccacaggcagggaccgtgagttttgctggcaaagtagctggcaaagatgtggtgagtgtacggcatcgtggaggtgtcacgtcgacattcgaaccggctgttaccgagctctcggtgggggatacgatctcccgcagacagcccgtaggcatcgttgagggcaactcggaccattgcgaagaccgttgcctgcattggggcctcaagcgaggaacggccgactatcttgacccacagcaatatgcggggagtcgaaaaatcgtactgaagccgtcatgattcagcaatgtttgtcggccggaacagggccgtacggaagaggcatcgcaggcggctagcggcgtgacgagtatgaatcacagaccggcatcggccaaggagatatatccgggggcgatcagcgcggacttgagattgctggcgctgacagccagcaacggttcgttgatggtcgggatcttcttcacgccgcctacctcggagttcctgattgaaggcatggaattcagcgcttcgttcttgttgagcctggcgcaggcctgagcgatatccgtggcgatggtctgtctgtcttccatgccggtcatccattgcttgccattgacgatggatgggatgttcgagacgtacgcgccgtatccggtcaccagaggccattgcgagtcacggtccttgtcggaagcggaggtgtccttatccgcatcgtcatcggaactggatgagtcgtttgcgttgtcgttttcaggggatttgatcgggtccggcactgcgtcgcggctgagatccctcttgccggtgatattgccgacaatgcccgagatggtgatctgcggattgatatcggcggcagagccggtgtatcccagatcgtccaattccttgacgacctcggaggcgatatagtcgttcatcgtgatgataccgtcaatacgggtgagtgtggactgcccgtcggtttttgccagacgcttgtcaagcactttcgcagtggagccttccttggcggcatcgtaggccacggcttgccaatcgttttccgtggatttgccgtccaaggtgcctgaagggctttccacaacgcccttctgatagtaggagcccagtacctgccagataccacggaacgcctcttgggcgaacgtggaatcgttggcgttgcctttttcgtccacggcggtgtatggcagcagcacctcaatgtatttggggttgtctttactggccttatccaacttgagtttggacaccatcttttccgcctgtagcttgccgatggtctgggcgtccgagaacttgacgaaggcgtccggcctatacccctcgatgctgttgccgagcaataccacatgcatgccggattccttggccagcttgagcgatgagaccagccggtccacggcctgcgcctgctcgtccgatgcagtgccgtcgctctcagtgttggacgagtcatctttggaagagctgtcttcggaagaatcaccgtcagaagtagctccctcatccgtggcatcgttggtgctcaggttctggctgacgtaatcgccgtattggcgagtggaagcgtcggcctcgactactggagccacgagcaatgtcatgttgtcgggcgcgatggcaatgccggaatcgtccgtggtgttattcgaaagatgatcgaccacaaagtcttggatggcgcggctttgcttgtccaacgagtcggacgtcgtatgatcgatatcgcctttcttgaaaccggcgtcgaccagggccttggttaggtcgggcaccagcttcgcccatttgttcagtggcgtctgctgattcagcgtaatgccgtccgaaggcgtgaacacggccacgccgccggcagaattggacgtcaccgtggtttgaccatctacaacggtcttattgtctgaggtgcacgcggtcagtgacagcaccatcgcgcaggatgcgacaatggcggcgagcagggtggttgagcggcgtgcgaacaccataagcggcgaaacctcctcaagcgggcgtgaaaacaaactgaatcacgattctagtaggccgtatacgaaaaagtcccggaccagtggacaaatcgccacatatccgggaacaattaggggtatttcgcgcgtgtatcgaacaactgtcatgattgtcgtgctgaggaacattccagatgaagcacgacaatcatgacagttggcgacatgacatgacccatgtaggtccgcacgatgtgttcgatgatttactcggccagagccttggccaggttctcgtccagcgcgttcatgaagccgtcggtgtcgagccacggttcgtccgggccgatgagcatggccagatccttggtcatctgaccaccttcaacggtgtcgacgatgaccttgtccagcgtctcggcgaagtgacggacttcgggcgtgccgtccagatcggcgcggtgcttgaggccgccggtccacgcgaagatggaggcgatcgggttggtggaggtcttctcgcccttcttccagcggcggtagtgacgggtcacggtgccgtgcgccgcttcggcctcgacggtctggccgtccggggtcatgagcacggaggtcatgaggcccagcgaaccgaagccctgggccacggagtcggactgcacatcgccatcgtagttcttgcaggcccagatgtaaccgccgtgccacttcagggagctggccaccatgtcgtcgatcaggcggtgctcgtaagtcaggccggcctcggcgtacttgtccttgtattcggtctcgaacacctcagcgaagatgtccttgaattggccgtcgtaggccttcaaaatcgtgttcttggtggacaggtacaccgggtaatgacgcatcaggccgtagttgaagcaggcacgagcgaaaccgcggatcgaatcgttgacgttgtactgcacctgggccacgccgccgtcttcgccgtagttgtagaccacgtgctgaatcggctcggagccatcgtccggagtgaaggtgacggtcagctggccggcgcccggaaccttgaaatcggtggccttgtactggtcgccgaatgcgtgacgggccacgacgatcggcttggtccagccgggcaccagacgaggcacgttgctcatcacgataggctcgcggaagatcgtgccgcccaggatgttgcgaatggtgccgttgggggacttccacatcttcttgagaccgaattccttgactcgggcctcatcgggggtgatggtggcgcacttgacgccgacatggtgcttctggatggcgtgggcggcgtcgatggtcacctggtcatcggtctcgtcgcggtgctcgatgcccagatcgtagtagtcgaggttcacgtcgaggtacggcaggatcaggcgatccttgatgtccttccagatcacgcgggtcatctcgtcgccgtcgagttcgacgacagtgccttcgaccttgattttggccatgcttcctcctgatagatggtgtgaagatgatttagtcatagcgcatgtttgtaacgacttgaagcaatcgtccggtccgtgggaaacgaccttgttggcgtcccacccgggcaataggcttacaaccatgtctcaggaaattgaaatcggtttgggcaaaaagggccgtctcggctacgcactcgacgatgtggcgatcgtcccctcccgtcgcacccgcgaccccgaggacgtctccacctcttggcagatcgacgcctatgagttcgatgtgccggtgatcggcgcccccatggattcggtgaccagcccggccaccgccatcgccatgggcaagatgggcgcgctcggcgtgctcgatttggaaggtctgtggacccgttacgaggacccgaccccgctgttggacgaaatcgccgggctgccggccgatcaggccaccgagcgtatccagcagatctatgccgagccggtcaagccggagctcatcgcgcagcgtctgcgcgagattcgcgccgccggtgtcaccgtggccggcgcgctctccccgcagcgcacccagcagttctactccaccgtggtggacgcgggcgtggacctgttcgtgatccgcggcactgtggtctccgccgagcacgtctcctctggccaggaaccgctgaacctcaagaagttcatctacgaccttgacgtgcccgtcatcgtcggcggcgcatccaactacaccgccgccctgcacctgatgcgcaccggcgcggccggcgtgctcgtcggcttcggcggcggcgcggtctccgccacccgccagaccatcggcgtgcaggccccgatggccaccgccatcgccgacgtggccgaggcccgccgcgactacatggacgaatccggcggccgctacgtgcaggtcatcgccgacggcggcatgggcgactccggcagcttcgtcaaggccctggccctcggcgccgacgcggtcatgctcggcgcgccgctggcccgcgccaccgaggcccccggcaagggcacccactggggttccgaagcccgccaccagacgctgccgcgcggctaccgcaccacggtcggcacggtcggcccgctcgaacaggtgctgttcggaccgagccaccaggcggacggcaagaccaacttcatcggcgccctcaagcgcgctatggcctccaccggctacgtcgacgtgaagaacttccagcgttgcggcatggtggtcaacccgtattccgcacgataatcccgattaccccccctgaaaatgggggtttgccctccatgcaggaggcttagcttgccctaaggcgcgctcaagtcgtttgacttggcgcgcctttcgtgatgttgtagtacaaacgctcgccaatgatggtgagttgcaagggggcttgaaggggtcatcatggagtattcgggatttttccacggcacatatcagtacgggccgttgccgagttatgacggattcatcgttgtggagctgtcggatcgcccggtgcggtatcatatccaacccacattcataggcgggctgaatgcgaaggaatgtcattccatggccatggctgcatgccgcatcgcctgcacatcggcggacgcgatacgtggcagactcagcgtcgcacatctcaacagagccatgacaaaaccatgcctggaacggctgcaaaccatgcaatacctgctcggcacccacatggtcactcatccggagctcaaagcgaaattctgctatctgcccactgtccccacattgatcgacggcatgatcaccggcaaggacacgctggaaatggcggtattcatgaccatcggccaggaaaatctgcgagtcaacctcaaactgaagttcatcggttctcgatggatgtgcatctatgccgatctgggctgaccagacggccccgccctcacaccgattcctacgctggcagcggaagacggttctgccgtgtcataggctggttcgcctatagtagtgaccatgcgtgaacatgtagaagaacccagatatgtcaccaccgatgacgacaccgtctactcgctgctggccaaacgagcagctcgcacgccggatgacatcatcgcggaatggcaggatgacaacacccaccaatggcgcggcgccacagctactgaaatgctgtcccgcgtacgcgaggtggccaagggcctgttgggacttggcgtcaaagccggcaccatggtgctgatttactcgcctacctgctatgagtggggtgtggctgatttcgcttgcgcggcaatcggcgctgtggttgtgcccgtctatgagaccgattccgcccgtcagaccgcgggcatcgtcgaggaagtcgatcccgccatcgcctttgccggcgacttccagcgcgcacagacgcttgagcagatccgtgtcaatcatccgggcatgaaatacgtgttcaatttcaaggccgatggccttgacgctgtcgctgacttcgggcatggcgtatccgatgagacgttggatgcggctatcgctcgtatcaaagccgatgatctgcttaccgtggtctacacctccggttccaccggcaagcccaagggcgcgatgctctccaaccgcaattacacgcacatcgtgcttaacggctacgagattctgcgtggcatgctgtacgacgacaaccgtctgctgctgttcctgccactggcgcactgcttcgcccgctacatccagtacgtgtgcatcggtggctgcggcgtggtcggatacattcccgacgccaagcgactgctcgccgatatccgcagcttcaggcccacctacctgctgggcgtgccacgtgtgttcgagaaggtgtataacgcggcctcgcagaaggctggtgccggcatccaggggcatatcttcgcccagtcggtcaagcacttcgtcaagtggagcaaggatgagcaggccggccgcggccattcgttcatcgagcgcatgcgccattcgttctacatggccacggtgggcaaatccattcgttccgctctcggaccgaacctcaaatggctggcctgcggtggtgcgccgctcaacgtggatttggcccacttcttcaacggcatggatgacatcaccttcatccagggttatggcatgaccgaaaccgccgctccgatgctcgtcaattgggaggacgacaacgaggtcggttcggtcggcaagcctgggcctggcatgggcgtgcgtcttggcgaagacgatgaaattgagctgaccggcccgaacgtgttccttggctactacaagcagcccgaactcaccgcacagacgatgactgccgacggctggatcaaaaccggcgatctgggtcgtatcgacgaccgcggcttcaccttcattaccggacgcaagaaggacatcatcatcaccgccggcggcaagaacatcagccccgccccgatggaggatgtcatcgacacctgcccgatcgtggctcatgcagtagtagtcggcgacggcaagccgttcgtgtccgcacttatcgagctcgaccccgaaatgctgcattcctggctggaaggtcagggcctcaatgccgacatgacactcgccgaggccagcgacaacgacgcggtgcgtgcttttatccagcagtacatcgaccaggccaacgccaatgtctcccgcgctgagtccgtgcgcaaattcgcggtgctggatgaggaattcagtcaggagcacggcacgctcaccccgagcatgaaagtggtgcgtcccaaggtattgcagcgctacgccaccgtcatcgaagaggatctgtatgcgcccaagccctccaacaaaccgctgcccgccacagccaagatcatcgacagcacgctggagaccgtcaagaaatcctccgaatcggtcaagcaggcgtccgaacaggtcaaacaggcctcggaacagatgaaaaccagcgtgtctgattcgattgctagcgtgtcggagaagatcaagaagtcgaaggccgaacccgaagagggcgagaccggcgattccgccgacaatgccgacaatgccgctgacaccggcagcaagccggaccggccggctgactagaagaacgaggagtaacgagaagtggccatccgtgagatcagggtcgtgcccgacccagtcctgcgcaccccctgcgatgagatcaaggaaatcaccccggccgtgcgccgcctggttgacgacctgctggaaaccgtggacgatccgggccgagcgggcctgtccgccaaccagatcggcgtgagcctgagggccttctcctacaacatcgacggcaaggtcggctacgttctgaaccccgtactcgaggagaagtccggcgagcagtatggcgatgaaggttgtctgtccgtgcccggcttgtggtacaagacccgtcgggccgactacgctcgcgtgcgtggcatcgacctggacggcaacgaggtcgtgctcgagggctccgggctgatgggccgtatgcttcagcacgaatgcgaccatctcgacggccacgtgtatttggatcgcctggaaaaggaagaacgccgcgaagccctgcgctacatgcgcaatcgtcaggcgaagtagtccatacccggctcccgctggcgggagccgccgaacgtagtgagactgagggtggttctgccggtaccgcccgtaactcccctcagtcgcctacggtgacaggctcccctcagagaggggagcctgtttttcttagtaccggctccgtgctatccttgaaacttgtgtgccacccggcaacggacgcagtcgctggcgtccggaaccacccaatattgtcaaccggcacacaacaaattcgcgtcatgctcgcgacggcctgtgtcggtcggctgcacaactcgtgaaaccgggggagcagctgcacgcaggtgcgcatggccaggcaagaaccgacaatgaaaggtagtaataccatggctcagatcactatgagcgatatgctgaaggctggcctgcacttcggccaccagacccgtcgttggaacccgaagatgaagcagttcatcctcacccagcgcaacggcatccacatcatcaacctgttcaagtcgctcgacatgatcgacaaggcgtacgacttcatcaaaaccaccgtggcccacaacggcaccgtgctcttcgtcggcaccaagaagcaggctcaggaagctatcgccaaccaggccacccgcgtgaacatgccttacgtctccgagcgttggctcggcggcatgctgaccaacttccagaccgtctccaagcgcgtcaaccgcctcaaggaacttgaggaaatggacttcaccgacgtgcacggctccggcctgaccaagaaggagctcctcctgctcgagcgcgagaaggacaagctcaacaggcagctgggcggtatccgcaacatgaaccgcaccccgtccgcgatgttcgtcgtcgacatcaccaaggaggccctggctgttgaggaagctcacaagctgggtatcccggttgtcgccatcgtcgacaccaacgccgacccggacaccgttgagtacccgatcccggccaacgatgacgccatccgcggcatcgaactgctgaccagcctgatggctgacgccgtcgccgaaggtctgctggagcgctccggcgccaacaaggccgagggcgaagccgccgagcagccgatggccgcttgggagaaggaactcctgaccaacgaggctcctgccgaggcttccgctgaagccgccgctccggctgccgccgagggcgaaaccgccgaggcccccaaggccgagtgatgctctacgatgggaagtgcctgaataagcgcttcccatcgttcatgggtaagcaaaatttctcaaggagaataatcaatggcagcaattaccgccgcactgatcaagcaggttcgtgaagacaccggcgccggcatgctcgacgtcaagaaggctctgaccgaagccgaaggcgacgtcgcccgcgccaaggaaatcatccgagccaagggtatcgccgcagccggcaagcgtgaaggccgcaaggctcaggaaggcaccatcgcctccaaggtcgtcgagaccgccaatggcgagaccggctacgccgtcgagctgaactccgagaccgacttcgtggccaagaccccgaagttcgtcgagttcaccgaggaagttctcggctacgccgtggacgccgacgccaactccgctgacgagctgctcgaggccaaggccggcgacaccaccgtcaagctggctgtcgaggaggccgccgccctgttcggtgagcacgtcaaggtcggccagttcgccaagatctccggcgagcacgtcgaagtctacgctcacaagaagtccgccgagatgccgccgagcatcgtcgccatgatcgccaccgacaaggccggcgccgccgtggctcacgaagctgctctgcagatctccgccatgggcgccaagtggctgacccgcgaggacgttccggccgatgtggtcgagtccgagcgtcgcgtggccaccgagaagtccctggccgagggcaagccggagaagatcgttccgaagatcgtcgaaggccgtctcaacgctttcttcaaggaagtcgtgctgctcgagcagccgttcgtcaaggacccgtccaagaccgtcggcgacctgttcaaggaagtcggtggcaacgccaccgcattcgctcgtgtcgaggtcggcaagggcgaagaggagtgagcctaaggcttactccacgcgcttagcgtaatttcaacgaaacgccatccggttattcaataatcggatggcgtttcgctattccaagggtgtcgttgctagggggtgtcgtcgtaaaccgatacgcttgtctacggataatttcgcactttcggttttgagaaaggcatgatatgactgatagcgacaagccgcgcagagttctgctcaagttgtccggcgaagcattcggtggtggcaaggtcggcatcgatacccatgtgattcgtcgcattgccgaggaaatcgttccggccgtacaacagggtgtgcaggtggccatcgtggtcggcggcggcaacttcttccgcggtgccgaactgcagcaggccggtatcgatcgttcccgcggcgactacatgggtatgctcggcacggtgatgaactgcctcgccctgcaggacttcctggagcaggagggtcaggccacccgcgtgcagaccgccatcaccatgggacaggtcgccgagccgtatattccgctcaaggccatccgtcaccttgaaaagggtcgcgtggtgattttcggcgccggtgccggcatgccgtacttctccaccgacacggtttccatccagcgttccctcgaaatccactgcgacgaagtgcttatgggtaagaacggcgtcgacggcgtctacaccgccgacccgcgcagggacgagaacgccaagcgttttgaaaccctgagctacaatcgcgccctcgtggacaatctggcagtcatggacgcctccgcactgtccatggcccgcgacaacaagaagcgcatccgcgtcttcggcctcgaagagccgggcaacgtgacccgcgccctcgtcggcgatgaaatcggtacgctggtctccaccgccgaatcgcgcgtggccgagtaagccgcaaacgcctacaatcgaatcaaacgttcatagacgaacaacacagacgaacaccaacacacaaggagtgaatatgtctcttatcgaccaggccaaggaacagatggccaggaccgtggaaaacaccaaggaaaacttctccggcatccgcaccggtcgcgcaaacccggccctgctcaacggcatcaccgtggactactatggtgcccccaccccgattaaggccgtcgcctccatcggcgttcccgaaccgcgcaccctgtccgtcaccccgtttgacgcttcccaggccggtgccgtcgaaaaggccctgcgcaactccgacctcggcatcagcccgaaccgtgatggcaacgtcatccgcctgaccatgccggaactcaccgaggaccgtcgtaaggagtatgtcaagctcgccaagggcaaggccgaggacggcaaggtcgccgtgcgcaacattcgccgtaagaccaaggaaaccatcgacaaggccgtcaaggacggcgagatgggtgaggacgaaggcgatcgcctgctgaaggatcttgacaaggtcaccaagtccgttaccgacgagatcgatactctgctggagaccaagcagaaggagatcatggaggtctgattcagaccaggtccggagaattatggaacgcaacgaacaactccatgaagaggccgaggagacgctcgaccggatcaacaagaagaccggccgcaacatgccgcaggccatcgccacaggcgcggcactggtcatccttattgtcgcgtgcctgctgctcagcgtcgacctcttcgtgctgctggtagtcgtgttcatgattctggcgctgtgggagctcagggtggacttcgccaccgtaggcctgcacatcccggtgttcatgctgtggctgtgcgcgtccttcaccctcatcgccacctattattccccgtaccatctcatcacgatgtcgctgagtatcatcgtgtcgattattctggtcgccatcgcggccagcgcaaaaatcagcgtcggcaaccgcctatctctggcggttgccggcaaactgtccaacacggatgccagcgcgcgcctcgaatcctcgttcaatcatgagggcggggaacagcatcattcccggctcagccatgtggctgtgtccgtgcttaccgtgttgtacattccgttgctggccagttgcatcatcatctcgctgactttcaatgggcatccgattgcacacgccatcatgctggtgttcctgcccgccctctccgatacgggtggtttgtttgccggtgcctggctcggcaagcacaagctcagcccgcgtatctcgccgaagaagtccgttgagggcctgatcggctcgatgctcttcgccatggctggcgcattcgccgtattcgcatgcacgtatgatgcctcgaaatgggccactcgttggtgggtgccgatcgtggcgggtattctcatcggcgccgtgggcacgttcggtgatttgtgtgcttccatgctcaagcgcgatatcggcatcaaagacatgggccatctgctcaagggacacggcggtgtgatggatcgtgtggattccattttgatgagtgcaccgttcacctgcgccttgctgtgggtcaccggactgtgattcgcatgcctcgtgcatgaacaatgtggcatcgtgtgtatatcgcacggtgccacatgtcatatatgggggcaatcatcgttcaatatgcgttcgccatgggctaagacatgggccatctgattcgtatgcggcacgccgtatggtggattctgatatttctattgcatgtttgactattttctgatattgagagcgaagcgaacccatcatgaccacacagcatcctgacactccggaaaccggcattactcccggcggcacatcaggtgccttccgtgacgtgctatccaaggaccatgcccgccgtggtaagccgccgctgcactttgtggatatgacgcccgagcagcgcatcgagaaagcggccgaactcggattgccgaagttccgagtcaagcagctcgccaaccattactttggccatttcgatgtgaatgccgccgaattcactgattttccggcagccaagcgcagcgaggccgccgccgcgttcttcccgcagctcatcaccgaggtgacccgccaagtggcggacgaaggcaccaccatcaagaccttgtggaagctgttcgacggctccctcatcgaatcggtgcttatgcgatacccgacccgcaccacgctgtgcatttcctcgcaggtcggctgcggcatgggctgcccgttctgcgccaccggcaagcttggcctgacccgtaacatgtccaccggtgaaataatcgaacaggtgcgtgtggccgccaaaatgatgcgtgacggcgaagtggccgggggagagggccgcctgagcaacatcgtgttcatgggcatgggcgagccgatgggcaactacaactccgtgctgtccgccgtacgacagatttccgccatgcctcccgaaggcttcggcatttccgcgcgcaacatcaccgtatccacggtgggcgtggtgcccggcatcaagaagctcactgccgaaggcattcccgtgcgtctggccgtttccctgcatgcccccagcgacgaactgcgtgacgagctggtgccgatgaacaagcgtttcaacaccacgcaggtgttggatgccgcgcacgattattggctggcctccaagcgccgcgtcagtatcgaatacgcgctgatgcgcggcatcaacgaccaggccgagcatgcgcagttgctggccaagaggcttaaccattacggcgacaactgggcccacgtcaacccgattccactcaaccccatcgagggctcgaagtggaccgcctccaagccggaagacgaacagcggttcctggagatcctgcaccgcgcgggcatcaccgccacactgcgtgacacccgcggccaagacattgacggtgcctgcgggcagttggccgctaaggagcggtagttacttcagcgcatccttgattgcgtccacgaagtagtccaaatcagcgggcttgcgggacgtgatgagcttgaagccgttggcgtcgtccacgtgcagctgctcgtcgacgtaatggccgcccgcgttctcgatatcggcggcgatataacggcagggcgcggcggtcttgccagccaccagacccgcgttgaccagcagccacgcgccatgacagatcgcggcgatcggcttgccttcgtgcgcgaactcctgcgccagcgcgatcgcatcctcattgacgcggatacgatccacattgcaggtaccaccgggcaccaccagtaggtcataatcagcggtctgcacgtcgctcagcagcgcatccggcgtcagcgtctcgccttcgtagcggtcgtgctgcaccgtctcacacgggtccaaggtagtggcggcaagcgtcaccttggcaccggcggccttgagatcgcgcagcgggcgcgtcagctcggattctcatattccagaaacgggtgcggcgcatgtaacgggcggtaggtagtctgaaggactgtaatgcaaagccgaacaggggagtgaagcatgtcgttggcggtacgagtcatcccgtgcctggacgttgacgccggtcgcgtggtgaagggtgtgcatttcgaaaacctcaaggatgcgggcgacccggtggagctggcggccgaatactatcgtcagggcgccgacgagatcaccttcctggatgtgaccgcatccagctcccaccgcaacacgatgattgacgtggtctcccgcaccgccgaacaggtgttcattccgatgaccgtgggcggcggcgtacgcacgcccgaggacgtcgactcgctgctgcgctgcggtgcagacaaggtcggtgtcaacacggcggccatcaatgacccgtcgcttatcagccgcgtggccgaccgtttcggcaaccaggtgctggtgctctccgtggacgcccgccgcgaaaagggcgagcaacacacgcaatccggcttcgaggtcaccacgatgggcggccgcaaatccaccggcattgatgccatctggtgggtcaagcgcgccgagcagcttggcgccggcgagattctgcttaactcgatggacgccgacggtaccaaggaaggctttgatctcgagatgattcgcgccgtgcgcaaggaagtcaagattccgatcatcgcctccggcggtgccggcaaggtcgaggacttcccgcccgccatcgaagcaggtgccgacgcggtgctggccgcatccgtattccattacggcatcctgaccatcgccgatgtcaaggcggaactcaagaagcacggctacaccgttcgctaaacgaatacaccttgctcccgctggacgaacaatccagtggattgttcgtagcagtgcgctatgcacatgtcgcacataatccgggagctgtcagcgaagctgactgagggtggtccacataaggaagataggtatgacagacactacatacgacaattccactgaactcgatccccgtattgccgcacgcctgaagcgtgacgccaagggcctggtcgctgccgtcatccagcagtacgacacacacgaggtgctgatggtcggctacatgaacgacgaggcattacgccgcacgctgaccaccggccgcgtgaccttctggtcccggtcccgtcaggaatactggcgcaagggtgatacctccggccatgtgcaatacgtcaagggcgtgtccctggattgcgacggagacgcactgctcgtcgaagtagaccaagtcggtgccgcctgccacaccggcaagcgcagctgcttcctcgaaggcggccccctgtccgtggtcgaaggccaccgcccggccgagcagtagaacgggcttccctgactgggggaagccgaacgaccgcgtactacgaaacaagacatcgagttgtaagtaaaggagcgaatatgagcgaatgcagcgtcaaacacctgaagtggggcgccacctggcccagtcgcggccagttccacgaactggccgacgccggctaccgtgtgattccgatcgtgcgccgtctgctcgccgactcgctcaccccggtcggcttctacgagcgtctcgccggcggccgatccggcaccttcatcctcgaatcggcggaatacggcggcacgtggagccgttacagcttcatcggcgtcaactcgatggcccagctgcgctccaacaacggtcaggccgactggctgggcaaggtcccggttggtgtgccagtcaccggtgacgtggtcgaagtcgctcacgccacgttgaagactctgaaggccccgcatgtggaaggcctgccgaacctgaccagcggtctggtcggcacggtcggctgggatgccatccgccactgggaaccgaccctgcgcgccgaagctccggacgagaccggccagcctgagaccgtgctcgccctggccaccgatatcgccgtggtcgaccacgtatccggttcggtgtggctcatcgccaacgcggtgaacgtggatgataaatccacccgcgccgacgtcgcctacaacgaggccgtcgctcgactcgaccagatgcagcacgatgccgccaccccggctccgggcgagtcccgcgtcaacatcttggacgaaacggtcgcccagcctgagctgcgcttccgcaccgagaaaagccactacgagcaggccgtcgaacgcgccaagcagcacatcgtcgacggcgacgtgttccaggtggtcatctcccagcgtctcgacatcgattcgcctgccgacccgttcgacgtgtaccgtgtgttgcgcacgctgaacccgagcccgtacatgtatttcatggcgttgaccgatgctcagggccgcgacttcaacgtgatcggctccagcccggaaaccctcatcaaggtggacaacggccacgcgatgaccttcccgattgccggatcccgccctcgcggcgccacccctgaggaagacgaaaaattcgccaaggaattgcttgccgatccgaaggaacgcagcgagcacatcatgctcgtcgacctgtcccgcaacgacctgagcaaggtgtgcgtgccgcagtccgtggaagtcgtgcagctcatggacatcaagcgtttcagccacatcatgcacatctgctcgacggtcaccggcaaggtcgacccctcgctgaccgcattcgatgtgttcaagtccgcgttcccggccggcacgctttccggcgcgccaaagccgcgcgcagtcgaaatcatcgacgagttggaaccggccgaccgcggcatctacggcggcaccgtcggctacttcgatctctctggcaacatggacatggccatcgccatccgcaccgcgttcctgcgcgaccatgaggcgagcgtgcaggccggtgccggcattgtgctcgactccgtgcccgctaccgaatggcaggagacgcgcaacaaggccgaggccagcgtcgaatccatccagatcgccgcccagctgcgcgaactgtaacgttcaacgcatagcgatgcccctgctgacaactgctgtcagcaggggcataacaatatgcgtatcagtgggtttcgcccatgatgtcggtggcgtcggttccggtgctcacagcggcctcgatggcggcttcgatgccgcgcgccatggtcgcgatttccatggtcggcgtgccgttcggcttgcccacgccctgcgcggtcgcatacggcacatgaatgaagccgcccttgacgccggggaatttgcggtcaatcagatacaacacgttatacatgatgctgttgcacacatacgtgcctgccgtatacgacatgaatgcgggaatcccgtggtcattgatgttcctgaccatggccttgaccggcaacgtggcgaaatacgcggtgtcgccgtcctcacgcaacggcgtatcgaacggctgctcgccatcattatcgggaatacgcgcctcggccaaattaatggccactttctccacggtcagagccgaacggccaccagcctgaccaatgcacagcacatagtcaggctgctcgcgcaccatggcttcctcaaccacggtcgcactgcgcgtgaacaccgtcggaatctccagtttcaccactgtcgcaccggcgatttcatccggcaacagcttgactgcctcgaatgcggggttaaccggctcgccgccgaacggatcgaatccggtcaccagaatcttgctcatcattagctccttatttcacggattgttgtggtatttggacaacgaggttattgcgcgatcagcatatagacgatctgcaccacaatcatcaccaatgcgggcagcacctgcttcttaatcacgcccatgcggtccttcatatcgagcatcgcgacgggcacgatgttgaagttggcggccatcggcgtgcacagcgtgccgcagtagccacaggtcagcgccagaatgccaatcaccgccgggtccgcaccgtaggcgagcacgaatggcgcgccaatgcccacggtcattacggtaatcgcggcgaaggcattgcccatgatcatcgtgaacagcatcatgcccacaccgaatacgatgatgcccagcgtgacgttgcccttcggaataatgccgccgaccagcgtggcgatcacgtcgccgacacctgcggctgtgaaaatcgcgccgagactggccagcagcatcggcagcatgcagagcgcacccatggcagacaacaggcgttccgaatcgttgaggaatacgaccggcttgttgtcatgcgagaacgcgaacagaatcacggcggcaatcatcacaccgatgcagcagccggtcagggcgctgacgctgggaatcagggcgccgataatggcgaacacgcccagacacagggcgggaatgaagatgcgcatgccgatgcgctggaagttcgcggccacttcggcggtgctgggagcgctcgaatcggatgccgagcccttacgcacttggcggaagatggcgggaatgaccatgatgataatgagcacgccgtccgcaatggccggaatccaacggccgaacgcgatgacgataccgagcgccgtccagaacacgaaagtgccgtagcgggccttgttggttttatcgagtaggttgcgtacgcccgcatacacggacatgaaacccatgaaaatatagaagaactcgaggatttttgtgccaacggtcacgctggggtccatgaagaacgacatatcaggcctccttgccggtggtggtagcggtggcagcctgagcggcggcttcggcaccgtagtacttcttgcgcagtcgtgtgtccttgatgatgtaatagacggctgtgaccgccacggcaatcaccgcgacaggaatctcgataatggccatgcgcaacagttcgacgtcataacccagcggcttcaacgtggactgtacgagcagcgcaccggccgtacccacgaacagcacctggccaaagaaccatgcgacgttctccatgccggaagccatgcccttgagctcttccacatactcgtcgttcggctcgtgaccggacgctgcaatcgcacccaccgccatcggcatgatgaccggacgcacgaacccggccacgccaccaaaactcacgttgaacgcggcgaacacgagacgcatcacaccatacagggcgatcaccataccgggcgtcgcattcttcactttgccgatcagctgcgcagctgcggttttcagaccgttgcgctccaatgtgccggtgaccagcaacacgatgatgaaaaccgccatgctgcggttcgagacgaacgacgtacccaacgtggtcaggaagccgtcgacgccaatgccgccgaccagcgcagtcaccacagccgccacgataatgatcagaatcgcatcaagtttgagggcgaaacccacaatcacgatcacgattcccaataacacgagataatttggttccatgcgggaaatccttcctatactgcacacgcattgcgccgcaagcgtgcccggatatggatagtgtacgacggaaatcacgattcaactgtcttatcgcgcacattgcaggtattacatgagcctacgggcatataagcgtatggacgcatgagcgtcggctgagcccggtcggcatggtgttcgctatgatggacagtcggactttggtaagagacagtattcgtaacaggcaagtaggttattcatggctattgaggtgcagggacttgaaattcagatcggcgcgcgcacgctgcttcaccccaccaacttccatgtgaccaagggagacaagatcggtctggtgggccgcaacggtgccggcaagaccacgctgacccgcgtgatcaccggcgacatgctgcccaccgccggcaaggtgcgcgtctccggcaagctcggctacctgccgcaggacacgcacgcctctgatcccacgcagaccgctctcgaccgcatgatgagcgcgcgcgacatcgccaccatcatcaaccgcatccgcaaggccgaaaaggatatgaccgacccggatccggacgtgatgagcaaggccatgacccggtacgacaaggccatgcaggacttcgacaaggctggcggctacgcggcccagtccgaggcgatttccatggccgcctcgctcggcctgccgcaggaggtcatggagcagcagctcggcacgctctccggtggccagcgccgccgcatcgagctggcgcgcatcctgttctccaacgccgacacccttattctcgacgagccgaccaaccacttggatgccgattccatcgaatggctgcgcggctacttgaagaagtacgagggcggcttcttggtcatctcccactccaccgaactgctggacgaagtggtgaacaaggtctggcatctggatgcgcagctcggccagatcgacatgtattccctcggctggaaggcctacctgcaccagcgcgtggtggacgaggagcgccgccgccgcgaacgcgaagtggccgagaagaaggccgaccgtctcatgaagcaaggcattcggctgcacgccaaggccaccaaggccgtggcagcgcagaacatgatgcgccgtgccgaaaagctgctggaaaacacctccgaggcgcagaaggccgagaaggtggcggacatccgtttccccgagcccgcgccctgcggccgcacgccgatcatggccaaggatatttccaaggcctacggtgccaacatcgtgttcgccggcgtgaacctggccatcgacaagggctcgcgtgtggtgatcctcggctacaacggtgccggcaagaccaccacgctgcgcctgctggcccacatcgaggagccggacaccggttccgtggaatacggtcacggctgcaagatcggctacttcgcgcaggagcacgacaccttggatctgaacgccaccgtgttggagaacctgcagcatgtggcgcccgagctcgataacacgcaggcccgttcgattctcggctcgttcctgttctccggtgacgacgcgatgaaaccggctcacgtgctttccggcggtgagaagacccgtctggccctggccacgctggtcacctcgcgggccaatgtgctgctgctcgacgagcccaccaacaacctcgaccccgcttcccgtgaggagattctgaaggccattgccaagtatgagggcgccatcgtgctcgtcacccacgatgagggcgccgtcgaggcgctcaaccccgagcgcgtgctcctcatgcccgacggcgacgaagacctctggaatgattcgtacctcgaactcgtagccgaagaatagtcctacctcttggctcccctcactgaggggagctgtcagcaaagaacgggttaaccctaggttcccctcgctgaggggagtctcgcaagcatgcaaaggaatcaaccatgccaaccacaacaggccagaagatcgccatcgtcaccggcagcgcgctgggtttgggctacgagctcgccagccaactcatcgccaagggctggctggtggccggcatcgacttcaacgccgaacgtcaggccgagctgagcgcgcagtggccagccgaatcctaccgcgccttcgtaggcgacatcaccgacgaagcgttcgtcaaggaatccgtggcgagcatcgccgcgcttggccacatcgacctgctcatcaacaacgccggccagccttcgttcaaggtgcccaccgcctatgaagccgctgacattgacaaatgcctcaaggggctcaaaggcatgatcctgtggacggtggaaactctcaaggcctgtggcgagcgtgacgtgaaaatcgcccagatcatgagcactgccgccacgcgcggcaacgcgaacgaaagcgtgtactgcgccaccaagtggggcgagaagggctataccaagagcctgcaggccgcatacaagggcaccagcgtcaaggtggtcgccgtctatccgggcggcatcgacaccgccttctaccgtgatagccatgactacgtctccgaagccaagcagcacaccttcatgcagcccggtccgctggccgaggtcatcctcttcaacctgatcaacgaggccaacctcaccgtcaccgacatcgagatcaaccgcaacagctgagctggcaggttatacacatatccaccgattcggccgagctggttgcgcgcagaagttggttatgccatcgtgagttgtatccgtgaataacgcggttcacggatacaaccatcagggggatggcatggagtcctatgcatacaacacgttcttcacacttgatgaggcgcgagacctcgcccagaaaacactggaacaatgccgtgccagatcgatgcgcacttcacaggagctttgcttcagccatggcaccaggctacagcttgctggtatgacggccacgctgaattacaagcccaactatgacctcaacaaactgcacgttacggtgtccggggctgaaagattgtcgaatctcaccgaaacgcaatgccattattggggtcatggcattgaccagacgatgattgatgatcttatcgccgtggtttcagtggaacaggcgctgtgtcagatcgcacagttcgtcgatgtggaaagtatggtcattgccttggattggtccacctgccgtaatgagcatttgaaacagacaacgaaagacaagatatcgttgttcctcgccgatataggtagattcccaggtatcagattatttcgcaaagcgctctcgttgtgcagagagaacaccgactcgccgcaggaaagcatccttcgccttgaatcggtaaaacgtggattacccgaattggaggtgaatgctccgatatacctcccgttgcagaacaaagaggtggttgtggacatggtgtatccgaatgatcatgtgattctggaatacgacggacggtaccactatgaccgaaaccgatgggaaggagatatcgagaaaaggaacaacctctccttcgcgggctataagacttttcccgccacaagaagaacgttcgctaccacgcagaatctggatgaatacttcagaatcgttggaagtgcaattgcggaataccgcaataccgggtcattttcacaatgagatatgaccggacgcattcattaggtcgattcttcattcattaggtcggtgagctctgacagtcaccactggaatggcgtcatcccaatggtgacaatcacagcctcatgacctaatgaatgaagaatcgacctaatgaatgattggaagcgttccgtgcaacgttatggcacccgcaagaagccggaacccggaatatgtctgttatcgtgggggccaagcaacaggtgaaggattgagtatgcacatcggtgacgatgagtttgaacgggccattgaacaggtgttggatgatttgcctgaacggtttgcgcgggtgctggagaatgtcggcatcgtcgttgcggacgaacccaatgagcgcgaactggccacaatgagcaatccgtgcggtgagctgctcggactgtatgagggcatacccatcacgaagcgaaccacgggctacagcggcgtgatgccggacgtcatcaccctgttcaaggggtcgcatgaacgcgtatgctcaacacaggccgagctgcgccaacagattcgcaaaaccgtgttgcacgagatcggccattatttcggcttcgatgacgagtatctgcactcgcacggctactgaagcgctgctgtttcactagcggggagccgtcataccgccgtatgttgccagatctactgcaagtggtgcaacgcacggatgatggcgcaacggtcctcggtggttccctcgttggcgcacatggtgtgcgtaccaacgcggattgcgcaaggtctcggcgccggtggcctcatccgtggcgacgagcgtgtgcagatcgttggcgtactggaaatgcaggtggctgagcagcccgccctcggcgaacgccttgcgcgaaggcagagggttgatggccagcagccagcggaacgggctgtcttcggcggccgggcttgaagccagggccgcaatccggtgccgatacggttccaagtcaaacgcccgcaatcccatggcggccacgcagccgggggagagggacaggaattcatcggcctcgtaatcctgcacgatatgtccgccgtcgaataccacgtaccggtcggccacgccgttgagccatgcgagtcggtgatgaaacagggcagcatcatcgtgacgcccacggccagcgcggagaccacatgcagccacggcagtcccagggcatcggggtcgagcattcccagcgcggtgagtacggcataggtcacgccgaagttcaacgcggttcgccatcgggcggccgccagcaggggcaacaggaacagcacgaccatgacgatttgcgtggcgagccctacatggaagaacagcatgaggttcgccaccagcagaaggaagagtctcgcgcgcggatcgagcgtccggcgggcaggaagatggagccgaagccgctggtgaacagggtgctcaccagtgtggcgatgcacaccatcacgaagtacagggccgcaaacacgccgatggtgatgaggtcggagacctccagtttgccggatttggcgggcttgttgagctggtcagaggtttcggcgggcgtgttcggtgcggtcacgatgttttccgtttcgtatgcattgacaatattcctctcgccaatctaacgatgatttcccgcaaggcaatagactgtctgtgatttttgcgtgcgaaacaatagagctcccctctttgaaggggagcctgagtgttccatcaaaaccgaatgctcgcccggaactcgccttcggccggttggccgagttccagcctggctcccatcgcctcgcatgccgcactggcgatggacaggccgagccccacgccgggcacggcgctgatacgcgagttctcgccgcgatggaacggttgggtcagctcgttcagatcgtccggcagcatctcatccgtggtgttcgtaacggtcagacggggtccgcttccatcctcatccgatacgacggttacgtcgatcgacccatcatccgtgttgtgcacgacggcattgcgcagcaggttgccgaccgccagttccagcaacgccgggtcggcggcgatgagaaacatgtccgcgtcgccgccggccttgttcacggttatggtgatgcgacgcttggtggcggcatcgtcgatatccgcaagggagttgccgacgcatccgtacaaatctgtggatgtgcgtgccgttgatgcgggactcatctgtgtcacatcgcccgcctgcttgccgccgatggtctcgctttgaatacgggacaaggtcagcagcgcctgcaccagttgcgcgccgcgtcgattggcatccagtgcgcgctgtaccgacggtcgcacatcctcggggaaccgcccctgggccaacggcgcgtccagattggtctccaccgcggcaatcggcgtgcgcagctcgtgcgaggcattggacacgaaccgccgctccgcttcggatgcggcctgaatccggtcgagcatgccgttgatggcgtcaccgagctgcgtgacttcggaggattggccggcagctcgaccgtccgtgcggctgtccgtgcggctgtccgtgctatgatcccaatcctcggtcccgcgtctgcccgcacgccggaactggggcctacggcgagatggcggcccattcacgtcgatgcgcgtatcaagtttggccgggtccaatgccgccgcctgcgcgctgatggaggtcagttgccgggacatgcgcgaggtgaccagccagatgatcagaatgctggtgatcccgaagaacacgaagatgatggccgcgctgatgcgcaatccggtggcgatgttgtcctggttccacacggagacgccatacggggtgttgatggtatacgatccgtccttgccccattccacctgatagtcaccgtcgcccatatcgccgccgacgctggatgttccagtgatatcgttcagacctgtgccgcttccccgggaaaacattcgcgggtcggaatccgggcgtttgccggtgccggaaccgctgtgctggctttcgacctgcatctcagggtttttggcggtgaccgtcgtggcgtacgtgaacatgctgttgaccacaatggtctgcacgagggtcgccgatcccatggcgatgaggaacacgagactgatggccaacgtcagtttggcgcggaatgatttgggccgcagtttgccggcaagcgcctgtatacgacctgatgctttcgccgtgttcgtcgccttcattgcagccggtatccttccccgcgtgtcgagacgatggcctcgcgatcggcgagtttgcgccgtagcgaatagatggtggttttgatcacgtcggtcgggtcggcggcggtcggctcatcccaaaccgcatcgtagagttcgtgcgcggtcacgtatccgccttccgcacgcatgagctccagcaatatgccgtactccttgggtgtgagtttgacgagcgtgcgcccgtggtcgcggaacacgagccggcgtgtggaatcgagggtgatgtcgccgcgcgtgagcacggctgcggtcgcgttgctggtcccgctgcgccgttgcagggcgcggatacgggccagcagttcgggataggcgaacggtttggtcaggtaatcgtcggcccctaggtccagcccgctcacgcggtcgctgacctcggcggcggccgtcagcatgattacggccacgggaatgcggttcgcggcgacggtggccatcaccgcgtcaccggacaataccggcagatcacggtcgagcagcatgatgtccacgttcgtgccggcaaggatcttcaacgcttcgacgccggtggttgccagactggtcgcgtacccctcgtagcgcagcgcgtcgtccaacgcgacggccagttcgcggtcgtcctcgacgatcagaatccgcatcatgtccccttccgagccttcccgaaccaatggcatcacccaacattttcccgattctacggtaaggcgaaagtaatccgtccgcttaccgacgctccacggtgagggcgattggatggaagtcgtcacaatcgactcacggaatggagacggtaatgtccactactcatacgcgcctggtacggcgaatcgcaatgcttacgtccgcactctcgctggcttcgatgctgggcgcctgctcgtcaccgctggcggcagtcggaacaggctcaggtgccgacgatcggtccgatgcgacgaccaccaccgacgccacggcgaagcgattcgccgcctgcctgaccggcaaaggattcgacgcgcgtacggctgctggcgtgtcgtccggctccggctcgggcaaacaagccccgaccaaaaacgcggtcgcactgcgcatgatcggcaccgacggcaagccggtcgcctcccaaggcaacagcctcagcgcatccgacgacggcccgcaactctacccgaacgctgcctacacgtcgatggaagacgacagcacctgggtggtgttcaaggacgccaaggcgctcgccggctcaccctacgaatccaaacagcgggaatacgccgactgcgaggccaagaaccccgacttcacccagcccattccggacatggggccgcaacaccagtattccggggaagacaagcaggcggcgctcgcctacgcccaggccgcgcgtaagaagggcttcgactgggtcaaggacccggacgccgatacgcccacctcaatcacgattcccggcaccgtaagcgaatccgaactgcgccgattcctcaaggaatgcccgaccgatggcgcgaacatctcctatgccttcgctggcaccaccgaggaattcggctatgactacaacaaagtcctctccgaattcacctccggcagcgcgtccaccgaagccgcgccccagcaatgagacggccatccgataacggacaaaggagcaatcatgacacggacggaagcgcgcagattcgggaaacaccgcagaatcgtgacgatgattatcgcggcgatcgccgtgatcggactggccgcggtgtgcgtggcggtgaggccgtggacgttggccgggcacgtcaccgcgaccgggcagactggccgatcgcagcaggtggatgtgtccacgctgcgcacgcaggaggtgaccaagggcgtactcaacgccgagacccggctcggcgcgagtctgcaatacgatgacgcctccgatttcgcggccgcttccggcacaatcacccaactgccggtggccggcaaacagatcaacaccggcgaacaggtgtacgagatggacggcgcgcccgtgccgctgttccatggcgaccgcccgttctggcggacgatcggcgatggcgtctccgacggcccggacgtcacgcaactggagcagaacctgcaggaactcggattctacggcggcgaggtcggaccgcatttcaactggctgacccgcgaggcgatccggcaatggcagcgctcgctcggcctgaccggcgacgcggtcaccggcacattcgacccgaatacggtggccctggccgcggccgcaccaatccgcatcacggcggtgaacgcgaaactcggccaatcacaggtcagcccggcaagctatacgggcgtcaccctgcatgcgcaggccacgttgaccgccacgcaggcggcgatgttcaaagccggagacaaggcgcaggtcgtgctgccggacaacaccaccgtcgaaacgacgctcgcctcggtcgatcagggcgggcagaagaccggcgacaacgggcaagccacacagccatcggcgcgcatcgacttcccggaccagtcgcaggtggcggctttcgggccgacggccgtgcaagtcatcatcccgaacgccgatgcctcgaccggggagacgctgatcgtgccggtgaccgcactgatcgccagcgccggcagcgcgtatgcggtcgaagcggtacgcggcggcaagttggtgcgtgtgccggtgtcaatcgggctggtgtccgacgcgcaagtgcaaatcaccaagtccgacggcctcaaggcgggagacaaggtggtggtctcatgaacgacatcgagtttgcccccgctggcccagagcatggggcattgctgacgttggagcatgtgacgaaggcgtttccaggcaaggacgggagcgtgctggagatattgcatgatacgtcactggccatcgatcgcagcgagctcgtggccatcgtcgggccgtccggctcgggcaaaagcacgctgctgtcgttactgggcacgctggacatgccgacctcgggaatattgcgatacgacggcggggatgtgaatgcgatgggtgagcggcagcgtagcgtcctgcgggccgcgcgcatcggcttcgtgttccagcagttccatctgatcgccaccgtatccgccttggagaacgtgatgacaggcctgcaatacacaaccctgccgcgcggcgaacgtcggcaacgggccgccgaggcgttggaacaggtcggattggggaaccgcctgcatcactggccggcccagttgtcgggcggcgaacagcagcgtgtggccatcgcccgcgccctggccaaacggccggacatcatcttcgccgacgagccgaccggcgcgctggactgcgaaaccggccacaccatcgtcgacctgctgctcacggcggccgattccggcgcaagcctggtcatggtcacccacgaccagaccatcgccgcacgtttccccaggcgtctgcacatccaagacggcctagtcaccgaactcgacaagccgaatcaagccccctctgacgaggggctgtcagccaaaggctgactgggggagagatatgagtgaacgtactcctatgagtaaaccaatacgcacgcgaattgcggatttgatgcatgcggcttgggttggggccgccgggcgggcgtcccgcacggtgctggcatcgctgggcatcgcgcttggcgtggccgcatatgtggcattgtccggcatcgccgcatcgaaccaggcagcgctcctcgcccaactcgacgcgcttggcgcgaatctgtcggtggtcgcccccggcgtggacgccgcccagcagaaggttccgctgccggattacgcgcccacaaccatcgcccgtcagccgcaggtcgaacgggtcggtgtcttcgacaccgcgccagagaaggtgcagatcttcaagaacgggctgtgccccaaaaccaacggcaacgcgctggccctcgccatcatgcggcccggcgcactcgacgccgtcggagcaagcctcgcccaaggtcatggcatcgacgcgaacaacgagcacctgcccgtcgccgtgctcggctcggacgccgcctaccggctcggcgtcaacgagcccggcgaccgcatcctcatcgacaacgcatggtacggcgtcatcggcatcctgaaccccacgccgcaggctgaaaacctgaacgccgccgtcatcatcggcgagcaatgggcgctcggccggtaccccgaccaggccgacaccatcggacggatcagcgccatctacgtgcgcaccacgcccggcgacgccgaaggcacccgccgcacgctcgcccacgccgccaacccggccggcggcaacgtgtccgtcaccgcgtccgccgacctatccaaagcgcgcaacaccaccaacgattcactgaccacgctcggcctgatgatcggcgtgatcgcgctggccgtgggcggcatgagcatcgccaacatgatgattgtcaccgtgatggaacgtcgcggcgaaatcggcctgagacgcgcgctcggcgccacgcccggcaacatccgcatgcaattcgtcaccgaagcggccctcctgtccacactcggcggattcgccggcatcgcgctcggcgccggcgctgccatcggcgtcgccgccagtgccggccagccgatcgccctcgactggacctccctgccgctcgcctgggccgccgccatcctggtcggcatcctcgccggcctctacccggcctcccgcgccgcccgtctcaccccgaccgaggccctgcgcggcgaataggggcgacggctggagtgaacgatcaccatgagtgcgcagcctcaatgtcacttttactgcacatgatgacatgtgcagtaaaagtgacatattggtgctgggcgggagagagcacgcgtggcgcgggcggggtgtggttcgcggctatcggctagtatggtgcggtcacgacagagggaggcatgctgtggccgatgtgatgcgggagctggaacggctgcgaccggtgtatgagacgggcgtcctgcggttgctgttgcgccagaacgcgatgctgtacgtgtcgctgctgcgttccacgttcgacccgctcaccggcgagctgccgcgcgagaccgtggaggagcggttcgcgcaaagtctgaacgctctggccgacgccggcgaatatgcgccgcgcgaggaccagaccttcgccgaggccgcccatcagatcctcgccgacctgacccgtgaaggcgaaggcgactacgcctggctcgccaactcgcatgatgcggccacacaccgattcctctaccgtttgacggcccgcgcccaccgcgccatcgaggcactgagcaggctcgaagacgaatcacgcgccctgtccggcgcgcaggccaacagcatcatcatggaaatcgaacacgcgcgcatgcagctgaccgccgaccccggcgagcgcatcaaactcctcaaccgtgaaatcaaggaacgcaagcacgagatcaaacgcatccaacaaggcaagcagcatgccacgttgagcgaagcccaggtggaggacgtgatcgccgtgatccacaacacgctgcgcggcgtacccatcgacctgcgcgaactcgtgctcgacgagcgggacaacggcgacgccttgcgccggcgcatgcagaccggcgacatcagcgtggacgagaacctgacccgctaccacgacgaataccgccgctcgttcagcgaatcggacagcggccgccgcttcgaggacgccttccaggtgatcatcaccgacgagggccgccagcaaatcgacgaagccctgcgcgccatcgccaaaaccccgtatctggccggcgaatccggcgtgctgctcggccagatccgcgacgaactggcccgcatctacgacggcatcgaagccgtgcgccgccagatgcgcgtctccgacgaggcgatcagccggctcgtgcgccagcaaaccgacactcgctaccgtacgatgctcacccgcttgaaccgactgtacgcgcgcctcaacgcggatgcgaaaacccatatgggagacgcctcgcgcccgtacgacacggccaccgcggacgcgctgttcgcgccattgccgatgcgcccggccaaatccatgacccgcgccgccgcacccggcctgagcgacctcgccgccgaagccccgcaggcgactccggtggccgatctgcgggatatggtcaacagcggcggcccccgattcctgcgcatggtcagcctcatccggcgcaacccggtgaccgttgacaggtccgatgacagggccaacgcaaccctcgtggacatcgccgccagcttcaaccggctgcccgaaagcgaacgccgcgaaagcgagatcgtcggcttcctgggcgggctgggagccgtaagcggcagcgccatcgccgacgagccgtccactgacggcgtcggcatcgacagcgacatcgccaccgagccggccccggcgcagcgcggcgataccgcgacttggcattgcgtatcgatcgacggcgagccccggcactggatcactagaccggtgctggccgacatggacgagctgaacatcattgtggaggaaggatgaccgtggccgaggaacacgaggagcatatggacaacgccaacccgtacgccctgttcgaaggcgacaccggcgacatgccggccgaggcacgcatggccgccatcgccctcaaacgcgaccgctatatcagcgggcccacctacgacaccgtgctcgacaaccgcgacgtcgtcgtacgctccctgaacaacgacctgctcgacttggtgatcaacgaacgctaccgcatcatgtacgccacgcccgtggccggcgacgacgtgaccctgcgctcgctcaaaacccgtgtcagcctcaaacgcgaggaggccgcgctgctcgccttcctgcgcatccgcgtcctcgaatacgagaacgtgcacgccgaccccgccgactggctcgtcagctttgaggagatccgcgccgcgctcgccaccggcgccggttacctggcagcccgcaatgacgaggaaggcgtggcaaagcagatcggcgccatcgtctccgcgatgatcacctacgggtatttggcgcgcctggacgacgaagccatgtaccagatcacgccgctcgtgcccgtggtgctcgaccgcgaactggccgacacctggctcgacgtcgcggaacacggcgacggcgacacggaagatgacgatgacgacgagaagggagccgaatgatgcaggcgacagacgtgcagatgatcgcggaccggtggatgctggaatcccgccgactcatcaactggggctcctatgagggctaccacgaattccgcccctccacggaccacaagctgccggtgaccctgctcgccggcgccagcgaatccggcaaatccacgctggtcgacgcgcagatctccctgctgtacccgaccggcacgccgttcaacaaggcctcgaactccggccgctccgaacgcagcgactacacctacctgcgcggcatggtcggcgtgggcagcaccgaaaccggcgacgagccgctctacctgcgcggtcgcgacgagaacggcgcgccgcaacccgtgtggggcgccatcgtggacacctatcgcaaccagaccaccggccaggtgctttcctgcgccaaattcctctacctgatgcccggcgacggccgcggcgacgtgcgccgccagtacgtggtctggggcaagcccgtggaccccaggcgcatggaccaataccgtgacgccccgttcacaccagcccagctcaaagccacctaccccgactgcctcacattccccagcgccgaagcgttccacacacacatctggagcgcaatgggcctgagcgaggccgcctgccgactgctgcacaagatccagtccgccgacgcgccctcccggctcgacgacatcttcaaacaaggcgtgctcggcgtgcccgaagccctggacctggcccgcaccacggtcgaggactacgaacgttacgacgagaacttccacgccatggacgagaagacccgccgcatggacacgctgcgcggcatccaacaggcctacggcgaatacgccgccgcacgcggcaaggcccgcgccttcgaaccggtcaagccggccgtcgacggcacggtgccggccgtgctgcgcgactgggcattggcccgcatgcgcggcgaagtcgccgtccaactgcccgccgaccgcgccgaacaacagaacagcgaggcggaagccaagctgctgcgccgccgaaccgaagacctgcgcacccgcctcgacatgatccgaggccagatgcagggtctggacggcggcaacctgacccgactcgaactcgaactcgaccaggcccgccgcaccctcgaagacatgcaagccaaccgaacacgaatcgaacaaacgttcgcatccatcggcgagacgctgcccggcaacgaacagtcctggaacgaacgccgcatcaacgccgtgaacttcaaacgcgaatacaacaaacgagacggcgaatgcgaggaagccctcaccgccgccatcaacgcacgggccggcgcacgcggcgacctcgaacgactgcaacgcgacttcgaccggcaacgctcccagcgcacccgcatctcccagcagatggacgaaacccgcgccatgctctgccgcgccaccggactcgcccccgccgaactgccgtacgtggccgaactcatggacgtgaacgaacacgaggaagactggcgtctcgccatgaacgtcgcctacgcgcccatcgcccagaccatcctcgtcgacaagcgccacgaacagggcttcgccgcaaaagtcagcaccatcgacccgcgcaccatgccccgacgcacctggcagttcgtggacaccgcacgccactacgacgacaccggcgcgcacgcgaacatactcaccggagaacaggacggcgactggctgtccggcaaactgcgctaccgcgacgactcgcccttcgccgactggctgcgctcgcagacccaggacgaacgattcgacgccctatgcgtcaccgccatcgacgacaccgaccgcaccaaccgtcaggtgcaggccgacggtcagatcaaatccggcgcacgcggccagcacggcaccaaagaccgcgcccaggtcatcggattcgtcaacgaaacctacctcaacgcgctcgcagcgcaggtcgacgccgcccgcaacgcgctcagccaagccgacaccgactacacggccgccaaaacacagtccgataacctccaccgcgaactcgaactagccaaccagctcgcctacacgtcatgggaacgcatcgacatcgccggcgcgcaacggaccatcacggacacgcaggacgccatcgcatccatcaaaaacgatcccaaactcgccgaactcgccaaacagcgcgacgaactgaacgccgaactcgaccgtgtggaacgccagcgcatcggatccgaccaggccgcggcccgcgccggcagcgccgtcgaagcggcgctcatctggctgcgcgaccatgccgacaccggcacgacggacgccgccggtgccaccgccgacaatgacgatgacgccgcttccggcccgctgccggacgaagtcacggcggcgctcgccgaatcctacgacaaccgattcgccggattggcggacgcggccatgcgcgcgcacatgatcatcggcgcgggcgcggcaggaacgcaggcgccgggggagagcttccccgaacgcaccatcgccggcatcggcaaggacatggcctcccgcatcaatctgctgaacggccaggccgacgccgcgcgcaccggcgtcgaatcgaaaatgagcacctacatcgcgctctacgcggccgacgatgattcgctgaccgcc

SEQ ID NO: 3682 - DNA, 45751 bp, Unknown
  R150_10m  MAG No. k141_825
cgcaccacgaatgtccgattcgccagggggataaggtgctctgccatgcaaggcatcgataatgcgatcttgacttcgatacatctggtgacgtttttatcgatcatgaagagtgatttttttgtcttctgccgcctgctttgaaggactgcctcctttctttagggaatttgcgtagcgaatcagactcctcgcgatgaggaagaccagaacgaatacggcgattacgcctaggatctcaatcaataatgcaatccatgtccagctcatgattcatcctttctctttctgtactcgtctatgagtattcgagccgtgtcgacgtcgtatctatcgtcaatggcgagactcttcaccaagaggatgaatggatcctccgtatcgttgtcgttcaaccgtattttttcgataagcctgtcaagccggatcctcatggtcgggtaggagacttgatacagctgggacatttgcttcagagatcctgacgatagctcgaagttcttgatgaaggccaaatcctcctccgtaaggctggccaaccattctggtagacgatccacatcaccccctttaataaaatttattatttattaaatatattaaagccgcgatgaagcattgtcaatatgacacacatgtccgattcaccagaatcggacgatacgtgggggcggacggtcagggagctatccacggggcgtgaaaaactggacagcatggccaatacatccagaatgacgtcgtatcagcggcgcgagcagctcatcgaaatcggtcgttcgctgttcgcgtcgaagggttttgaagcagtgagcggggaggagatcgccgccaccgcaaaagtatcgaaacccatcgtatatgagcatttcggcggcaaagagggcctgtacgccgtcattgtggaccgtgagatgcgcgcgttgaccagtgtgctcaccgccgcgcttgacgatccgaccgtgcacccacgccagatcgtggaacgcaccgcactcgcactgctcacctatatcgaagaggacgccgagggattccaggtgctggcgcgcgactcgcccagcaccgaaccgtccggctcgttcagctcactgctgggagacatcgccgtgcgcgtcgaagacatcctttccgaaacattcaaacggcagaaactctccaccaaaggcgtgccgtactatgcgcagatgctggtgggcatgaccgtgttcaccggacagtactgggccgaccggcccaaggtgagcaaggagcagctggccgcgtacatcgtggacctggcatggcatggcctgagccggctcgattccaagccgcagctgttgtttgaaggcgtcaaggcccggaaggaggccgagcgccgggccaagcgcgggatcgatgccgaaacaccggccccggacggcaaggcatcatcgcccttagagcagacggacctcgaccacacgctcagggaagattcagggttgcagaatgtgagttcaggggcacaggttgcgcaacactctgccgcgccggaagccgaagtgctacggtttgaacaggaaactgaacagaacgactaaatatgtgaggacgtaagactttcatggccaacacggcaaagacgctcacctttgtgatccccgcatacaatatggagtcctatctcgaccgttgcgtgaactcgctgctttcggcgaacgacaccagcgacctcgaggtgctgattgtggacgacggttcgaaagacggcacgctggagtacgcgcgcaaactggaacgcaccaatccaggtgtcgtgcgcgcgattcaccaggagaacaaaggccacggcggcgcggtgaacaccggtatcacggcggcgaccggcatgtatgtcaaggtggtggatgcggatgattgggtcgacccgcaggccatcgacacggttctggccacgttgcgcgcgcaacgtgaggccagcgagccgatcgacatgctggtgaccaactatgtgtatgacaaagtgaccaagcgccacaagatcgtggtgaacttccgtcatgtgatggaggccggccgcgtgctcggctgggatgacctgggcaagttcggtctggcgcagtacatcatcatgcatgcgctcactttccgcacgcaggtggtgcgcgattccgggctgaagctgccggagcatacgttctacgtcgatttctattactcgtaccagccgttcccgtgggtgaagcgcatccagtatctcgacgtgccgttctaccactacttcatcgggcgcgagggtcagagcgtgcagaccgacgtgatgattaagcgtgtggatcagctgcggctcgtcaatcggctgatgaccgaggccacgcccgaacgtggtacggtgccggaggggctgtaccggtacatgattcacttcctgacgatcgaatcatgcgttacctcggcgttcctgattctctcgcgcgatccggccaactacgttaagaaaaccgagctgtgggatgcgattgacgcctattctccggccatcggcaaggatgtgcgctcgaagctgatgtcccgcgcgctcaatctgcctggtaaaaccggccgctggatcgtgcgcaacggctatctcatcgccgaacacatcgtcggcttcaactgattcggattgcggctttgccctgctgacgcgttatcagcagggcatccctattacctccccagccgaggtcttgctactcggcccaacggtcggacattgcgaagctgttgtgcatcaggttgctggaggtgtatagcacgtcgttcagcagcttggttgtatgctcgcgcaggtagtcggccatctcgtcgttggccgcttcgagcacatccgccacgccctgcacatccttctcatcgccgtggccgccatcgagcggccatgcattcgtacccgtcgattcggcatcgcttcgagcaagcaactgctcatccgtgcgctcgatgagccggtgcccgaacgcgcgcacgccttccgcatagccctcgatgaaccggttcgtctcataccaatgcgcgtcggccacgacggcgatcaggcggttcgtccaatacaggttgccggtggagacttcgggcgtggtgtcgcgcaggtaggcaggcgtgtcgttgacgttcgcgtagaacggcgcggcggcggtgaacggaccggagccgaacgatacccacatcaccgtgcgattggccgccggcacatacgggcggacctgaatcgccaccatatggccggtgcggttcacgccgatcggacggtaacggtggcgcgattccgccgtgccggtcgtgccgtacgggtcgtacggcgtgccttcgaagtgcgaggacagcaggaaatcaacgtcttcgaggctcaccttgtcttccggcacgcggcaccacgggatgtcgtcggattcgggcgtgcagcgggcggccggcgaatcccagtcctcgctggggttgaggcggcgttgcatgtaccaggcacgcggcgtgttgtagatatggtccttcggcgtcgcggtgccgaaggccttgcgcgggttgaagcgggtgggaagggcaacggttgttccgaatccggcgctatgcacgtgacggccgttggaagagaccgacgttcccattgtgcggtcaaggtgatgcgtggccatgaactcgcgcaggtcggcgctgcataggtattcgcgctgctcgccgaacgcatcggcgaggtcgaagtcgtcgatgccgagctggttggggatcgtggcatagcagtcgtcgggcactcggcgggcgatccaatgatggccgccgatggtctcgacgtaccagatctcgtccgcatccgaaataatcacgccgttcgattcgtaggtgccgtaggtttcgagcagttcgcccaaccgcgcgacgccctcgcgcgcggtggtgacgtacggcagcaccagggtgatgatgtcttcctcaccgataccgccgggctgctcggcctgataatcggtgctgtccggcccgccgacagccggccgcaactcgaccatcgggtccgcaccgagcacgcgctcgttgacagcgatggtttcggtggcgctcatcgccacgttgtgttcgttggcaccggcttcggccagaatgccacgattattcagcacgttcggtgcgatggtgtaccggcaaggattgtccggtagttcgatttcgacatggctcagcacgctgcggtagtggcgcggctggtcgtcgggggcgacggcgacgaagcgcttgggatcgtaacggcccgagcccgaatcgtcatcgcgggcgatgatggtggaaccgtcgtaactggcatttttgccgacaagaatcgtggtgcatgacatggggcaccactctaggagccaggctggtcgaaacaaaaaatccttggaaccattgcgattccaaggatttgttgtgccccctgtgggattcgaacccacaacccacgacttaaaaggacgctgctctaaccgttgagctaaaggggcaactcttctaaaatacacaccgttttgggatatttcaactacggcgttgcgtacacgtttgcgtacgcgattggcccaacgcacggcacagcacacgcaatgtggcccaaatcgcagcccaaatcgcatatcgcctctagcgatagatagccgccggcggctacccttgtacattatgagtgaatcccccaattggagcaatcccctgcgcgattcgcgcgacctcagactgccccgtatcgccggcccgtgcagcctcgtcattttcggtgtcacgggcgatctggcacaaaagaaactgctgccggccgtctacgacctggcgaaccgtggcctactgccgccgagcttcggcctgaccggcttcgcccgccgagactggacacaggagcggttcatcgaattcgtcaaggccgccgtccgggcgcattgccgtacgccgttcaaggagtcgacttggcgcaatctggccgccggcatccgcttcgtgcagggtacgttcgacgatccggaggccttcgagcgtctgagcgccaccgtgcaggagcttgaccgcgaccgcggcacgcagggtaaccatgccttctacatgtcggtgccgccgcgcgccttcccgcaggttgccaagcagttggccgcctccggcctgtcgcgctcgtccgagggcgcatggcgccgcgtgatcatcgagaagccgttcggccatgatctggccagcgccaaggaactcgacagcgtggtatccgaagtgttcgacccgagctccgtgttccgcatcgaccactacctcggcaaggaaaccgtgcagaacctgctggccctgcgtttcgccaacgccatgtacgagccgatctggaacgccaactatgtggaccacgtgcagatcacgatggccgaggacatcggcatcggcggccgcgccggctattacgacggcatcggcgccgcacgcgacgtcatccagaaccacctgcttcagctcatggctctgaccgccatggaggagccggtgagcttcaccgccaaggacctgaccgccgaaaagaccaaggtgctttccgccgtgcgcctgcccaaggacctcgccgccaacaccgcgcgcggtcagtacgccaagggctggcagggctcgcacgaagtggtcggctacttggaagaaaaaggcatcgaccccaagagcaccactgaaacgtacgccgccatccgcctcgatatcgacacccgccgctgggctggcgtgccgttctacctgcgttgcggcaagcgcctcggcaagcgtgtaaccgaaatcgccgtggcgttcaagcgcgccccgcatctgccgttcgagcagaccgccgtgcgcgaactcggcaagaacgccatcgtgattcgcgtgcagcccgacgagggcgttaccatgcgcttcggagccaaggtgccgggcggctccaccatggaggtccgtgacgtgaacatggacttcagctacggccgctccttcaccgagaactcgccggaagcctatgagcgactgattctggacgtgctgctcggtgatccgccgttgttcccgaccaccgaagaggtgaacctcagctgggagatcctcgatccgattgaacaattctggtccacgcttggccagccgcaggcctaccgcgccggtacgtggggtccggcacaggccgacgaaatgctggcgcgcgacggccgccactggaggatgccatgatcatcgatatgccgaacacccgcacccgcgagattgcgcacaaaatcgaacagctgcacgaggagcgcggcgaatcggcgaccggccgcgtgctgacgctactcatcgccaccgaggacgcggacctagagcatgcgctggaaatcgcgaactcggccagccgtgagcacccgtgccgcgtgattgccgtagtaccggataccaatcctgccgatcagtccggcgaaggcgaaccgaacgagaccgaagtggccgccgaggtgagcgcgaatcgcgataatccggccgtcgatttgaccgacggcccgaacgatccgaacgattccaacctgaacgcccaagtgcgattcggcgcggacgccggtgccggtgagattatcatcttgcgtccgcgcggtggccttatcaaccacccggatacgctggttatcccgctgcttgtgccggatgcgcctgtagtggcgtggtggccgaccacaccgccgtcgaacccggccaaggatctgatgggtgcgatggcccgcagtcgcatcaccgacgcgctgcactccaataatccggaggccacgatcgagcgtttgcgccgcaattggacaccggaagacatcgacttgtcctggacacgactgaccgtctggcgcgcaatgctcgcctcgatgctcgatcagccgccgcacctgcccatcaccgccgtgaaggtgaccggcaaggccgacttcctgcctctggaaatgctgtgcgcatggctgcgtctgaaactcggcgtaccagtcgaaactgagttcgtgcccgacgcgcaggccgtgaccggcgtgtacctgacccgtgaggacggtgtgatctcactggaacgcccgtatgaggaccaagcgctgatctcgctgcccggccagactccgcaggaagtgtccgtgccgatgcgcaccatcgaggactgtctgaccgaggaactgcgccgcatcgatcccgatgagatctatgccgaggtcatcaacgaaggctgggatctgattcgtcactgaagtcggtagaaccgttgccacagcggcgttggcatgagttcggcaattgtggtcgagccatgccaacgccgttgctcatcgtttcctacctcatgcgatgacgaagctcatgaccgcggagtaataaagtgacatatgcgatgtcgcacaatgtacattgtgttgtcaactgacaacacatttcattgctgcaaatggctggattcccggcatgccacccgtattatgcgttgtcaactgacaacacaatccacattgcaaagtacgacacataccccatataaggaccatacatggcaactcgaaaactcattgtgtatccgaataaagatctgatgattcaggctggcgcgcaacgttttgtcttggcgctactcgatttgctcgccgaacgattgcctgatggcacgcatcgcacacgtgtggatgtggcgctgtctggcggttcggccgcacagccgttgggtttggcgctgaacgatccactggctgatgcggttgattggtcgcgcgtgcatttctggtggagcgacgaacgttttgtgccggcttacgacaccgatcgcaatgctctggaggcccgtcgcctgctgcttgaccagctggtggcggatggcaagctgcctgaatcgaatattcatgagatggcggccgatacccgttcagccgatgacatcgccgatgtgatggatcaggccgatagtgatgacgcttccgttcgcgccgccgccgatgccgcgaatgatgcgctgctggacgatgccgcgagcgactatgagcgcgagttggtgaatgaattggggccggaaccggtcatcgatctgatgattctcggcatgggaccggacggtcactatgcatcgctgttcccgggtcatgatgaggtcaaggttaccgataggctcaccgtgggtgtgaaccactcccccaagatgccgccgttgcgcgtctcgttgaccgcgccgctgattgcccgctcgcgccgtacatggttcttcgccgccggtgccggcaaagccgaatcgctggcccatgtcttcgagcggcccaacaacccggattacccgtcctcctacgccaacggagtggacgagttcacctggttctccaccgaagaaaccgtcaccgagttgtgatggcgcctcctgtgggccggaccctgaatgaggggcccggcccacagattgtcgcagacgctcaagcctgctgttcctcgggctggccttcctgcgcccagagggtgtggaacacgccgggcttgtcgacgcggccgtaggtgtgggcaccgaagaagtcacgctgggactgggtcagggcggtgggcagacgcttggagcgcagaccatcgtagtacgccagggagctggagaacaccggggtcgggataccggcctccacggcacgcacgattacacgacgccatgcatcctgcgattcgccgatgatcttctcgaagtacggatcaaacaacagggaagccggcaaattatcgcccttgaaggcctcggtgatgcggtcgagcaggaactgggcgcgaataatgcagccgccacgccaaatgcgggccacttcggacaggttgatatcccagccgtattccttagcaccgtcctgaatctcgttcaggccctgagcataggccacgaccttggaagcgaacagggccttgcgcacgtcctcgacgaacgcggccttgtcttctccggccagatcgatggtcttgttcgggccagccagaccttctttctgagcgtcttcacgcagctcaccgtgcgaagacagtgcacgagtgaacacggcttcaccgatagcagccacaggagaaccaaattccagaccagcctgcacggtccaagtaccagtacccttcatgccggcatgatccacgaccacgtccacgaacggcttgccggtctcggcatccttgtggtgcagaatctcagcggtgatctcgatcaggtaggagtcaaggtcacccttgttccattcagcgaacacgtcgccaatctcctcggtatccatgccgagtccacggcgcagaatgtcatacgcctcaccaatcacctgcatatcggcatactcgatgccgttgtgcaccatcttgacaaagtgaccggcaccatcggtgccgatgtgggtcacgcacggttcgccgttcaccttggcggcgatggactgaagaatcgggcccaaggtcttccaggattccgcagtgccaccaggcatcagagacgggccgttgagcgcgccttcctcaccaccggacacgccgcaacccacgaagtggaagcccttggcacgtacttccttctcacgcttgatggtgtccttgaagaaggagttgccaccgtcgacgatgatgtcgcccggttcgaacacctcttccagctgcgcgatagttgcgtcggtcggagcaccggccttgaccatgatgatggcggtacgcggacgcttcagggacgcggcgaattcctcgagcgtttcggccggcacgaagttgccttcggcgccatgctcgttcatgagcttctcggtacgcgagtagtgacggttgaacaacgccaccgtgttgccatggtgcgccagattacgcgccagattggagcccatcgtggccagtccaatcacaccaatgtttgctgtagcttcggccatgtgccttgcctttcgtttgattgtcccatcgtcatcacgcgcgtcacaaaacagcgcatcagcggagggaatcattccttcaacgctcgaaagtgtatcccacttaccacccacacgcgaaggctgtcttaggttctacgcaccttctgcccgcgaagcgtaattacttgccagccattcacatacgcccggccttggaagggtcgatatgcatggtctggaagcgattggccatgtaagcgtcgctgtagcgttcgctgaaccacatcgcgaccggtgaatcctgcggctggccggccatgcgcccataccagcaatccaaggccatcagcgtgaaggcaatgtcgatcaccatcagcaccgtgcataccgcagtcagcgaataccgtactttccatggaatgcgattaatcagagccagcagtcgcggcaacagccacttgacccacaccacaccaatcagtccccagaagaacatgaattggcccgaagtacgtccgtcgatggacagccaacggccggtgtaatcccacgcggtaataccgaacgccacttccatgaaccagctggtgcagtattcgaacgcgccgccgatcaccgccgaagcgcagaagatcaagaacggattcgccttccacaggcgattcaggcacacggttaccaataccgcaccacagccgtaaatcggcgagaacgggccccacagcaaacccgcgcggtcctgaagttcaccgttatacagcgccatatggtagatcgtctccataatcaggccacccaccgaagcgatggtaaacagccagaagatattgaagaagtccagtgcaatatagcccttgccggattggtcgcggcccagcatgccggccgccaccgccgattcataatcatcgcgatcgtccatgcgtttgagcgcgcgctgcaaacggcgttcctcgctcagggagggatcggcggtcaccgaaatcacgacgagaataatcatctgaatcagcggcagcagcaggttgaagccaaggccggtcagggccagcgacagcatgccgtcggccaacgtcaacggcatcagcacgtaggtccagcgcgcggcataccggcgatgattgcgcagcagcatcacgccgaacacaatcaggcatgcggcactgactaccagcaccaccgcatgaatcgcggacaggatgaaagtcaggctcatcgcatcgacgtgcacatgaccatccagaatctcgcgcacggcatagaggatggaaatcaccataatcggcaatgtggcgagtccgtccagcagcacgaccgcgccatagatgcgcgccagaatcggtaatcgcttggcgttcgggttcaagccggcgtcgtccagttcgacggccaccagatcagccacgactgcggactcggcgtcacggttctcccgcggcttgccaggggtagtggccgtgccatcgtccttgaattcaaccatggtttcctccccacatagcgtccccttacactatcacccgattgcagttttgccgaacttgatggatagccggtacatgtctgtctacattgccggacaccgagcccgctatcgctttcaggaaacatccaaaaaccatccagaaatcttgtcaataagttccagaacgcctttcgctccagccaaggcactgatggccagtccggcaccggcagcagctccggcacaggttctgatacttccggtaactccaactccgaccagtcatccagccagaacgagcagtcggccattgatggccaatccggcaccatcgaaagctgatacaacggtttacccatggggcggtagctctctcatgaggcggtaattaccccatggggcggttagcccaaaaccgcattccgcggaataaagccattttaagccaccgccccatgggaattttaccgccccatgggccacttaccacccaatgaaggttttaccgccccatggagggcagcctcacaccaacacacacagcacacccggccacacagcaccccagccacaaaaaattaggcacactgcccagcgacacacgataagccgctaggcagcggcgttattccgccaaaaccatcatcaatcaccccaataatctccggcagccgtattacgctactacaaccgtagcgctacgattaacgtatcgctacggaaaacgtagcaatcaagcaacaccaagctccggaggtatcagtgggcaatatcttcaaggtcctcaaacgcgacttcctgcgcctgttcaaggtgccggccgcatgggtgatcctgttcggcatggtgtttatcccgccactgtattcgtggtacaacatcgtcggcttctgggacccgtacggcaataccaaaggcatcaccgtcgccatcgccaacaatgacgacggcaccgacaacgcgctcatcggcaagcaaaacctcggcgatcaaatcgtcaagcagctgaaaagcaacgaccagctcggctggaccttcgtcaccgaagccgaggccatggaccaggtggaatccggcaaggcatacgcagccatcatcatccccaaagacttttccgacgatctcgccggcgtggtgaccggcggcaagagtcggcccactctggagtattacgtcaacgaaaaagccagcgccatcgcccccaaagtcaccgacgtaggcgcgtccactgtggaccgcacggtcaattccacattcgtctccaccgtatccgaagtacttaccgaagtcatcaatacggttggcggcaaagccatcagcaccgaagacaccaccaaagccaaggccctcacggcccttgccgaggcctccggcgacgtgcagcacacacgcagcaccatcgccaagctcaccaccaaactcaccgataccccggagcagacacgcaccgcacgtcaggcgctggacgacgcgcgcgcacttggcatcgacaccgcggaaggcctggccggtgtctccaccctgatcggcactactcaagccagtctgaacggcttcgtcacctccacgtccgaagcgcttgaccaaggctcaagcctgctgagccaagccgcagcacaggccaaccaaagcgtgggcacggtagccggaaccatcagcgccgccaatcagcaggtagacggactgatcaatacggcggaagacatcaaccaagcgaacgccgacatcatcgaccaactcaaagggctgccgaacgccgatcgagaaccgctgcaatccgccattgccacactggaaagccacaatagcgagcttgccggcgcactgggcaacctcgatagcctgaacaccactatcggcaacgcctccacagacaccgccggattggcgcagcatctcaataccgccacccaaaccacggtgcgcgaggccaataccgctcgcggcaccatcatctccggcgccattcctcagctcaacaccggcctcaacaccctcagctcgaccgccaacactctgtcgaccggcatcacgtcgcaaggctcactcatcgatcagtcgaagagcaccctcgatcaactcgacaaagccgcctccaccacggtgaccgccctgcacgacaccgataaggcgctggccggcgtgcaaaccaagctcgatacgctggccaccgacatcaaagccctgagcatctccagttcactcagttccctgatcggcaccgacggcaaactggatgccgccacaatcgccgacttcatgctctcccccactgttatcagcgaacgggccgtctacccggtcgcctcctatggttccggcatggcaccgctgttcaccaccctgtctttgtgggtgggcgcgttcgtgctcgtggtcattcccaaactcgaaaccgacgacgagggcatcgacgatctcacgccaacccaaggctatctcggccgtttcctgctgctggccacgctggccgccgtccaaggcctggtcacggccatcggcgatcttgtcatcggcattcaatgcgcgagcgccccggtgtttctgctcacctgcgtcatcacctcactggtgtatatgtcggtgattttcgccctctccaccacgttcatgcacgtgggcaaaggcgtgtgcgtggcgctggtcattctgcaggtgccgggcgcctccggcctgtacccgattgaaatgatgcccgcgttcttccgtgccatctatccgctgctgccgttcacctattcgattgacgcaatgcgtgaaaccatcggcggcttctacgacggcctctggttcgcctatatcggcaaattgctggttttcgcggttctggcctttgtgcttggcctcggcgcccggccgaaactggccaatctcaaccgcctgttcgcgcgggaaatcaaggaaagcgacatgattatcggcgagccggtgcacctgcctggcagcgaataccgtgtcactcaggccattgcggcactggccgaccgcgacgaataccgtcatgccatcgaacgtcgggccgccaaattcgcctaccagtatccccggctgctgctgggtgcgcttatcgccggattcatggtgccggccgcgctcattatcgtgtttgtgctgaccaccagcgagaaaatcgtggtcatgggcacatggctggcatgggtgctcatcatcatgggcttcctgatggtcgtggaattcatgcgcgattccatccgccgccaaaccgagctcggcaacctttccgacgagtcgatccgcgccatgctgtacgggcataaggccaagcgtcgcgacacctccgccgaacgccacgaagaagcggacccgagcgccgccgttaccgcaatcatccccactattccgccgaccaaggaaggcaggcacgcacgatgaacaccatgtggaaactgtttaccggcgacatcaaacgcctgaccagcaacgtggtctccatcatcatcgtgatcggcttggtgatgattcccggcctgttcacctggttcaacgtggccgcatgctgggacccgttctcgaatatgaagaacctgaaattcgcggtggcgaatgtggatgaggggtatcgttccgacctgatcccgatgaaagtcacggtcggtgatcaggtggtgaacgcgctgcgcgccaacagtcagctcgattggacgatcacgtccaaagccgatgccgtcgagggcgcacgatccggcaaatactacgcggccatcgtaattccgaagtcgttcagcaaagacatgatgaccttcttctccgacgatgtgcagcatgccgaactgacctattaccgcaacgagaagaagaacgcgctggcaccgaatctgctcaacgagggcacggacgaggtggcggcggaaatcaacaccacgttcgccaagaccatcacttcggcagggctggaaatcgcgtcttcgctggccgatcagctgtccaagcccgaagccaaagagcaactgaataccttcaacgccaatatcgccgatttcgccacacggcttgacgatacggcggatttgcttggcacatacagcgcattgaccgatacggccggcgccttgctcgatacctcgaactcgctgatcacgcaggtttcctctgccgccaaacaaggaggcaaggatctcgccagcgccaagcagggagtcaccgacgtggtcggagccctgggcaccaccgctgacgcgatgagcagctcactggacgcgagcgcctccagtttcggcgcggtgtccgattccatagacaagctgtattccgacgcgaatgatggtgccaccacggccgccgacgaattggaccgtcaagccacggccattggcaagcagacggagaaatacactgaaattcgcaacacgttggccggcatactgggcaacgactcatccatcatcacggcgattgaccgttcaatcgcacggcagaacaggctgcggcaagcgctgaatacagcggcgaccgatattcgccaaggtaatcaggacgcgcaggatcagcatgcgcaggtcaaggatctggccgatcaagcgcagaacagtatcgccaatatcaagtcggatttcacggccacggtgaaaccgcagatcgactccctgtcgtccaccgtctctgacgcctccggcatactgagttccggcgccacccagttgggctccacgctcggcgacctgaaaaggacttccgacgacgccagcgatatgctcagcgacgctcgcactaccttggacaaggtgtccggcaaactgcgttccgccggtgccgaactggcttcgttcaacagcacactgagcgacgcactaaacagtggcgatatgagcatggccaaagaggtgctgggcaatgatcccgaaacgctggccagtacgttggccgcgccggtgcagctcaggcgcaaggccgtattcccggtggcgaatttcggttcgtcgatggcgccgttctacacgctgctgccgttgtgggtgggcgcgctgctgatggtggtgacgctgaaaaccaccgtgtctcgccggacgcgcaaagccttgggcgatccgcggccgcatcggctcttccttgggcattacggggtgttcgcgctgattgcgctgctgcaatccacggtgtcgctcggcggcgatctgctgttcctgcgcgtgcaggccgtgcatccgctgctgtttatgttgtccggatggctggcctcgctggtgttctcgttcttcacctatacgatggtggtgagtttcggcaatgtgggtaaggcaatcggcgtgcttatgctcatcgtgcagatttcgggtgcgaacgccgcctacccggtgcagatgttgcccgacttcatcgccaaagtcagtccgttcttgccgctcacccatgcggtgacgatgatgcgtgcggccatcgccggcatctacgacatggattactggcgggccgccggaatgctgctggcgttcgtgccgccgctactgttgcttgggctgttgctcaggaagccactggtgcggttcaaccagtggtatgtggccaaagtcgagagcactaaagtgctgagctagtaggtattatccgggggttgcctacaaacggcatggacttaccaccctcagtctggctttgccagccagctcccgccagcgggagcgtacgggagcatatttcgaagagaagagatgacggagatgacaggtacgacggcgacaccgcgcggtgagcgcacgcgcgaggcgacggatcgcaagctcatgcgagccacgctgcagattgcggtggaccgcggcatcagcggcgtgaccatcgaggaggtggcccggcgctccggtgtggccaaaaccacgatttaccgccgatatcataatgccgacgagctgctgcgcgagatcagcgcgatgtatctggccatcccggattccgacccagtgcccagccccacgcgtgagcatttcacgcaactattgcagcgattggtcgattgggtgcgcgacaacgacatcgacgtcaagcgcgtgggcattgtattgtccagcgaggccgagttcttccagcacatcgtcgaccaggtggtgaccccgtggctggagcatgtgggggcgttcctcaagcagggagtcgcgcagggcgtgtttcgcgaggacgttgacgagaagttgctgttgtccacgattatcgggtctttggtggcgtatgaggccatcgagggcaaagcgatggacgacgacaccgcctgggcctcgcgcatggccgatctgctgtggccagcattgctgaagtagcggtcttactcctgaatcgaagcctcctggcgggcgacttcgagggctttgttgaaggcgtcggaggtccagctggcaccggcgaccttgtccactttgagtcccttcaggggcttgccgtccactacgccgttgatggctttggcgaagtcgtcctgatggttcttggaaatcgtggtgaacgggtgcccaatgattttgacggtctcgacgttgccgtccttgatggtcagatggacgtcgatggaatcctcgccgaccgggccgtactggccgttgatcgagtagttgccgtccttgtagttgccggtgtccttcttgtcggacgtggtggtggacgggtcgttgtgcgatgagccggaatcggagccgtcggagctatcggagccgttcgactgggattgcgactgctcttcctgcgacttctcggtctcgcccgagttgccggcgtacgcatcgtccatcggcgtggccttggattcgccgcacccggccagcagcgcgccagccacgaccagtccggccgccgccaatgtcgcggatttcttcaacgtattcttttcggtcatattcacgctccttaagccccctctgacgagggggctgtcagcgaagctgactgggggagagaccatcagcttgccatgtattcctcacatactgctcgatgcccctgacggccctactcctcgccgccggttttcgcggccttggtggggtcagcgaaaccaatggcggtctcgccgttctgcgcgccctcgacctgtgcacccgtggaggcgggcttgccgccggccgcctcgtaggccttgcgcgcatcctcgtcattccacttctcaccgacgagcacgccatggttgagcatgatctcgcgctgcgcgcagctggcgacaagcgcatcgtgggtgaccacgataatcgtggtgccctgctcgtgcagcttgcggaacaggtcgagcacgattttctcgttcttctcgtcgaggttgccggtgggctcatcggccagaatcagcttcgggtcgttgatcagcgcgcgggccacgcacacgcgctgctgctcgccgccggagagctggccgggcaggtggtgggcgcggtccttcaggccgaccttttccagcgcctccatggcctgcttctcatcgaccaccgaatggtagtactgggccaccatcacgttttccacggcggtcaggtgcggcaccagatagaacttctggaacaccagtccgatgaggttcttgcgcacgtcggccagctgcgtggcgttcaggtcctccagcttgcggccttccagcttcacggagcccttggagggcgtgtccatgcagccgatcatgttcatcagcgtggtcttgcctgagccggaggagccgacgatggcgagccattcgccttccggcacggtcaaattgaggtcgtccacggcatgcaggtcgccgtagatcttcgagatgtggtcgagttcaagtagcatgacgtttctctttctttattcttcgcgaagcacgacggcggggtcgatgcgggtggcgcggtggacgggcgggatggaggcgacgatggcgaccagcgcgctgaacagcacggagatcagcgccagccaccagttgaatccgatggagcgttcgaacaccgccacgcacagccaactggcgagtccgtagccgattgcggtgccgatgaggccgccaatcaggccgtagagcgatgattcgatgtagaactcggtgccgatggcacgcgagctggcaccgagggccttgcgcaggccgatctcgttgcgtcgctgcgagacgatcgagctgattgtggtgccgacgccgacgagcgtcagcaccagcaccaccagcgagacgatccagaacagcgtctgcagcatggtgatgatgcgggtgtcggaggcggtgatcttggtgacctgctgcgccttgacgtgcatggaggtcatgtcgttgatgctggacaccaggcccgcgagatcgctggcgccggccgaatactcgatgacgtccacgccgcgcgtgatgccggtgagcttgttgacgtcggcgttggtggcgtagatgatcgagtcttcgctgccgccggtgtccacgatgccggccacgcggaattcggtgccggaggtgtccatgatgtcgctggaaacgcggccgtctttggtttgctggtcgatcgaggagttcgacgaagtgccgttggtgctggcgttatcggatgcacggtagccgatggtgatggcggagccgattctcagaccgatggcgtcggcgatgtcacgtccgaccagcaccttgccgtcggtcggccacgagccgtcgaccacccagtgatggttgaggttcttgacctgcgccgcattcacgccggccatcacgtacggcgaggcgttgacgcgcacgttctcgtagcggtaagtggcgtatttcgcggaacccttggccttgaccatttcagtggtgtgctgcaccatcgccttgtcgatgccggccttgccgtcggcattggtcgattcggtgggcgtgacaatcaggttcgcgccgtacgcgcgcatctcctcgttcatctgctgcggcacggcgaggcagatcatcgccaggcagaacagtgtggccgcgccgaccagcgacgccaccacggccatcaccgcgcgcgaacgccggcggaacacggcgctgaacagcattctgaagaacataccggtgttggtcatcggtttcctccttccacacctacgtagataaactcagcggccatggagcacctccgcgggcttgagattcagaatcgaacgaatcgaggaggcggacgccagcagcacggtgacagccagcagcacgaacaccagcacgaacaccatcggccgcatcgtgatgccggaaccgaataccacccggcctatcagctgggccacgccggaaccaagcaacgcgcccacaatcgcgcccagcagcgagattgccgccgtttcggccagcatcaggcgggataccgcggcatcggtggcaccgagcgccttgagcagcgccagctcgccagaccgttcgccgatcgaggcgaccatcaggttggccacggccacggctgcggcgatcaggctcagcacggtcatcagaatcatcacggcctgcgtcttctgcagcacattgccctgcaacgcggcgacctgacgcacctgcttggccaccgcgcccggaatcacctcttcgatctggtaggcgatcgagctcgggtaggcggtgcagtaccaggtctcccattcctcttggctcagcgcggccgggttcgcggcggccttacgggccaggtcgttctccggcgtggtcagggccttgacctcgatcttgtcgaccgaatcgggcaggtcggcgagcacctgggccgtggaggaggcgatgtagagcgagccgttgtcctcgtcgccggaatcgtagacgccggtgagcttgattttctgctcgttcttcttgcccgaggcggtggtcttgttgagggtgatggtgtcgccggtggtcacaccgagttcggaggccagcgtcttgccgatcacgccctgatcggaatcgtccttgggccacttgccgtccagctgccaccacgagcgcatgccttccacgcccacgacggtggtctcgccggtggaaatcttgaggtccttgttgaaccacgtgccgacgaccggcacgttggtgccgttcaccatggcgtggatgttgagctgcggcgcgaagttggtgatgttgaacgaccagaagatcgtcttgatcttggccgcgtccgactccttcagaaaggcggtcgggtcgctggtggacgccgcaccgcccgactcggtgttgtacaggtcggaaacgaccgcgtccgccttgggctgcacggtgatgttcgaaccgtaggtggacagctcggcgttgagcttgtcgcccacgtcgaacacgacgcccagcatcgatacgaacacggtcgccgacaggcatacggtcagcgcgataagcaggcgccggcgcagctgtcgggtgaacgagcgagtaatcatacgcagaaagaacatgattcttgcctcctgcctgactcactggaagtgggcgctcagcgcgtccagatccgtagtctgaatggtgatcttgccgtggccggtcttgtacgggaatggtatcgggttgcagccacccttgaagccgatggtcgccaggttgatggccacctcgcacttcttgcagatgatcttgccgtccttctcgtagtagccggcgtcgccgcagttctcgcaggcgtccaggccgatgccgtacgcgccaccgttctttcggatgatgatgaagcgcatgacggtgccgtccttggccttgtattcgaagcggtgcaggtggccgtcctcgacctggctgaagggaatggtggccacgccgtccttgagcgagtaggcttccggcggcgaaagagtgatggtctgatgggtcgcggcgacgccgacggtgagggtcagcgtgacgccgatcatggccacgaggctccagacggcggaggccacggcgcggcggcggaacgccttgtgcttgcggccgatggcttcgttcgcgccggtcagcggcatgcggaagccggccaccacggaggcgatggccggaatcaggaacacgaacgcctgggccatgatcatccagtcgttgtggttgatcgaccaggcgagggccacgaatcccgtgtggcccatcgggaaaccgcgtgcctgcaggatctgcatgacaccggtcaggtgccggacgaacagaatcaccagcaccgcgagaacggcggcggtgaacgaggcacgcaccgcggtcgaacgcatcgtgcggaagatcgcggccacgatgatcgacatggccaggcccagcgcgaagccgagcgcgcgcagcaacatgtcggacgtgaagatcgggtcgccgggctccacccagatggtcagctgcaggatcacgtccggcagcgcgtagaacagggtgagcgcgatgtcgatggcggccacggcgttcgcaatgtgcatgaacaccttgtgctgctgccaattggtggtgatgcggcgtgcgaacaccaccacgacgatggtgaggatgtcggcaatgatcgcgcaccacagcaccggatagttgacgaacgtgcgctggttgatcacggccgaggcgcgcaggccggcgaatgtgatagcggcgatcaggccgacggtcaggccgatgagacgccaatgcgagcttatcggcttatctcgcccctcgccgaccgtgagcatcacgctcaggctcatcaccagcaatgcgggggccaaggtgcccggcatcactgccacgaattgttcaagcattcgcgtcctttctctgttcatcttaggctcccctccctgaggggagctgtccgcaaagcggactgaggggagtttttagaccgtcctaagaattatctccctaaagcggcgtaaagccccctctgacgagggggctgtctgcttagtcaatcaccactgacgcggggtgtagtcccagttgtcgaaggtgacctcgatgggctcggtccagaacttgtggttcttgacaccggtctccgggtcaacgtggagcatccagccgttcttctcaggggactcgatggagagcttgagttggtaggtgccggccttgtcgagcttgacgttggcgccgtagtgcgggccgtcggaggcgttcatctgcatgaaggtaccggaggtggcctggccgccctcgacttccttgccggtggacttgtcgatgatggtgtagttcacagtaaggtcagggacgaagtcgcccttgccgtagccgtagtcggtgccttcctgggaggcgtggatgtcggcttccaggtggaaggaagcgtcagcagccttcagacccatggaagcagggtacatgtcgatgggctggaagtagacggcgcccacggtcagcgggccagcggccttgtcctgctccttggcggtgccggaggggccgaccgggacctcttcgaagccggaggtctcagtcggggcgtcggccttcttggagtcgtctttcttggcggtgtcggaggagctggtcgaggacttggtatcggaagcgttgttggtggaaccgcaagcagccatcgaaacagccatggagccggcgagcagcacgccgagcagagcggcaagcttcttgttcttcatcatttctcttattccttctgttgtggtgaatggattattcacgacttatctgtttttagttgtggcggcgtgggctggaatcgcttccattgccatgtcgcaagttgtgttgcgcgagatggtcgcaccgggcgttgtgctacgcctgcgcgctctcctcgtcagccttcgcgtccgacttgctcgcaccggccgcaagccgggccttggccttacgctgtttggcaaagccgaccacggacagcgcgatgacggcgatggctgccagtacctgggcgatgatgcattcggcgtacgggtagaatccgagccagtcgttggtgggaacgcccggcaggtagttggcgggcagcaggtcgccctcgatgagcgcgtgcacgccgccgccggcgaagacaaccaccagcacggacatgaggatcgaggtgaccaggaagaacgggccaatcggaatctttacggaggtgaagcgaatcaccaggaagatgatcacgagcaccacggcggcggcgagtgcgccgaccaccatgccatgcgtatcctggctcatcgtgtagatggactggtagaagatcacggtttcggcgccctcacggaacacggcgaggaagctcagcatggcgagcgaaatcaccgtgcgggaagccaccttctcgccggattcgacctgcgaggagacagaggccaccgcggcttcggtcttttccctgatgtagcggttccacgcttccaccgagtacttgttgagcatccagttgctggtccacagcagcatgcacatggcgacgagcgcgcacacgccttccatgatctcctgcagcgggccggagccgccgaacgcgagcatgaagatgaccgccacgatgcctgcgccggccagaccggcgagcacgcccacgtagatccacttggtgaagcgcttgttgccggacttgacgaggtaggccaccacagcggcgaccacgagcagggcctcgagaccctcgcggatcagaatcaggaacgcctggccgaccgagctggtgatgaacttgaggaagccaccctcctcatcggccgcgccgccgtcgagcttggcggcatcggtggccagcatgttcttcaggtcgtcgatgtacttcttgacttcggaagcaggcttgccggtgttcatcgaggagcggcacagcttgaactggtattccacctgggagacgcggttgccgctgatggcgctcagcacggtcttctcgaagccgagcttctcgtagtgctggtagtaggcgtcgttcacgagcgtggcgcccttggcggcgtcgccaccctcataggccttgtaggcgttgtccaggatcggaagcatcgcatccgcgacttccttccaagtcttggccgtttcctcggtgcgcttcttcttggcgtcgagctccttgcgctccttggcgatctgcttctggaggtcttcggagtactgcttcgggttggcgaggctggtgttggcgtcgagctgctgggccgtggcgtcgaggtcggcggtcaggtcgttgaccttctgggtaagctgatcggcctggtctgacgtgaacacctggctttgcaggtcctggaaggcctgctgctgcgcggtctgcttgtctgcgccgatggtgtcgctcaccactttgttgaagttggacgtcacgtagacggtggtgtatgcagccccgaaatcggacttggcacccattgggttgccgtccttgtattccttaaggccttcctgcaactgcgcttcgacggccttggcaacgtcggcccaggtcgcgtaatcgacgctggtggtgtcgtcgctcttgacggtggcagcagtggcagtggttgccggcgtcacggcgaacgcggactgcggaatgatggcggaggggaggaaggtcgcggcgatcatcgcaaacagaaaaacgatgaccgcaaatgcacgagccgagaccgtggccgactgcagacgaccggtgctgcccgacttcgcgcgcacgcgagaaacggcaacgcgcgtatcacgttcccgcatcgtgttcatttcagcggactgcgcgcaggcgcgacgaaccatgctgaattcctctcacttcaagtactcgaatggtccaaaaacaactatgaactctatagaaaaaaattcttgaacaacagtcttgattttttgacgggtgcgaggtaatagaaggcgttttagtgcttttcaaccccgcaattatttcactatctgagataactatgctcagagaggatggctttcccggaatgtgaacggcaacaccacaaaaagcggcaacgtgaggaataccggaatcggataccaaaatagtgccacgggtgaggcatacagcgacagcaccgtgaatgccagcaagccgtaagcagccagtgcggggccgtagcgtcgtcgcgcaggccgcaccgccagcgcaagaccagcagccagcggaatccacgtgacgtacagggccatcgaagtcagcggattgcctttgcgaacaccgacatgaccatccgaacgcacccaccgatgaatcgcccgcaatatgtttttctgccattgcggcttgtcggaggtacccctcagcggcgcaaggtcatgttcgatggcggcaagccgttcggccgccacggtatcggcatcgccgtcggaagtatgcttccaagcaccttcagtcaggaaagacgcccattgcctgagatagctaggcgtgaacaggtagtcggaatcagtggggtacgcgaaattgacgcgcgggtcccaccatccgcgagtcaccccggcataggccgtggcatattcaaccggatgcgcgaggccgagctgcacccagacctgcagggccgcgagttgttgcgccgcggttggcctagggtgctcgcgcagagtgcggaaggtctcatcggtgcggtgcgggttgatgccggcggcggcccagtcgagatccatgatcgcgttcagccgctgccgctgaatcttgtctatcgcactgggatcatcgtgcgcgagccgggccacgggctgggtgaccaggccccacacctcacgtccgggcgatcgattcgcatgcgtggcggccgcgcttaatggcgtccacacgccctgcgccacaacgatggcaaccgcaagacacgcaaacgcacgacgccgcgcgcctttgggcgtgcagacaacgagcaaacagcagccggcgcatagcacgattatgagcgccgtccgcttggagacgatggtggcgaacaacaggatgacgaacgcgaatgccaccgggcggcgtgccagtaccgagccgcgcgtcagacaagcctccacgaacagcacggccaacggcagatagaacacggcgtgcaacgagtccttgcccatcgtggtgattgcgccgaccaccacatagttggtggcaagatagacgaggccgagaccgatgagccagcgcggcgagccgattttgcggatgtagcacagcagaagcgcgcacccggcggcgagtagaaccgcttgggtcacggtgtacagggcctgcccgatcagaggggagccgagtgcgctgccgatatgccagaacaggccgaacgtgagcgtatcaaacagcggatgctgggtgtagtagtggtgcagaccggacgattgcagatattgggcaagcgtatcgtcgcgcatcgagcccggccaggtgagtatgagccacggcagccaggcgatagcgagcgtgagcaggtaagggaggaatcgcgcgcgcagcgatgtggataacgtggtcgggcggcgggccgtgagccaactaaggatcgcggatatgctgcggtacgtctttgagtgtttcttcgattggcgcgaccggccgccatgtgctgcggttacgtcggccgctgtcccctcgttcatgactcaacagcctaggcgcgattgcgggcgcgcgccgggcgaacatcgaaaattcacccggatacggtgatttctttaccgggggttgtgtaggtgcgcgcgggtgtgtgggccctgcacaagcatgcggtccttgtgcgggtgttgcgcgggactttccagtgagtctttcactcgcagtgatcattcttcacatccgcgtcgcgacacgcgccacgccgaagcgtgcacttatccgaaacctgtggtaacttattcgagttgcctgcggaacacagttcaactgcgcgctgcaaagcatggaggattcgcctagtggtctatggcgcacgcttggaaagcgtgttggtgtaacagcctcacgagttcgaatctcgtatcctccgcccggattggagccccggaaaccgttgaaatcattcggtttccggggttttgctttggttccttccgattgtcggttccctccaggttccctccgtttcgacacctttggccccgacctgccgcgcgtgtcacatatcggaaccgacgattccgaaaacaccttcgagccttcgcccgccgtgtgttcgtcatcgaagtccgaccgcgccccatgtgtcccgtcagtgggccgattcgaatcccttcatgttctccgcgcaatttttttcgttttggttcgcaacaatcccggacgcccgccgcgcagcgcgatgcgccccctgcggtcgggcccagcgcgaaggttccccctgaccccctccgatgaacgccacacgaacgcatacgggtgccataacagcccattcgaaccgtcaatcgactccttgatacatagacaagaagccgaggaacgtccgtcggtcggatgggtccgaaggagaaaacggcaaaccccgccggcatccctcccccgggtattcgccagcgaacggcaccggctccaccatgaaccggccaaggagaagacatgagcccagaacccatccgccgcaaaggcaggaaaacactcgccaagatatacgattccctaaccgacccggaaaaggccccggacaggtcgcgcatcatcgggccgcccaccaagaaggaggcgcacgacatccggaacgaattgacggcggcggcgtgggccgccggcaaaacggtgtcgcgcatacggacggccaaggaatacatcagcatcgccgaatcattcttccgcaagctgcgggccatcaaaaacacggaggcacgaaccccgcagacgggtatcccgtccctgcgggaactgctgaaggacacccgcgtaaccaacctcgacgagtatgaaggaatgcttgagatcacaagcgcggatacggagaaatccacttaacaaattcaaccaatttctgccagaagccaacaaactccaaggccactggactcaaccaagacaaacgggctcatcaaagacaacatgccataagccaatctcattgcaaccaacaaagcctattcgtcttattctgaacgccttatttcaccgcagaatcacttgttttcgttgaaattccaacgatttcacgaccacacatctagttcaagcttcagccgttttcaacctttgcgctccttggaataacgtcatattctgaattccagcttcccaggggccggcaaaaacctggggaacatgcaccggtgcagccaacaaccacaacagaaccatctagggcgaagtgcgtccgaattcgacggaagcacttcgctcctcaggctctgttccgcacgagagcaaggaaacatatggctgcaattccaacgaagaatgactacccgcgcctcaccgccaggccagcgcaagtggcggagatgctgggctacaaggacgtgaaaagcgtttacggattgatcagaaccggaaagatacgcgctcgcaaggtaggcaacacgtttctggtgattctcaccagcgtgcgcgaattcgcaggtgaggagtgagcatggcaacctcatacgagcgagtgctcgaagccgcgagacgctattctcgagatcctaggctccaagagcttccgcgcgacacctccggaagacaacacgctcagtgcagctgccccgcccatgacggagacggcggcacttcgctgcacatcacctacgaccagtccaacggcaaaaccatgctgcactgcttcggagcggaacactgcgatgccgcttccattgccggtgcacttggattgaaaatcatcgacctgttcgatcaacaaagcggacctcaaggccatgccggttacagcggctacaacagttacagctgcgatagccggctcactgccgccgatttggcggccatacggcatgcgaatgtcacgaacgctccgcttctcagcagaaatgagacaacgacgattacacctacgcacacggaaaactctgcggaaatcagacaacagtacgcgatgcccaaaccgtacttggaaccattggtcctaggccaatcccctatgttcgccgccatctgcgcagctattgcagttcagccaaataccggcctgttgcacggcgcttgcccaaactgcggcacagccgactcgctcactgtgctgtattccccgctggaaagcgccacattgctccggtgcagcacttgccaagccgacgatgtactcaacgcactgaacgctcccgctacgccggctcgttccaatggctatgaagcaatgatctacgacagcgagcgcggcacaacatacgaatatgcggacggtctgattgtccgccgctcaccggccaagcgaatctcacaaagcggcaacaccgccgacaagcacccattgtggatggccaccgacgcgaaacgtgccatggcatccgggcaagccagtgtatctgacggagggagaaaaagatgccggcacattgcgagcactcggctatgccgcagtaaccgcagcgggaggcggcggcaacttcgccacgaagctggatctcgattcggctcgctcagcccttagtggagctgatgtggtcgccatcgtggataaggacgacaccggcactcgctggaaggagcaagtggcgcagacgctgacaccgttcgtgcgatcactgacttttatccaagcagctggcgaggctcacgatgcttccgacgctgcgatgagcggcgtggaattcgagattctgccaagagaaagtatccagcatgagtctgagctcgagtctgagctgatgtcccgcgcctattcgctgacccgtttagctgatgtggaaccggagcgaccgttgtggttgtggccgggccacattcccaaggggaagatcgtactgattgacggcgatccggcgactggcaaaagcactttggccttggatattgcagctcacgtcaccacgggagcagcatggccggatgggtccgctggatgcgagcctgcgaacgtgctgctgttgactgcggaagacggactggcggacaccgtgagcccacgcattcgcgccgcacaaggcgacgcatccaagatgttcgccctatcggaggtcttcaaggatggcaaggaggtagcgattacgctcaccgacgcactgccacagatagcacaggctgtgcgtgagcagcatatcggcctgattgtcgtggatgtgctgatatcgtttttgggccgcgacaccaacagctacaaggatcaggatattcgcgcacaggtgatggctccgctcaagcggctgtgtgaggaaaccggctgcacagttatcgcgctacgtcatctcaacaaagggcagggagcggcgatctaccgcggaggcggcagcatcggcatcatcggcgcagcacgagccgcttttctggtggcgaaggatccggagaatgaggaacggcgactgttcgcaccggtcaagttcaatctggggccaatgccacgagccatggcctaccggttggaggataatccgctgcttggctgcgcacatgtccactgctgggcgaaacggacgatacggcggaatcgcacaaccagagtgcttacggccccagcgaacgtgaggatagtgacgtgcgtacgttcatccaagactacttcgaccacaacaaggagctcacaccggatggcttgtattggggtgtgccgtcgtacagagtaatcaacgaagcgaaaggcgagttcagcaagcagtaagttctggacggcagacgacgcccaaagccactgctggcaagcaagaagtacggcaacatgtggtggtgactgtctccggattatgcggatcatccgaatcaggaaagctctgaagatttgagtgcggaagccacggacaccctcagcggtgaacaaactgaggcttcagaagcaactgtgccggatccggtcgctgccacaagagctgctgccatcttgccgccttcgtcaaaaccaagctattgcaacgttccgtacgaaccagacaagacggcgtttcccaccttgtccgacgatgccgatccgtgggcgatcccggagaaaacgcaagatttgcaaggccttacggcaaacgaaccgacatctgaactggcaagacggcaagatggcaccagcgagaacgccactcatcatcccgcaacaggcgaaaccgacggttccgtcacagacattgccggatggaaggcgagtctccctccctacgcaacagacctgcactaccaacagctcaacgccacgcaattgaatgagctcatcggcaagggaggcctgtgggccagcaaggccaaacaggagatgcggcaccgcaattacagatagccaactttctgagatgaaagatgcccagtgtatccatcgcagaagacgactcaaacatctggccgctattaaaaacaatagcggcctttctttttaagaatgaagaaccgatcagcacaatccaatggcaacaactcgatatactatcaagccatgcttaaggatgaagaacaccatgaacatgtaagcgcgttgccgtctatagcgaaaataacgcaagcaacgccgaatctaatggcaataagccccaacatgacgcatcagctgctagataccattcaaaaaaccccagaaatcagcaacaacctgcgacttatatccactcccctcgaaacaagcacttcagcaattcaaactttcctagagcagcaagagaaagccctcaaaacaatctctaacttatcttcaagcacaatcctgtcttccataaaacctattcaggacagccttcgtgacgcactagcaaaatttgattttgctcattacgacgaaaaatatctgaacgtatattccgggatttcgcaagtattaaaacaatatgaagagacacaatcaaacctgcaaaaatattatcgatccataacccctagttatttccatagctctaacgagtcacctcattactactctcctgagatgaccagtccttcagatttttttgactccaaaagtggacgcatcgagagtatagaagatttaaataatgcaatccttctactgcaaaagcatgtatcaaatataccgttatactggcgaggacagaataatgcctcttggggactacatagcaaattatttcgcctactaatgacgcaaaatggagttgtttcccctcaacagaaacccaaaaccaaacagccctatccgaccgaagaccagatgattcaagctgagaagcagattcttaatcttgctcgtcaagactggcgatatggaaacatgtctgctttagagatattcgcacgcattcagcactttggcggccccacacgcctactcgacgcatcctgcaacccatatatagctgcttggttcgccgtctatgacccaacgcacgagcacgaagatcatgacgcgcgcctattcgctttagctggatacgcatcaggcaataatgagcaaccagactactccgaagaactgctaagtcgcgaccctttctggttcaacctgcacgattacgagcaacgcgcagcagccaactggggaaccggatcacgccgtatcgtatggcgtccaccagaatacgaatcacgtatcgctgctcaaaatgcagtatttatcctcgatggaattccaattacaaatagtcgaatccttcaatattttcgcaagcctacgggcaaagaatattggaagaggccagatatactcgcagcttcctcaatttatgcaaagcccttctcgccaaatcacaacgcacgtccgaatcaacgcaatctagcaccaacgtattcattcgtcattgccaagaaagctaagaaagagatacgaagttacctagaaggcgcgtttggataccgcgagtccttcatctaccccgatttcgcaggcctagcaagtaaaacaaacaatatccagttcccaaatctaggtgatcttcaataggctccaggacacggctgcaagtcgaacaaatgttctacacctagagctatcatggactaatacgcatacaagacgaggtaaggtggggacatggacgataatcgcacgcacgcggctaccaacacagcacgcccgcaagccctcgaattctttgcaggaataggcctagcacgccttggactcgaagaagccggcttccaggtcgaatggtcgaacgacatcgacgccgccaagtgcgaaatgtatcgcaataacttcacggatacgccgggccacacccttgtcgagggggatatgagtgagctctccggcgacgatctgccccacgatgcctccatcgcttggggatcctccccttgcacggacctctcccttgcaggcactcgtacgggcctgaacggcaagcaatccggcgctttctggcaatacgtgcgactgctcgaagaacttgggaacacccggccgccgattgccgttctcgagaatgtgaacggattggccacttctcactctggggaagaccttgccgcagcagtgcatgccttcaatgaactgggctactccgtagacgtattgtccatcgacactcgtcgatttatccctcagtcccgaccgcgactctttttagtgggcctgcagaatccgccggccgccgaacagtttgattcttccctgcgccctgactggctgcagccggtctttgcggacacctctctccgcacgcatcgcgcaccactgcccgaaccgccgtcccccctgatgtctggcctcaatatgtacgtcgagagcatggctaacgacgacgaacgctggtggaacgctgagagaactgccaaattccttgattcgctgtcgccggttcaggcaactcgtgtagaaacgttgcgcaatggggcaaccgattcctaccggactgcttatcgccgcacccgcaacggcaaagccgtgtgggaagtccgcgcagacgacatctccggctgcctacgcaccgcacgaggcggctcctctcgccaagcgatcattcgcatgggcaatggcaaaaccgctgtccgttggatgacaccacgcgaatacgctgctcttatgggcgcagcccactacaacattacgggtctacgccccaatcaagtgatgttcggattcggcgacgccgtctccgtccccgtcgtggaatggcttggcaagcactacttcatgcctgcactgaacggcaccctaggcaaagacctatacgtggagcaaactctgctctcaaatcacactgcataagcgaggcaaacaatggatctgactcccatcaatgatttccggaagtcccatcaggtaaacaccaagggcgctttggctgctgccatccagctcaatcgcttcttttccgcagacacgcttcccattgacgccagcgactatcacacgaacaaggaaggtcaagtcaggggaatcagcaaagataactgccagaaaatccttgccgaatatggcatcacacgactcctcgcagcagagggcggacgaaccagccgtggcaccatggcattgatgcacgactacgccgagctcattaacgaattacgcccaacagcggagcaattcaacgagatcgagcaatactgggtcaaacgaattcaggcattcttcaccagcaaaccattcaaactggaatccgacaactctctttccgtcgatgcggctgtagaacatctgctgcaacaggcagcgcagcgacaaaaggaaaaatccgggcactatgtacgtcggtaccgttctgcaacatcttgtcgcagcgaagctcaccatcgttgccccagaagtggaaatcaacggcgcgtccgttgctgacgacccgaccgggcgcggaggcgatttcaacgtcggcgacacagccatacactgcaccactgccccagcatccctgctcatggataaatgccagcgcaacatcaaggctggactgcatccaatcatcatcactgtgcgcgaccgcgtcaaaaccgcatgggacttagcctccgacatgggcttcgaaaaccgccttgaagtctgggacttgcaatcgtttctttccagcaatgtgcacgagcatggccacttcaccaacgcagcacgtcacgaaaccctttcgcgtctggtcaaggcttacaaccaaatcattgacgaacatgaaagcgaccccagcctacacatcgaatacaacggctgatttgttttaatccgcccagcatcccgtaaccaggtcaatgtgaagtggcctgttttttgttccgcccttacagtgaggcggcttgtgccgcttgatgttgataatactcggtttccgccgcttcgggtgtcctgtagcccagggactggtgcaggcgcttcgagttccaccacgagacccaccggaacgtcgccaattccaggtccttcagatccgcgaagggtttgcgccgccataccagctcggtcttgtacgcgccgtcggcgctttcggccatggcgttgtcgtacgagtcgccgacggtgccggtcgacggcagcatcccatattccataaccctggtggtgtacaccgtgccggtgtactgcgtgccatggtcggaattaaaccgacatcggtttaactccgacatgggctggcagtaccggcaccggtggtggcgcgaccggctcgcgggactgaacatccgccagtccatgagcaggaagggcaactgcatcgacaacgccgcgaccgagcaggtgttcggccacctcaaggacgagttctacgccggacgcgagttcgcctcatacgaacagttcaagaacgaactggacgcgtacatcatccactggaacaccaaacgccgccagatacgactggagggacacaccccggaggaattccggaacatgtccctcacagcctaatcaggtacccttaataaaccacgtccaacaatcggggcgcagttcaaatattctcactcggggctctctttattcgtgtttgcctgcaatcaccactcgatgccatactcggcatacatataaacatcgtattggtagtcgttgctgtagctcatatcgttgtgatgcgattcatgatggttgttgtcagactgcataatcgtcccttttcctagcctcatcggtattacagtcagatataacgtcagcatgtaaccggggcatgctcacccaacgaaccgagggtgaattcatggcgaactgttgcgtcctatgcttgcggccagtgaggctgaactgcagcgactcaagcgcgacgatccggaactcgtcagcgagtaccaatccaccaaaggattcactgcgaattacgaatcattcgatgaccgcacatatttgcgattcatcgcctagcagcgacatcgcgtgcgtattccgatgtctgccgggtgactggagaacactgatacatacgaaagcggccggcgctaggcattgctgcccggcgccggccgagaggataaggattattccttatttattactgcttaggctataacctcgctttcacagttgctcgcgattgcgacggtaggcgatagcggcgccagcacctgccagcagcagtccagccagagcgatcgtggcgacattggagcccgtgttggaaacaacgttgccatcacccttggcagcgggacgcttcaccagagcggcaattgccttctccagggcttcacgagccgcgtcgacctgcttctgcgttgcatcgttgtctgcggagacctcacgggccttcttcagtgctgcacgcagtgcattggcggaatcatcggtgtagagacctaggttgatcgcggcggccttgttgatggtcgcgttcaaagcagccttgtcaaccacacctggttccggcttcggcttggttgcagcctccagcttggagatggcgtcctgaagcgtcttcagcgcgtcatccacctgctgctgggtggcgttctcattgccgagcacctgcttggcatccttcagcgccttggcgaagacatcccacgatccagccgtgtaatcggccttctcgagcttgtctgccttgttcactgcggcctgcagatcggtcttgttcacctcaaccgggccagggccaggctcctcaccggcctgctcaagaccagcgatggcggattcgaggttcgccagagccagagccacatcgtaagcggaagccttttcgtcatccgccacggtctgcgcggcttcacgcgccttgaccagtgcagcccagctttcagccgtgtaatcggattccttcagaccattcgcctgagcgatggtgtcgtcgagatcggtcttgtcgggggcgacagtctcttcctcaacttcgcggttcgtggtcaggcgcagttcggcagcggaggcgaacttgttggcctgggaatcgctctggcctgcggaagacaggacggtcaggcgcacggcggtcacgttctcgacggcgtcgaagctggccttctgccacatggtggaggtggagaattcagcatcggtgacgacatccttggtggtgccgtccgccagggtgagcgtgatctggtagcccttgatcttgccgttggcgttcatgccaccggaacgaggcaggtagcgcagaccgttgatggtggtcggttcgttgaggttgaactgataccatgcggtgccgtcgccgactgcattggcgctccagctggtgtgccagtgcgtgctgccgttgccgtcctgagccagatcggccggcccttcgctcggcaggcctgcggaaggctcctcgctaccgacttccacggtgtagccgcccagctggtcggagccgtcggccgccacatcgtaggcatcgctgccttcgttgccgggtgcggacttcatgtactcgtcgagagcaacgagaatgtcgtacgccttggtgtaatcctcagcggtcgcgccatccttgtcgatcagtacgcgagccttgaccaggttcgcctggtaggtgttccatgcgtcttcgctgaattcggagcgcttggaatcatactcaccgcggatttccttgatcttggcctgagcctcggccttggtgcggttctgggagtcgacgcgctcgatcttcagattatcgagcacgaagtccttgtagccaccgaagtcctgtgcactgccggtagatccctgcaggtcaggtgcggttgcggtcgagtagataccgaaccaggaatcgccgttgacgccaccggtcagctcgaattcggccgtaccggtctcgcccagagccttcttcaggttggtcagcttcacactgccggcagaatattcgccctggcccacagcgatggcataggtgtcgtcggagccggactggtagtcgaagctcaccttgtacttggcgcccggctcgaacttcacgttctgcgggatggtctggtagaccagagtgcccttctgagtcaggccgttgaccttcaccgaccaagtgccgtcaagcacatcgtccatcttcttgacatcccaaccggcctgcgtgtacggggcatgcagttcggagaggtggatgcggttgtcttccacgccttcggagccggaaaccacgaacggccagatgccctgggcgttgttttcgaatccgttggtgagggacttgagctcgccgttctcgtcaagagtgatgccggagtacttgttttcgacaatgcgcacatcgtcgaagtaggtgtgggcttcgtcggtgctcttgtgagacagggttaccgtggcatcgccgttctcaggcgcggtgaagaacacgtacatgttctggaagtagctggagccattttccgtattgctgttcgtgttgtggccgtatgccttgatgtagttcttggcgatggacttgccggtggagttggtggccagtaccttgccgccgctggtcacggtgacggatgcatcgccggcggagcggttgtcgacgccaacatacagcgcgtacttctggccagccttgagatcggtcagacgctgggagacatcgaccttgccggtcaggcgcagcatggcgttgttgtcgccttcaacttcggccttgccggttccggcgacggtccagttgtcggtgagggtgttggagccgccgttgaagccggcgtctaccacatgcatgccttcgctccagttgacctggatctgcttggcttcgcccttgtacaccacgtacggggtttcggcatcagcggtaagcgtcaccttgccgccggagacggcaacggtctgctcgttggtcttgccctgattggtgagctggtacacctttacgctggagaggttcttccagctgtccggcagcgtccagatggtggtgccgcccttggtgttccagtggtagagcttctgctcggaatccttgaccagcttgccggtggaggaatcccacatccacggcagcaggtaggactcgtcgccagtggcgctgccatcgcctgcggagaccacaccggatgcgaccgtcacgccgttgagggtgatggtgcgctggcggtaggccgcgctggaggagtcgttggagccacgggaaagcaccacaacgttgccgttgccatctttcagggtaatctgctcgttgccgttgttcgtgttcgggtcgatcacggcgttgccgttaccattggcttcggtcagcagcgggttgttgacccagcgggtcaccttgaagtgctggatgaacttggtggacacatcatgggtgaacaggttctcgatgtaggcggcatagtcgttgcggccctgccagccctcgaagtccttcatgttgtagccaccgagcagcggagcgttggcagcgccgccgtaggccgggtagtcgccaacccagctgtccttctggtgattgcgcaggaagcgcatcacttcggagttctcgcccttcagagtggagccgccgtaggtcaaatcggccgcccagtgctggaaggtggagtcatattcgttgccggaaccccattcggtggtcatgcgccagccgttgtcgttgatcatcttgctcatcttgcgggtttcccaggaatcttccgaaccggaagaagtcaggttgccccacacatcgaggtagatgaagtccatgttgtcgccgacttccttgctgaggtcagcgaaacggcttacacgggagccggatgccagatcgtagatgccgtcgatgccgacgccctgatcaagccagttccagccatagctcagaccgcctgcggagttgcgacgaaccatgtcctcgctgaaggccttggcttccggatacatttcggaggcgttgacatgcacaccgaagcgagcgccatactcggagccctcttccatcagcgtgttcatgtcgtcggcaccgccgagacgctggccgatgtcgccgtaatccgggtgaccggagtcgtggccttcattgccgtagcccttgagcagcacggactggccgaggccatcggtgttcaaggccaccttcttgacgttgtcaagcgtggtgaggaacgggttctgggcctgggagccgaagttcatggcgatacgccatgccaccagttcgggcacttcctcggacttgtacgggttgttcatgatgtcgcggtatgcgatcgcgccatcctgccagttcacggcaccgtcttcgttctcgtcgccggcaatggccacggccatctgcggcatggcggtttcggctactgtgtacttcttgcccttggaatcggtgaccgtgcggtggtagtaccacggagcgctggccagaccgagggaggtggcgtcaccagtctgctgagtggtggcgtacacgcgcgtgttctggctgccgccgcgaacaccggcgtatgccgcacgaccatcatgctcggagttgctccaaagacctgcactcaggccagcaccggaaatgaaaccgtacgtgtagtcgcggtcggtgtagttggtgtcttcggtcactgcgaagttctcgtcaccaggctgctgcgtgttggaagacatcgtagtgccggtgaactgggcgccatcctggctggagcgcacggagatgaggctctggttcgggaaggacagggtctggattgcattcttctccacaccgttgccctcgggaatgccgtcagacaggttgttcttgatgtcggtgacgttgaagtgcagctggttggccttgaccgtgatctgaacagtgatcaccgcgtcaatcttcttggcctcatccttgaccttcagcgtgtaggtggcctcggtgtcggaaaccttcttgaaggtcacgtcgtcatcgcccagttcgatgttggtgccgttgatttcaacggtgcgcacatccttggactggccgtacatcaccttgccgtcggtcatcgtgtactgcagcacagaggggaagttcttcttaatctgaacttccatcttcttggtcttcagcgtttcggaggcgacctgaacggttttgttcagggtgatgggatcgatggcaaggtccgcgccggagaccgtcacctgctgggagacgtcctcatagccttccttggcaatcgaaagcgtgtgttcgccttcttcaatgtcggcgaaggagaaggtgccatctgcaccggtcttcaccttggtcttatccaaacgcactgttgcgccttcaatggcagcgccttcagcgtccacaaccttgccggaaaccgcgtgcttggcggcttcgacaacctccgggaagtccttgatgtacacgtcggtgacctggttcagcgacttccaggagccagccttgatggcaagcttgttggagaggttcgtcattgcggagtaatcaacatcgaatgccttctggccatccacggtcagtgtggcgaccttggcgtcggtccaggaaacctggatgtcatgctcatcgttggcgcttggagcggcgatgcgattgccgccgtaccaaccgccgttgccaccaccggtataggtctgccagaaccagccgcctgaatcataaccgatgaacaggccgctgcccggatcgttgtagcctaggtagaagccgaaacggtttgccttgccttcctgaggggacttgatggtggcgtggaaggatccggccttggagaagtcgtaatccttaccccaaacggctactgcaggccaatcattgctggagctggggttggacgccgcattgccgtgggcttcagtggatttgaagtgcagccaaccgtctacggtctccagaatctcgccgcccttggcgatgttggaatcaatcgtccaaccttcagtcgcatcagcttgtgcggcaggagtttcggaagcggttgcggaatccgaagtgttgttgatttgctgaatctggcttgccagagtctgcaattcagcatcagacagaggcaccgcgaacgcagtcccccccaccgctgcccatgcaggttagcgccaacgctgttgccagagcagcggatatagttttcttctttttcattaactatattttccttaatctcttcctcgagttggaacaaatgccctcttcattgaaaaacgcggcatttgtaattacgtgaagatactttacaagaagcttctcttaagtgcaatctcagataacacgcagaatcgccgtatatttgacgccgaacaacgaagttagtaaaaccgtaaaacccaataagcggctgtgttgttaacgtacacatcggtgttcgcatcatcgcgacacgcgcctgcataaaaatcaacccaaaaactatgcgcatgtcggacgctgcgcatcacgcgctgcatgcagcaatacagcaatacagcaatacagcaatacagaagaaaagcgctgccttacggattccgcaagacagcgcttcaataatcagcagaccttatttcctattccataggcctcattccacggctaccgtgtcagcagctcacttcttggaggcgttgacggcgtccactgccttctgcaaggaagtggtgtgggccttgtaccagtcggtctgctcgttgagcttatcggtggcggacttgaagccggcggtatcatcggccacgcagccttcgtagactggcagttccacgctcagctccttgttgagggcatccagggtggaggaatccttcacatctttctcggtaagggcggcggcatcagcggcatcgccattgaccaagccgttgtagtcgttggtggcgttgcgcacattttcggaagcggtggcgcaagcggcgactgcattgttgtactgagcatcggagtaggcgcggaagccgaaaacaccggccacaacgataatggccacgaccaccacggcgataatggcgagggccgccttagacatgtgcttcttctgagcgccttcattgcttgcattgttggcgttgtttgccggcacagtctgctgctcagcggacatacttcgatctccttcgttctcatactttcatacacacgtatgcgctcttagcgctctcatgtgctctcatgtgcagaagtcgggttataggccaaaatgtgtgtccggcggtctagtcgttcgactgccattcgacccgtgtgtggaactcgttccagtcgatgccggtgccgtatcttgcggggatgccgaacgtcccgtactggccttgcgggctcctttcccatgcctgccggtagaggcgctcgagtcgttcgtcggtcatcgcgttggccgcgagccacgcgtcggtctcgggacgttccgtgtgctggtggcaccaccagcagatcgccttcagccgtctgaccagccgcagtccgcggtggcggcgcggcatgtcgcgcaggcgcgcgttccatgattcgacgaggttgttggtggacggcaccgggccgacggacgcgagcccctcgtcgaggaacgtgaacaggtggccctcgcggatgcgtctgcggatcatgcgccgtgccttgacgagcctttggtgcatgtcgttcacgccgccgtcggcgtattcgctcttctcgtcgaggaacgaggcgaagtcctgctcccactggttgtaggagaccagccattcggccgcgccgcccgcgtccccgacgcggggcagggacagggccacccggcgcagccgtccgcccgcctcgagtctgggccgcctgccggtcagctcgaggatgttggcctgcacgtggaacaggcaccgctggatcctcgtatccggccacgtggccttcgcggccttgaggacgccgcccccgccgtcgcacacgagcacgtcgggcggcgcgatgcgcgccatcaggcactgccatgccgccgctttctcgcttttggcgacgtgccagccgatcacgtgcccgccggccaccgcgatcaggaccaccgcgtcgcggtgcaggtggatgccgtccacatgcaccacatgatgcacctcgtccaccaggggcacgggcggccacaggccccacatgagctcgcaccggcggcgcagcgtgcgtgccggcagccggtgctcggcctgcgactgcttcgagaacagccaatccagaccgcaccgcagatcacgggcgctgttgtcgcgcgactgggtgcgtgagctcccgcagccggcgttccggcaccgccacctgatccgtcccgagctcgtccttccgttccgcttcatcggctcgccgcacacggcgcaacaaggtgtgttcatccacccaatctgccacgccaactcgaaagtcactcaaccgttgtgccgcaaggcctgaccggccattccggacacacattctggccgacctcgagttccccgcccatacaactcgaacaggaggaacgcccaccgccacaaaggaacacaagccaaaacggacacacattttggcctataaccc

SEQ ID NO: 3683 - DNA, 28553 bp, Unknown
  R150_10m  MAG No. k141_1036
cccccgtcaactccaacagcaccacccctgccaacaccactgccatggtcatcaccctgatgatcggctcgtttgtggccattctcaaccaaacgctgatgatctccgcaccgcccacgttgatgcatgaattcgatgtgcccggcagcaccgtgcaatggctgaccaccggattcatgctcaccaacggcatcatgatcccgatcaccgcgttcctcatcgaaaccttcaccacccgccagccgttcctgtacgcgatgggcatatttgcagaatgatcttggcgttaatgcactggtgtccggtctggtgatgatgccgagcggcatcgccatgggcatcctgaacccggtggcaggcaagctgcacgaccgtatcggtggccggccgctcgccttgctgggcttcgcgatcatgacgtctgcggctgtgctgctggtcaccatcatgaacacgcacaccgcagcggccatgcgcaccggagtgccggaagcggcggcatcggccattggcgcgcgggcttcgttccgcacggtcgccattgtgtgcgcggtctgtttggttgcgtcactcttcattcgtgatcacggccgccgacttggacagcagcgttaggcgaatccttcaccgattgctggccttcttgatcagcgcgtccaaagtaccggcttggcgcgcggcttccacatcttcccagtcgagaccggtgtctttggccctcccgtagaaaaaccgcaccagaccggcaaagtccggtttatatccggtttcccggaatgaacgggccagcgaatcaccgatttgcgggtcatcaggccttcgtgcctcatagatcgggatggaacaggatcgccacacgcctctcacatgtgcgatgcgattgacgatcatgccgccgtgcgcaccatcgtattgcgaggcggcatgtacgtccgccacctcgtagacaccaccatgaatgatgtcctcaactgtcagacgacctttgaccgcgctggcatcgcgaatccagaacatcgaagcgaaattggtgtcatcaagttcgcgaaaatcacgtatctcgcgtgtgccgatacgttcgtccttgtcatacatgaattcggccaaggctaggaatggcgagatacctgcgcccggaccgtactgcaattcgatacgtaaatcttcggattcattgccggtcagtccaataccgctgacggcgcagtcataggcaaaccaatcccagaaccaccattcgatcctttgcagcacctgcttcggatactttttgcatgggttcagattcacttcgcgataatatatgcgtctcgcttcggcatagacggcgagattgcagcgtttgaacatctcggctacgtctttggtgtccagcattgctggcaaaccggcattttcggcagtagtagtggttgcggtgctcatggtgtttccccttcatgtgatgtggacggcgggctacgttgcccgccgtgaggcacactgtatgacgttcgtgcggcggcccgcaagcccgcatggcgagatggtggataagtggaaaacccaatgattccaaggggtatggaatgtgcataacagtggtaccgtcggtggataaccgcactttcttgcaggttatccactgatcgtgcagctgttatccaccgtctctgggttatccacatcgtctctggcgtgtcgtccactgtcagcagtcgatttctgcttcgtttggcgtgtataagtgcacggtgaagtgtataactccgcgcattaggcatatttgctactgagaaaggtcccgaaatcgccttcgaacgcatagctacactcagcagatgtattcagcatggcaatagacccacttaggcaccggcgaatgattttccctcgcttatagagtcggcaaaggcccaacacctgccccaacgccgacgctactgcactggcagcgtcggcagaggaccacaacttggcacagcaacgacgctaaaaccgcccagcatcgttacacgtccaagttttggccgctaacgacgcttaatgaacgcttagcgtcggcagcaggtcacgcactggttctccaccgacggtaacgctccttagcgaagccagcccgccactctttggcacatcaccgacgctgagagaacctccagcgaagccaaccagccaaccgctggcaacatgacaccacccacacccctcagcgaagccaaccggccagcgcatggcaccccaacaccgctgagaacacccaccccaccagtgcacataaaaaaaaaactggtcatagcggttgcgatgtaattgcatcgtaatcgcgatgaccagcctcgggggggctgcaacgagcaccgaatgaatcagatgatgatgccgttgcagtgatcgacttcgtgttggatgatctgcgcggtccagccggtgaaggtggcgtggcgggcgcggaaccgacggtcctcgtagttgacctcgatacggaggcagcgcagtgtgcggcgttcaccggtcagcgacaaacagccttcctgggtgtcgaaggcaccatccgaagcggtgatcacggggttgagcatcaccgtgatacggccaccgagatcttcgtccacgaagacgatgatgcgcttgctcacgccgatcatgttggcggccatgcccacgcaccgtgaacggttggcctccaacgtatccacgaggtcctgaatagttgcctcgtcgccgggcccagccgcttcagacggcgtgcgcaaaaacgaccgcgaagtcataatagggcgttgcatgttggaatcacgcttcttcgtgccagtggatgttggtgataagcggcagggagatgccggtaccgagcgacatgaccagtcgggcggcgagcagcatcgggaagttgaccgcgagcgcgcccagtaatgtgccggcggtgaaaatcacgatggccatgatgaacagtgttttggtggcgaatttgcgcaccatgaacggcgagctcggaatcgacaccgacagcaagagcagataaccggtgacaagccaccgcaccaccgaggcgccgatggagaactcctccatcggcgtggagtaggcgatgttcagtgacgtttccgataggatgccgaggaaggtcaggatcgcgagcgagacgaccgcgatgacgagtttgttggagaccggttgcttgccgccgttaggcagctgtgttgcggaatgagtcacgatcttgttctctcctccattcattcagatattctgactacgacgttggaagtcttcctgcatgagtcgcagagcctcggtcaaggtgcgtaccgtggtttcgcactggtccgaggtcaatccgcccagcagttggctcaaatgcgcgtgatattcctccacatagatgcggcggatatccaagccgcgttcggtgagcgtgagcgtcaccgcacgccgatcggcggcatcggcgtgtttgacgacgagtccgaggtcggccatttcgccgacgagcttggtgatgctcggcgtagtgacgccgaggaatgcgctgacgtcgcccacgcgcgcggtgccggtatcttgcccattcggttcgttgatatgccagacggcgtcgatcacgtggacatagcgcagtttcatacctttcggcaatgccggcatcagttcggtgatggtcttggccttccagcagacatccaggaggctccgcacctcattcaccggaagcaagccggtcttggtatcggttcgggaatcgcacatcgctggcccaacctccaattagttaccaatagtcattaccataagtaactatatgcaggctctagacaaacccaacgacctgcgcgcccgtgtcgagttccgtttcggcataaaaaagccagggggatccctggcttgcaatgcacatatcgctgcaggtttgccgggacctatatgttcccggcaacaacagccgtatatacgttaccgatcagcgctgccctcatcatccttggcacccgccgtggcggcctcagtctccttggcgttccacccggtgacggcattccaaccactccatccgatgaccactagcaagcacagcgagaagacaatagtggcccaattgaacagcgagccatcgttattggcctcgaccagtgactgccagagccagataacgcaggccaagcaggtcaatgcatacatacgggaggcggagcgcgcggtgagtttcatggcggaaaaagtcctttgattacaagaatgacggcagataacagtgtgagatccgcaccagcggcaccggcacgaatcccacatcgaggaggagaaaggggaaggtcagctcttcttgcgcttggatatgatgtccacggcgacggccagcaggagcacgaggcccttgatggtcttcaccacggcggtgtcaacacccataatcgacagaccctggttgataacacccatcacgaatgcaccaatcacagcgcccgggatggtaccaataccaccggtgacggccgtgccaccgatgaagcaggcagcgatggcgtccatctcgaactccataccggcctgagcagttgcggaagccagacgggaaagcatgcagacagcggccactgcggacaggaagcccatgtggacgaacagcaggaagtccacgcggcgggtgttgataccggagaggatggcggccttgcggttgccaccaacggcgtacacgtggcgaccgaacacggtcttggtcaggatgaagttgtagatgaagaccagcacaccgacgatcaccagcatgatcggggtaccaccctgatcagcgttaccggaggaagccagcaggtaggtgacgaaggcgatgacgaccgcgacaagcacaatcttgaggacggtcaggctcatcggctcgggcaccaggccgaccttggccacacgggcgcgcttgcgcagctggctccaggcaaagccgacaatgcacaggatgccgagcacaatggtcagaccgtcgaacggaccccaccagccaaggatgttgggcaggtagttacgggcaatgccacggaattcgagggaggtaatcggcacggattcgccgacgatcacggtggcgagaccacggaagatcaacatgccggccagagtggtaatgaagcccgggatgccgatgacggcgacccagaagccctgccagacgccgacgatcaggccgacgaccagagcgatgacgatggcgagcatccagttgactccggcgcgttccatcagcagtgcacacacaccaccgatgaaggctaccaaggaaccaaccgaaaggtcgatgtgggtggcgatgatgaccatcaccataccaatggccaggatgatcacgtaggcgttctgctggatcagggacacgaaggagttcggcttcagcagcacacctccggtcaggatctcgaaggccacgacgatgatcagcagtgcgccgacaataccgtattgacgggcattgttggcgaccgtggccagcaggccggtcttttcttctttctttgcaggtgttgcagttgcggcgctcatcaggctgccacctccctttccttggtcatacccttcatcaggtattcctgggtaaatccattcttctcgacattgtcggtgacgacaccgtaggacaccgtgtaaatgcggtcgcagataccgatgagctcaggcagctcggaggaaatcacgatgacggccttgcctgcatcggcaagcttatcgatgatttcgtagatctcatacttggcgccgacgtcgatgcctcgggtcggctcatcgaggatgaggatgtccggctgcgagataacccacttggcgagcagcactttctgctggttaccaccggagagggtggagacattcacatcgatgtcatgacacttgatgttgaagtccttgcggtactgttcgacttccttgcgctcaaggttgtcgtccacaaccccgcccttgctgatcttggtcagggaggccagggatgcgttctctcggatgttctgcagcaggttcagaccgttgcccttacgatcctcggtggcgtaggcgagacctgcgtcaatcgcggactgcacgttgggcatcttgacttccttgcccttgacgaacaccttgccggagatgttggaaccgtaagagtggccgaagatggacatggccatttcggtacgacccgcacccatcagacccgccagaccgacgatctcgccggcgtgcacgttgatgttcgcatggtctacgatcacgcgctccgcgtcgagcggatgatgcacggtccaatcctcgacgcgcaggtattcctcgcccggggtattggaggggtggttcgggtacaggttgtgcagcggacgacccaccatcttgcggatgagttcttcctggtcgagcggcgtctccggcgtcacgtacatcacaccgacggtcgaaccgtctcgaatgatggtgacattgtcggcaatggcggcgacctcgttgagtttatgagtgatgatgatgctggtcacgccctgctcgtcacgtagctgacgaaccaggtcaagcaggtgggcggaatcctcatcgttcagtgcagcggtcggctcatcgaggatgagcagcttcacgtccttggacaatgccttggcgatttcgacgagctgctgcttgccgacgccgatgtccataaccctggtatccgggtcttcgggaagtcccacacgatcgagcagcttcttcgcctcggcgcgggtcttgtcccagtcgatcacgccacccttggcctgctcgttgccgatgaagatgttctccgcaatggacaggaacgggctcaacgccagttcctgatgaatgattacgatgccgtcggcctcggaatcattaatagtatggtatttgcattccttgccatcaaaggtgattttgccggaatagctaccgtatgggtacacacccgaaagcacgttcatcagggtcgatttgcctgcaccgttctcgccgcagatggcgtggatctcgccgcgatcgacggaaagattcacatcggtgagggctttgaccggaccgaacgtcttcgtgatgttttccatcgtcaagatggtgtcatttgatgacatgtcatcactcctcgtcacagttctgtgttcatggacatgcggcgcatatcggctatgcgccgcatgtcattgtgtttgtttacggattgcctgatgaggactacttagtcagctcgtcgaagcgatcctgggtgatgtagttggccgtgaccagatcctggaggttgtccttggtgatgttctgggggtcaagcagcttggacggaacgtcgatgttgttgttgttgaacttgccgttcagaccggagacttccttgccctcggcgatctcgacgaccatgtcgtacacggcgtcagccagcttgttcacgtccttgaacacggtctcgccctgcttatccttggcgatgttggcaactgcgatctccatggcgtcctgaccggtgatgtacggccaggagtcggtgcccggcttcatgtcgggacgcttggattcgatggcgttgatcacaccctgggcgatgccgtcgtacggagtgaggaccgcgtcgagcttctcgccgtgggcgtaggtggagtcaaggatggattccatgtccttctgcgcctgctcggtcttccagctcatcacggagatcttctgccaatcctcaacggtgaagtccttggtcacgccaccctgaccgtgctgggacggggagacgagcacgcccttctcgaagtacggctgcagcagatcccaagcgcccttgaagaagtacttggcgttgttgtcatccggggaaccggtgaacagctcgatattgaacgggccggtggcgccatccttaagcttgagctggtcaatgagccacgtggcctcgagcacgccgacctgctccagctggaaggtggcgtagtagtcgacggcgtcggtgttcatgatcagtcgatcgtaggcgatgaccttggcacctgcatcgcgggccttctcaacggcggggcccactgcggtgccgtccttggaagcgaccacgacgatcttggcgtcgttgttgaccatgttctcgatgtcagcgttctgctgggccggcttatcgtcggcgaaggacaggatgaccttgtatccggccttctccagcttggccttcaggttgttgccgtccttgttccaacgctcttcggacttggtcggcatcgaaatgccgatagtggcgcccttttcgatcttggcatcaccgccagttgcctggccgctacggctgccaccgcaggccgcgaggcccgcgcacatggcaacgcctgccaccacggcgacgatcttcttagtgaacttcatttgttctccttcatcttcgaggggatggcgaaccctccttggtcgcccgaacctgagaataacctcaggttcatctcatagaataccgtattgagttaagttgtcaaactcaagaaagcgaatttcccgtcgtttatgttcaaccaatgaacgcaatggcgatttttcgcgcatcacaaggcgacacgccgaaaaatccacgctctgcgcctcgctgtgcctcatgccggtaacgactacactgaactcttatggcaacaaggcttttcggttcgcagacctcgcttcgcgaggcaaaccgcgccaacttgctggccagcatccacaagttcggcgccatgacacaggtcgaactggcagaggtgacaggactgtccactgcgaccgtgtccacgctcgtccatcagcttgtcgacgaagaccagctggagaccaaaaacaccgttcgcaacggtcgcagagccactctggtgacccttgcacggcatcagggcctcggcgtcgggctttggatcgcgcgacgtcatcttacgctttctatcgttgacttctcgaagtcaatcatcgctgagcacacgctccccctgccgttgggccacaaggcggacacaacgctggaacgcgccatgctgctcatcaatgagaccctgagcagcatcgacgccgaagccagcgagctggtcggcatcggcgtggccgtggccgcaccggtggccaccagcgaccacaccatagcgattcccggcattctgcccggatgggacggcgtcgatatcacggccccgttgcgcacggcgttcaacgttcccgtatacgtcgataatgacgcgaatttcgcggcatacggcgaatcccgtatgggcgtggcggcaggcaaacgcaatttcgtatatatctcagccaacgacggggttggcgcaggcatcgtcatcaacggcgaaatcatgcatggcgtgaccggcctggccggtgaaatcggccatatccaggtcgacccgctgggtgccatctgttcgtgcggtaaccgcggctgccttgacaccgtcgtggcggaaaacaggctggtgcagttgctcagcgtcacacacggcaatatgacgctggatgatctggtgtcctttgccaacgaaggcgaccccggttgccgtcgcatcatcgccgacacggccgtgcgtatcggtcaggtggcggctgatctgtgcatcagcgtggatccggaggtcattgtgctcggcggcaagctggccatgaccggcgacgtattcatccaaccgttcaatgaagcgttgcagcgcatgctgttccctgatgccgtggcacccatcgatgtactcgtgtcatcccacccgaacgacaactgcgcgctaggcggcgcattatgcgccatcgagttctcggttcgcaatgacgtcagccagtgaccggtaccaggagaagagtgagaagaaggaacacaccatgaggaattcgagcacacctcctctgctgcggctggaggacatctgtgtgaagttcggcttcgtcgaggcgttgaaatcggtgaatctgtccatccaacgccaggaggttgtcgccatcgtgggcgataacggcgcaggaaagtccactctgatcaaggtcatcgcgggatttctgcagccgggattcggccatatctatctcaacggcgaacaagtgaccattccctcgatcagggaggcggaccgcatgggcatcgcatcggtgttccaggggcaggagttctgcgacaacctggacgtggcctcgaacctgttcctcggcaaggagatcaatcagattggcatacgcgatgacgattcgatgaactcgcgtgcccgttccgtgctgaagaccctgagctcggcgattcgggtcggctcccctatcgcatccttatccgtcggccagcgccagaccgtggccatagcacgcacgctgctcaatgacccgcagcttattctgctggacgaaccgaccgccgcactgtcggtgatgcagtcggcagaagtgctcgcatatatcaagagactgcgctccgaaggccggtccgtggtgatggtctgccacgatctgccggatgtgttcgcggtatccgaccgcattgtcgtgatacgtcaggggcacgtcaccggcgtgcatcgaaccgtcgaaacgtcctatgaggagattatcgccgaaatcgccggcgtgaccaccgaacacgagtacgaggaaatcgctgagaacccggaattcgattccatggtcaggcagcggaaactcatcgaccgcactatcagcgcggcagtgagccatggcaccggccatgactcaccattagactaacgtcccgttgccggagcgacatcgtcagcgcagagccaggttggccgcgccgatcagaccggcatcctggcccgcagtggccgcgacgatcttggcatggccgcggtaggcgctgccttccaggaaacgctggtagttgtagcgggccggctccagcaggatgtcgcccacggccaccacgccgccgccgatcacgaacaggtccgggtcaagcacggcggaaacggcggccatggtgcggcccagccattcgccgatcttgccgaacgcatacaggccaagtacgtcaccttcctgagccgcttgggacaccatcggcccctccagtttggtgatgtcgccgccgcacagttccagaagacgcttggcgtcctgaggacgacggcgcacggcggacttggcgaagttctccagcgaggttcccgaagtgtaacgttcggcgcagccgcgcaggccgcagccgcagtggtcgccgtccgggaccatcggcaggtggccgagctcggcggccatgccgaaggagccgcggtagagctggccgttgatcacgatggcaccgccgaggccggtgcccacggtcagcgcgaccatgttggagctaccctggccggcgccgtgcacgaattcgccccatccggcgcagttggcgtcgttttcgacgatgaccggcacggcatggtcgatcagcgcgccgacgtgctcggacagatcgtagttgatccatgccggaatgttggcggagaaggtgagcgtcttgcgatccgcgctcacattgccggcggcggagatgccgacggcctcgatatcggtgtgcccggcggccacagcctcgcggtacacctcggcgatgtgctggttgatggcgtcggcgtccatcggcgtggggacgcgccagcgctggatgatgctgtcattttcatcgcagacggcggcggcgatcttggttcctccgatatcaatggcgagcgtggtcatggcttactccttgaagactttcgtaacatgcgagatagcgaaaatagtagcgagccgccatgacctcccaccgcggtttttacgtggttcgtcatgcgtcgcgaacattccaccgatgcgcttcctcatgcatttcacccgttgcaaacgggcgcccccttaacgccggcatcggtgcggacggcgtgtcgaatcggatgcaatcactttcaccgtccttgcggatggcatcgaagaacggcaggaaacaaaaaactcccgacatgcatcgggagtttggtggcgaccccggccggacttgaaccggtgacctccgccgtgacagggcggcgctctaaccaactgagctacggggccgtgcgtgcctcgatgaggcacaaaaggatatgctacagcatcatcggatcatgacacgccgtctgatacgtcgttccttccaccggcgaaccgaccgcaggtgtggtggacggtatgcggaccatatcgttcgaccgcgcacggccgcactccccataagacagtagccgtcatgcgtcaacgcacgttgtgcgacgacgcggcacgacgcacggccaccgaggccagcaaaccgatgaacagcatgatgccggcaaccagaagcgtccactggccgccttcgacgaaccctgaagtcatcgcatcggcaatcttcggcgcctcgtcgccgaatcgggccgccggtccatcaccgttgcggaacacgccgatcactccacccgccgaaccgctgaccgcttgggccagaccgtcgccgaccttggcgggcagcccgagggattcgagccgcgccggcaatgttccgttgacggccatggccagcgacgcgccggagatggccgaaccgacggcggtgccgagctgtcgaaccgtggactgggtggccgacccttcgccggactgcatgatcggcacttcggagagcaccacgctggtcagctgcgcggaggcgaagcccagacccagaccgtatgcggccatgggaacaagctgccaccacaccgacaatcccacaggcataaggaccgcgaccagggcgacggcgatgatctcgatcacaagaccgagttgaatcacgccggccggggtgagcttggcggccatgacatgggcctgcgcacctgcgacgatggaccccaggcccatcacggccagcatcgcaccggcctgcagcgtgttgagcccgcgggcgttgatgaggtacagcggcagcatgaacaccagcgcgaattcgccggcggcgatggccgcagccgccagattgccccacgagaacgtcttgatgcgaaacagggtcatgtccagcatgaccggccgaccgtctttgccccgcgcggattcgaagccgatgaagaaggccatcagaagcgcgccggcgatcatgcagctcggcaccggcgacaaccagtcacgattccagctcaacccgcccagcttcaactgcgttgaggtctgcttccaccagccgtaggtctcgccttcaataagaccgaacaccagcagggccgaggtcagggcagacaacaccacgcccgggatatccacaccgacgcgacgggatcggacatcctgcgcggcatccgcggcaccggcgaccgaggcgttcccaccggtctgcggcaccaggaagatggccgacacaaagaccgcgatgcccagcggcaggttcaccaggaagatccaacgccatcccaaggtctcggtgaacacgccaccgagcagcggaccaagcgcggcggccgaactcatcaccgcgccccagacgccgaacgccgcggcgcggtacttgccacggaacagggcggacaccgtggacagggtgttcggcatgatcatcgcgcctccgatgccctgcagcacacgggcggcaagcagcatccccgcaccctgcgaggcggcggcgagcgccgaactcgccacgaagatcacggtaccggcttgaaacaccagtttgcgccctctggcgtcgcccaacttgccgaaaggcagcaacaacgcggcaagcacgatgttgtagagcgaggtgacccactgggcgtcggtcagggtaatgccgatgtcgtcgatgatggtggggatggagacattgacgatcgagctgtcgagcacgatcatggccaatcccagggccatcacccacagcgcgccccacggcggcgcctgggtgggcagcggcgacgaggccgtcggattcgttgaagagatcgaagacgcatcggcctgagtctgatgctgagatcgggatgcatgatccataacggggtttcctctcattgccatgattgcggcgaccgacacgcctatgcgccattcacggtacatccgcggcctagaccgtctcaccggatttcgcgggacattccgggcgttcagccatgggcgtaacctcggcggatcactgaagagaggagcaccaaagacggccgcgctattccagatgcgtcatttcgaaatgaaagcccggcagaacgccggaatcgcaacgatcgacaaatcgccagacgatacagggccgggctctcgctcaggaaacagggcatgcccagcgcccatttaccggcgtcggcattgacggcatcgccgccgccttccacgtctcctcccgatgaccgaatcgctaattcccgcccgccagaaccccattgcatcgtgtagacgggatatgggataatccacaaggtgcttttgcgtaggaccaaggcgccggcgatgacacgggacaaccacaacagcgaatgacgcacaacgggccgtccgggacacccccgtaaacggttgcgtcgttttccattggtgtcattacggggtccaagtcccgcaaaacgttggaaaatcagcattccttgaacggtaaggtaacatatggctgagtttatccaccagatagttcgtagtcactgagccttgctattccaacgtttttcccgcatgtcccgtgacacaacagcatgtcactcatcggctacgaatcggcttgtgtcaaagttgcgtcatccgacgctaatccgagacccagcattgctagaatcgatgtaagtgatgccgacgcgacggcattccacatcacggaagattcattcactttcgatgaggcaaggaggcgagacatgacgaagctcgaacgcaaccagatcgatttctccacgtttatgctgtatcggctcgccgagcattggggcaagtccgtgcccgacacctatcgcattctcgataaggccaacgctatcgacggctaccttgtcccctgctacgacatgctgcacacactcggcagcgaatacctcgtcaacgacctgacggactacgtgcgcgagcggggaatctgcatatgaggctgtaccacggttccgacgtcaccatcgaaaagcccgacgccatccacttacgcaagaaccttgatttcggctcggggttctacgccaccagttatccgaagcaggcggaacgctgggccttgcgacgttcattgcgctcgcatggcaaagcgctggtcaacgtgtacgaattcggcgaaacggcgaatctccatattctgcgtttcaacgagaacgacgccgaacgggttcgattcgtatgcaactgtcgtcggggcgggcagcctcccctgggaactgacctcatcatcggaggcgttgcggatgacaaggtctacgcggccatagacatgtacatgcgtgagctatgggacatggaacgcaccctgcaggcccttgccttctacgaacgaaacgaccagtaccgcttcctcacaccccggtcgatcgcagccctgcgatacgtcgagacctacgaggtgaaacaatgacgatcacgccacaaaccctgacgaagctcgaaacgctacgcaaggagcatctcgaatccgatctcatcgcgctgatagccgaccaatacgacatgacagccgccgatgcgatgaaactctattattccagccaactcagccaacaggtggccgacggctcctacggcatcgaacaactcgacgcgcgctacctactcgacgaccttcaacgatacgagccgcaactcttcagaaccgtcaacgcgactgaatagggcacggctgccgagttccgaacgagcaccctcgcatcccatcacattccgtagcgacgcggtgtggacgacaaggcaacagctcgtcccgttactcggacgcggcatcacgacgatcagcaaaacacatcggcaatgccaagcgtgaggaattggacggaatcgcccccagcggcacaacccacgagctacatctcgcctactcccctgcgtcgggatcgtatttgagaatgtcgcccggctcgcattccaaggcctggcagatattggccaacgtggtaaaccgaatcgcgttgaccttgttgtttttgatcttggataaattgacgttagtgataccgacctgctcggcgagatcgcccagtgagatgtgccgcttcgccatcatcacatccagttccagaacaattttgcccatatcaaccttccctgaatcgcgcaatcatcagagcaggccgtcgacgtcatgctcaagctcggcgccgtatgcgaagaattgcgccaggcacagcacgacgagaccgaaggcgatcggctgcatattcacgaagaattccaccttgcggctccccaccacgagatcgacgacaaccatgaaaatggcgttgatgatgggggcgatgatggatagttcgccgatgcggcggacgcgttgcacgttggccttggtgaagggagattcggtttcgctggtactgaagatcagatggatgtttctgaacaccacagccatcatcccaagcatcgccaccatggcgattgcggcgacagcgaaaccacgggcgagcacagtggcatccgatgccacaggcagcagattcgggtccccaacgataaacagattcccggaatccaagccttcctgaacccaccgcaccagcggagcaccggcaacgaccagggcgaccagcatgcccgcatacaccgccgttgcgatccagagcatcacttccacaatcttcgcgatgaccttgaccgccgcgttaagcttcgttgccttcatcgttatcacttcctttgacaataatgaaaatatttattatttgataattttttatcgttttacgataattattttatatcagacgaatactttctatgcaatgctcaaagcatcggcgtgttccgcgatcgaaagcacctgcgccatgcgctacaaaccgatcaccgcaatatgcaacctgccccgcacctcgtcaatccactgttgcggcatgacgatgggatatgggataatccgcaaggtgcttttgcgtaggaccaaggcgccggcgatgacacgcgacaaccacaacagcgaatgacgcacaacgggccgtccgggacacccccgtaaacggtcgcgtcgttttccattggtgtcattgcggggtccgggtcccgcaaaacgttggaaaatcagcgtttcttgaacgataaggtaacatatggctgaatttgtgtttcagatgatcaaggcccgcaagtcttacggcgaccgcgtgattctcgatgacgtgaccctgagcttcctgcccggcgcgaagatcggcgtcgtgggcccgaacggcatgggtaagtccaccctgctgaagattatggccggcctggagaccgtgagcaacggcgaggccacgctgaccccgggcttcacggtcggcatcctgcagcaggagccgccgctggatgacaccaagaccgtgggcgagaacatcaagatggcgttcggcccgattgccgagaaggtcgcccgattcaacgagatcggtgaagaaatggccaacccggacgccgacttcgacgcgctgatggaagagatgggcaagctgcagaccgagatcgacgccgccgacggctgggacctcgactcccagcttgagcaggcgatggacgccctgcagtgccccgatccggacaccccggtcaacgtgtgctccggtggcgagcgccgccgtgtggccctgtgcaagctgctgcttgaggcccctgatctgctgctgctcgacgagcccaccaaccacctggacgccgagtccatcctgtggctggaacagttcctgcaccagtacaagggtgccgtcatcgccgtcacccacgatcgttacttcatggacaacgtggccgagtggatctgcgaggtcgaccgcggccacctgtacccgtacaagggcaactactccacctacttggagaccaaggccaagcgtctggagatccagggagccaaggacgccaagctcgccaagcgactgaagaacgagctcgactgggtgcgttcctcccccaaggcccgtcaggccaagaacaaggcccgtctggaacgttacgaccagatggagaacgaggcacgcaacaacaagaagctcgacttctccgagattcagattccggccggcccgcgcctgggctccaccgtgctggaagccaaccacatccacaaggctttcggcgagcgcgtactcatcgacgacctgtccttcacgctgccgcgcaacggcatcgtcggcgtgatcggcccgaacggcgtgggtaagtccacgctgttcaagaccatcgtgggcctggaaccgctgaccagcggcgagctgaagatcggcgacaccgtcaaaatcagctacgtggaccagaaccgtgaaggcctggacccgaacaagaacctgtgggaagccgtgtccggcggcctcgacttcatcgaggtggccggcgtggaagtgccgacccgcgcctacgtggccagcttcggcttcaagggcgccgaccagcagaagctgaccggcgtgctgtccggtggtgaacgcaaccgtctgaacctggccctgaccctgaagcagggcggcaacctgctgctgctcgacgagcccaccaacgatctggacgtcgagaccctggaatccctcgaaaacgcgctgctcgagttcccgggctgcgctgtggtgatctcccacgaccgttggttcctcgaccgcgtcgccacgcatatcctcgcgtgggaaggcgacgacgacaacccggccaagtggtactggttcgaaggcaacttccaggcctaccaggagaacaaggtggcccgactcggtgaggatgcggcccgtccgcaccgtctgcacaagaagcttgtgcgcggctgagatacgccggcattagtgccacaacgcgctttatacgtcgaaagccgtccctcaggggcggctttcccataattgcccccatgactgccccgccccgcatcccataaaatcccacagtcacctacggcaacgcaccggcaacacaccggcagtgcagcagcaacgtagcggcaacgcaccgcataaccaaccgtttaccttccaaacagtctcgttacatttcgctcccggaactcttaacccccaccggatagactgccaaccataggttggaatacgataaccgaatatcgaacacagcagaacaggaatcgaggaacgccatggctcaggcaaccaccgtaactccattggaccatctggtgaaggtgctgaagttgggcgagccttccgcttaccgcaatcacacatacatcaatggcgagagtatgtacttccccactggccgcgtctacggtggccaggtcatcgcccagtcggtgatcgccgcgtccaaaaccgtgggcccttcacgcctgccgcattcggtgcatggctatttcattgccgccggcgatattcgtcaagacctgctgtttgacgtcgagaaccttcgcgacggccgctcgttctccgctcgtcgggtcaacgtcacccaagccgaggggtcgattctcacggccatcgcctccttccaggagaccggtcaggagggtgtggaatttgccgatccgatgccggaaaacctgcccgatcccgaaacgttgacttccgccaaggaactcatgcagccgttcgccgaaaagtcgccgttcgccaatttctatgtcgagaaatcgccattcgatatccgccacgtgacgccgaccgtgatgctgcgcgcggacaaggattccgccgagcatgattccggcaagcagatggtgtggatgaaggccgatggccacgtcgatgtgccgcaggtcatgcatcgtgcgatgctggcactcggctgcgatcaggtgatgatggagccggtgctgcgccgcgccggactgtcgatttccacaccgggcatttcctatgcgtccatcgaccattcgatgtggtggtatcaggatatcgatatcaacgaatggcatttgtatgtgcaggatacgcctatcgccgcgcacgggcgcggactcggcatcgccaaagtgtatgcgcagaatggcgacttggtggcggccatcgctcaggaagctatggttcgcgtgccgcaggaatagtgggaatcggcttggccgatggtgtggtttttcttcttctctcccccagtcggctacgcctacggccccctcgtcagagggggcttatcacggattatcttctgtaggcctgggctatgtcgctacggcgcttggcttccttgattttcgggttttcggggccttcgttcggcggtaactggcacaaccattcgccgataatgccgatgatcatgtcggcgatgcacaccacggccacgattgcgcactcggtgacggcgtgtgcatagaaatccgcctcgatatggctcaggctcatcacaatctgacctccataccagccggcaagcgttgcgcccgccaatcccagtgcctttgccagcaccagcgtatacaccgcgatagtgggattgatgaagctatgcggacgcttcttggggtcggtattcgcgtatttatgcacttgcagggccaagatcagcacgataacgcccagcacggccagcaatccggtcacaatccaaggcgcaccaatcagcgacagtcccgagctttcgccgtaggaggccagaccgatacccgccaacaggcccagcacagcaccgatcacatactgccaccatggtgttcgccgtgttttcatgtccggcctccttatcgttgcgttgctgtttgctgtttgcgaacggccctcgcgcctgggctgttcatcttgatttggttttcgtcactgccgtgcccggctgttcgaggccggagactggtccgtcaccgtctggtttctagcctaccgttcgtaactggttctgccatcagctcaactgttcgacagtatccagttgtccgatagcaatccgacctgtccggcatccggtgccatggccaaaaggaaagccaccgggtcgccgcccagagaagcattcgggtccatatccagccaaggtgccaataccgacgcatggttacgggccgacggccaaggaatgctgcagttgggctcgtcggaagtcacgccttccatgtcgacaaggtcaaggtcgactgccagatcatgaacactttcgatgctgcccaatacggcaatcaggtcggcgggcggcaacttggtttcgatttggatgaccgcgctcatcgcgtccgggccgtcgaaatggctgacatggtagagcggcgagatgccctgtacctgattgccaggaacactgtcgatggaaacgatggtttcgcggaacagccgttcgacatcctgcgaggtggaatccagcgaaataatcgccttgcgtgagacgggtgccgactccgacgctgatttttgcttgactgcatgcccgccgagcatccagtcttcgctctcgagctgcacggcgttacggtccggtgcggcggccagcaaatcggctacaggcccctcatgggctccggcaagtttggcgttcggattcagcgccgcccagggagccagcacaaacgcgcgctgccaagcacgcggatggggcaatgccagatccggatccgcgctggtgatgccatcaaagtcgataatgtccaagtccaacggcctggaatcccaatgattctcacgaattcgcccatggttcgcctcgatgctttgcaacgcggcgagcaattcgtggctgcccattgtggtttcaagctccaccacggcgttcaggaaatccggcgtaccgtcagccatgccccacgcggccgtgcggtaaagcggcgaaataccagtcacctgtgtgccgagcagcgcgtcaatctcccgaacggcggctcgcaaggtggattccacctcgcccacattgccgcccaaggccaccaccgcgttatggatggcatgctcttcagcagtgcgtccattatcggtggcacgcacgcgcgagatggagaccgatacatctgcaaaagccacgacgatgggcgcatgaggcttgtgcacggtgacgtcgatggaggcgacggccggcgcatcggcaaggatcttatccgcgatacgttgggccagacgctcgatcaggtccacatgagggccttcgatgacagccgcgatatccttggccacacggccgtaatcgatggtgtcgttgagatcgtcggattgaccggctgcggccagatcaaggtgcagggtgacatccacgacgaaggtttgtggccgttcgtgttcgaaggcgagcacaccgtgggtgccgttggcatgtacgccggtaagtgtgatggtgtccattggtaaggctttctgctcaaatgctcccctcagtcgccttcggcgccagctcccctcgcccgaggggagccaaggcctagaagcaaccaaaacagggagccaggggaatcatgcgtattcgcgccaggtgttgccggcgatgacggcggcgcggcttttggccacgtcgtgtacgcgcacggcccatgcgccatgttcggcggacagggcggacaaggctgcggtcacgtcatcgcgctgggccatgatcggcccatcagcaccggcagcgcccgcctcggtaagcatcgccgaaatgaagcgtttgcgggactggccgatcagcaccggatatccggtggctcggaaggtctcgagtccggtcagcagcggcaggttgtgctcgatgccgggcttggagaagcccaggcccgggtcgatgataatgcgctcaggctttacgccggcggccagtacaccgtcgacttggcgcatgagttcgtcgtgtacgtcggtcaatacaccgtgctcgtagacggaggtgtcttgatcggggttcgcgcccttggagccggcgagccaaccgcgccaatgctgcacgatgtacaggcagtcgtggtcggcgaccacgtgcggcagttcggcatccagcgtgccaccggagacgtcgttgatgatctgggcgccctcgctcagcgcagcggcggccacggatgcgcgcgtggtgtcgatggacaatatggcaccggccggaatcaatgtcttgacggcaccggtgatgcggaccaattcgtcagcctcggacacgcgcttggcgccggggcgcgtggattcggcgccgatgtcgatgatgtccgcgccggcggccatcatgtcgcgcccgtgctgtgccgccttggccgggtccagccacaggccgccgtccgaggacgaatcctcggtgatgttgagcacacccatcaccatggtgtgcgtagtgtcatgcaacgcctgcaaatcagtcattatgtttccccttctatgtaggtcccaagtgagctccctatgatgagggagcttagtagacactatttatccaaaatgaggctcatggcttcggctcgggtggccggattgcgcagcatgccgcgcaccgcagaggtcaccgtgcgggcggaagacttcttgatgccgcgcatagacatgcacaggtgctcgcattcggtcaccacaatcacaccacgtgcgcccgcatactcgaccagcgcgtcggcgatctgctgggtcaaacgctcctgcacctgcggccggcgagcatacacctcgaccagtcgggcgagcttgctcagccccatcaccccgtccttggcgggaatatagcccacatgggccacgccgtggaacggcagcaggtgatgctcgcacaccgaatacagttcgatgtccttgaccagcaccagctcgtcggtatccacgtcgaagtgtttctccagcacatcggccggcgaggcctgcagaccggcgaacagctcgcggcacgctcgggcgatacggtcaggcgtttccaccagtccctcgcgctcgggatcctcgccaatcgacttcaggaacaggcgtacggcttcgcgcacgccttcctcgtcgtatgtgcgtttctcccgctggcaagactctatatattcgttcatctcatctctcccttgtcattgtccacaacgacgtcggcccggcctgcgtacgtgagaaaccacatgaacaggtcgggcagaatcgtcatcgtgtctactcttccggcttcatgccgaccgagcgcttgaggctttcgggaatctccaccggcggcttgtccgagtcggggcgacggtcgttggacagccacaccgggcggaccggcgccttcttgatcggcgcgaagatctccgcaagctccttctcgttcagagtttccttgaccagcagctggcggaccaactcatcgagtatatcgcggttgtcgttgatgatggtccacgcctcggtgtgggcggtttccaccagcttcagcacctcgtcatcaatcacttcggcggtgcggtcggagtatttgcgcggctgcagaccgtccatcacggtggtctgatcgtcgtcggaaccccacttgatggcgccgagcttgtcggagaagccgtattcgatcaccatcgtacgggcgatgctcgtagccttctcgatatcgttcgaggcaccggtggtcgggtcgtggaagacgatttcctcggcggtgcgaccgcccatcgcgtaggccatctggtcgagcagctggttgcgcgactgcgagtagcggtcggaggtcggcatgacggcggtgtagccgagggcgcggcctcgcggcagaatcgtcaccttggtcaccgggtcggtgttgttcagggcggcggcgaccagcgcatggccaccctcgtggtatgcggtgttgcgcagctcttccagagccatgcccttggacttgcgcttcggtccggcctgaacgcggtcgatggcctcgtcgatggcgcggttgtcgatcaactgggcaccggcacgggcgcacagcaacgcggcttcgttgagcacgttggccagatcggcaccggtgaagcccggcgtgcgcacggcgaccatgtgcaggtcgacgtccggtacgaacggcttgcccttggcatgcaccctcagaattgcctcacggccttccagatcaggggcggccacgcccacctgacggtcgaatcgacccggacgcagcagagcggggtcaagcacgtcagggcggttggtggcggcgatgatgatgaggttggtgtcgttgtcgaaaccatccatctcgacgagcagctggttcagcgtctgctcgcgctcgtcgtggccaccgcccatgccggagccacgcttgcggcccacagcatcgatttcatcgatgaagatgatggcgggggcgttcttcttggcctcatcgaacaggtcacgcacacgggaggcaccgagacccacgaacatttcgacgaagtcggagccggccatcgagtagaacggcacgccggcctcgcctgcgatggctcgggccagcaacgtcttaccggtgccgggagggccgtacagcagcacaccgcgcgggatgcgagcgcccagcgccttgtacttggacggatccttgaggaagtccttgatctcctcgacttcggccacggcctcgtcttcgccggccacatcggcgaacttggtggtgggggtctggccgtcgagcagcttgccgctgtttttcttgccacccatgccgagcatgccgccggcaccgcccatgcgactcatcaggaaccagaacagggcgaagaagatgatgaacggcaggatcgaggtgacgaggtagctcagcatgctggtctgctcgatattcgaggtccaacccttttcgagatcaccgttctccacggccttggccacctgtgcgccctgcgcgaaggtgtagtagaactgcacgttcttgccgtagttggtcaccttgccggtgtcggcgtttttcttggtgtagtcgttcttcagcttaaggcggacgacctgcttgttgtccgtgatctcggcgtaggtggccttgccctgattgatcagcgcgaaaccatctttggtgtcaatggtcttcgtgccaccgccggcgaacatctggaacatcagcgcgaccatgaccacgagcacggcaccccatagccaaggggactgccatatcgggcggttctcgttgttgttgcctttgccattggtcccgttattgccacggttgaacgggttggtgaacgggttgccgttgttacggttgttgttcgggttcggattattgccgttacccggcccttgcgggaagctcatgcttgcactccttggtagacggacggcttgaggaccgcgatcgaatcgaggttgcggtagcgctcgtcaaagtcgaggccgaagccgacgacgaactcgtccggaatctcatagccggcgtacttcacatcaacgtccacttctcggcgggaaggcttgctcagcaaagcgaagacctccacggaagcggcaccacgacgtttcagttctgcgaccagccacgcgagcgtgcgtcctgaatcaacaatatcctccacaatcaaaatgtgccgtccgcgaacatcggcggacaaatcctgcctgactgtgacctcaccgctcgacactgtgcccgagccatagctcgaaaggctcatgaagtcgatctgtacaggaatgctcatggcctgggtgaacgcgaccagcgtattcacggcccctttcagcaccgccacgagcagcggattcttatcgcggtaatcctcgctcgcgagagtggccatctcgtggatcttggcatcgatctgttctttgctgaccagctcgtggtcaatatcttcctcaacgtcagcgattcgcatgcgctccatcttggcacacgcgaatgacgtgtttcttgcgattggctgaataacctctgggaagtgagacgccgccttggccatgccaatcgacgaccagccggtcgatggcggcaatctgggcggcactggcgttcacaccggcctggctcagcgcgtgagcgatgacccgcaaccgaatcgcctctggctcacgtgcaatacgtttgacgccgatcatcaggccgatgccatggcccgaatcgttggtatcgtctgcagcacaggctcgtggcgtatcggtcgataccgctgccgacgatgccggccggtcaactgccgtaaccgcctcccccatcacctcgtcggatcgctgatccagatactccttgtccattctggccagctgtgcgctttcggcgaaatggcgggtgacattgaatccagcgaatcgttcgatggccggcagcaggtcgtggcgtacccgcgagcgcaacggatagtcgtccggcaactcgccgtctaccgcatcgccattggtggggtcatcccaatattccacacccaagtcttcacagaggccggtggtttcgtctcgagtaagggtcagcagcggccgcgcaaaagtcacgccactgcgtgtgaagacctgcggcatgccggccaacgcatccacgccacggctgcgcagcagtccgatcaatacggtttccgcctgatcgtccatagtgtgggccaacagcacggcaatggcacctgattcacgcgccgcggtgcacagctcgttgtaccgggcctgccgtgcggccgcttcgaggccctcaccgcgtgcctgcacggttgtgttgcgcacgatgaccgggcccagtcccaacgcacggcaacgatccgcggcctcgccggcgacctgttcggaaccctcctgcaagccgtgatccacaatcacgacaccgcaacgcacgcccatggacgtgcatacgatatggcttaccgcggccagcgccatcgaatcgcgcccgcctgaacaggccacgagcacgagtggtgcatcggaggcaacggcatggtccccatgctgcgcgaattcgggagcctgcacatcgcatagttccacggcgctcagcgttgttcggaccgcgcctacggccttgcgcaatcgtgcggaatatgccatgtactcaccacccttttctggttataggcactcgtgcgtttatggacgtttacggcctttgtagcccttgatggcccttgatgcctcttttacagccccgcgagcttggtgatgaacgagtcgatggcgctacgcgcggcggcataatcctcaggattgttgaccaccacggcaaacgacaacgctcccccattggtacgggacacattgccggccatcgacgtgaccgtgccgaggctgccggttttgacgcgcagcagaccggccacggcatcatccgtataccgatcctgcgccgtgcccaccaaccccgcgatggatagaccttccgcaccggccgcgccgctctcggtggtcagattacgttgttggacggccgccagcgtgcgtacggtgagccgggagccgggagacaggccggagcaatcggccatggtcagaccggatgtgtcgagaccgagatcgttcagagtggatttgaccgcttccgtgccgccttcaggactgtttgtcgctgatttcgccaaagcggtgagtctaccgaactcctcggccagcgtattgtccgaatgccgtaacgtgtatgccatgatttcggacagtgttgccgaactcaccgaagccaaaggcgtttcgccggatggagcggtgtttgccgtcacgtctccggtaacggccacaccgttcgattggagcagttcggcgaatttcgtggccacgtcgctggcggtgtgctgggacagttccgggtatccggccgaa

SEQ ID NO: 3684 - DNA, 147074 bp, Unknown
  R150_10m  MAG No. k141_1218
ctccctctgtcacggcttcgccgtgccatctccctcatcagagggagatattagtgaaaggaacgtcgatgaccaacgaactgactgatgatgaactgcgcgaggctattgtgcgccatgaatgggatcagttccagcgcaccaacaatgagggtggacgcgcggcatgccaaggcaactggccggtgttccaccagatgcggctggcccagttcctcacatgggagcggccattactcaccagctatgccgctgatcttgacgcggccgaccacgtgggccgcaacctcgtgaccgaaaaatacggccgcatgatggcctccaccgcgccggaagatttcacgaagaacatagagccgtatattccgcgtccctctgaagagcgcgtggcccgtcaggaacaggtcatcgcccagcaagtcgcctgggccaaggatttccgcgagcgctaccccaagctcggcgaggcgatgcgcgtactcaccaccaccgaagacacaccatctgccacctcattcgaaacctatctgcgcggcgagcttggtacgtattccgaacggaccttccagctctacgaggtgatgattagcgagcgcgccgcagccagcccgcaacgcaatatcactgaggaaaccttgttgcacacagtccagctcggcggtttcgacactttggatgaggctgaagccgctcagcgctgacgacagtgcctccacgccgtcacgccccatccaccttcccgaatttgtgacgctcacggcgactcagtggcacatattcgggaaggagccggtaacgaccgtgaatatcacagactgaacaacccccagaaagacaatatcgtcaatgtgacaagtgcagccagtgtcaccatcacgcaaatgacacgacgcacgccgataatgctggcgcgataccgccacatacgttccagttcccacgcgaacagcatgaccaacagcacggtcagcacctgcaatgccctccacccaagggaaaacaactgcggttgaggcataaccaatacagccgatacgcctacggcgctcatatagccatacaacagcacggtaatcaccatcaccgctgtgccgataccggcagataagccggcaatgccgtgcaacgtacgctgttgggcggctcccagcccactcggcgtcgcatgcatggcccgcacagtcgccacactacgtcgcccggccagcaacgtctgtagccaagaaaacacagtcaagccaatacctaatatcgccgccatcacgatcagcacgggccctgccaccatcagaccggccagcacgccgagcgagccgacgataccggatctggtacgttgcggcgcggcgaagcgctggtgaggtgtcgcaccggcgacttggggcgttgcccatccatcggctttggttccggcagtcacaccgttcacccaattttccagcgcttgcgtatagccttcggccaatggcaggttcggggtgaataagccctcaccagcccgcatctgatggttgccggcaaaatagcgtacggtgacgttctcgttgccggacttgttggccgtggcgatgatccgctgcgccccctgttcgatgggcatggccgtatcgtaggtgccgtagttcaccagcaccggcatggtgagggatttcagataccggtcggcatcaaagtcggcataggccagatcgaatggcgcgtagtccagcgacatcaatttggccatgtctttgaccacgggcttgggcgcgccggcctcatgcgtataggcgctgacagccatggccatttgctcacgtccattgaacaccggtgcggatgtaagtatggcaaaggcaatgtcttgccgtttcgaggttagaatcgtggcgatccaggtgccttcggattcggcgtagatgccggttttggcggggtccacgccgcttatgccacgcagcacgtcgagcgaacgcccgtattcgcgagcaaaacgcgggtagtcgcgatgcagcacggtgtagttgtcgttgcgcttggccggcaccaaggtcacgatgccggcagaggccatggcgttggcgatatcgccgaaatcctcggcaccgctggtaccggacccgtgaatgaacagacaagccgggcgtggcccgggagcgtcgaccggttcacgtagtacggcgggtagcgtgacgccgtcgccggtcttgatggatagtcgggtttcacgcgtactatatcgcccctcgtggggaatgttcgcatgggcaggggtgatggtggtgtcggcagaagcgatagcgatgtgcttggtgtagggccgtgtgttccattgcggcatcatcgcccagccaagtgtggcgaataccagcgtcatcgccatcgcggtggcgatgacgctcgctacccgccgcgccgaaatccgtttcatagttactatgcctccccccatcagcatagaacggtcggctcccgtcataatgtgcttctactgggaccgtaatgcaatggttgtaacgctattttctcttcttgacggcaccgactatggcccatacaacggccactattaccagaataagtcccactacggcgcagataatagccgtcagcaattgcggattcggcgagaacagcgaaatcatccgatccggagatatgcacccgaaaaccagcgcgatcacgccgataatcacgcctaatagtccgaataccacagtaagcgcgctgatgctctgtttctggatgttcttggcactcttgacatccttagcattctggacgttcttggcgctccccccaggctggcatggtttgccggcggtctgagactgctcataggaaggttgcgctgaagatgctgcgtacatcggtacatcatcggcagatggaatcggcccaccatccccctccacggcatcggcaactgtttccagggcaatccgatctgtggatggttcgatgggcgatggagaggcagttgtcgcctgcgtatccacatccgagaccgacgcatccgcatgattgtcggtgacgggcagcacagccgtttcgtcatcatcagctgcggatggcagcaccgtggtatcggttcggtcatcgacggtcaccatggttgttgtcgcggtggtcgcgtcggtttcggaaggtatggccgtggtcggtgtcgcatcctcgatggaggcgaattccttggtttcatcagtcatgattccatctcctggttgtaacggcttgatcattccgattgttcggttgtgttcttgcttgtgctgttgccatcgtatatatcggcaagcggctggaacgtggagcctttccaatcggaggcgtacaccacgttgacacgtgcttccaccgcatagggaatattgatttttaattctgggccgttgtccggcatggcggatcccttatccaaccattcgtaatcaggcccattcatgggattggtggcactttcagcttcgaagaaaccaaagcttagacccatgtagttgttgtataccatctcgtatttgccgccaacgccactcgaagtgaagtaggagtcggcggtgccgaaggcgtaagtgcaggaatccggcagaacgatatgcacttgcgcctgtgttgcggctatggtgatggtaccgaccgggcaattactgatggaagttttgccatccagcatcttcaccgtgtgcggcccatgtgtcttgccccaatcggaccaatcaatgatcgcctgatcggtgttgtagttttcaccgctgaacgccacaccttgctgcaatgtttcgaacgtggcatcgctggcatcggcaacgaagatgccatccttttgcacatcgttcatgccatcgctgtttctcgcactgacagattggctcagtgaaacaacagtattgatgccgctggcaccaagatcacggtagtgcacgccatacgtgcctgaaacgatggtcatgcagagcgcgcatccaccggcaaccagtccgagaggaatcagaccaccggtacgccgccctctgaatccgagaatgatgaccaccagccccatcactatgcatactgcggcaatccagatggtgctcagacgcataatgccgataatgcccatgtcgtttacccaaatcagtcccatcagaccggcaaaggagaggaaggtaaggcccagtatgctcaagaccacgattgggcccgccggcttgcggcgcttggactcggtgggggcataagccgtcgcattcatacggtcgggggcaaacggcccgttgggtactgtgccgggcatcgcgctgggcactgtgcccggcatcacgctgggcatcgactgatagacaggctgtgaaacaggttgtgaaacactaggcgcggttcgtgaaacagattgtgaaacaggttgcggagctgaatacaaaggagatagagggaccggttgcgcggctggatatgaggcaggctgtggagctggatacgacacaggctgtgaaaccggtcgcggcgcagatgccccgaatccgtacccttcctgctggcgaatgccgcttttggccaacaaccatagcgctaaggcggcgagcgcaatacaaacccaccccgcacctggaatcacgattgccacggctaggaacaggaagcatccaagacaattccagtcccattggccggcaatgaggtcctcggccaagatgtgcccatcgcgtacatccggcatcagaaaccagccgagtgcgtacagagctgcgccaaaaccgaagaacaatgtacatacaatcaccaacgcacgtactaatgtggggctccagccaagccgtaaagcgatgccgctgcatacgccaccgatccaccggtcgtcgccgcgaaccagtccactggatcgcacccaagtgaagaagcgtcgcgatgtcttgtttttttgcggaccaggctgcggctgtggctgatacggattcgcgtttggattgctcatgattccattacaccgcccgaccactgccacaacgctcggggaacaccctgattgttccctgaacaccgggtaaaaccccggccgcaacgccctgagcgcggcacaataggagtatgacgtcatctcccgaaccattgctgcccgcgcgcatgccgctgatgcgcccccggcagggccgctggctcaccggcgtgtgcaagggcatcgccctgcacttgggcatcggcgtgacatgggttcggattgcgttcatcgctctgaccttcctctacggcgcaggcatcatcgcttatgtattcctgtgggtgttcatgcccgccggagacccggtgacggctgcagctcgcacagtgcccgttgatcaggcgccgcttgcgcgaggcaatcagccacttgccgctcatgacgacgaatcggctgccgcaccggaatcattgtccgaggccatccaacgtgctccgaaaccggccgtcgtggcattggccggtttcgcgttgatggccaccggactgctgctcaccagcaccggtgcggatgtccagattgtgcttccgctgctggtagggttgggcggcatcgcactggcatggatgaatcttagtccgcgaggcacgcagctgttgtctatgttgggcggcatcgcactgattttcatgggatgggcattgtatgtgcataatgtcagcattcccgggtggggcagctctcctcgacgcattgttgccagcggattcgtgatgatcgtcggtatcgtggtggcggtgatgccgtgggcgaacgcgatgctgcaacgactcacccacgagcaggcattgaaggaacgcgaagaggagcgcgcggacatgaccgcccatctgcatgatggcgtgctgcaaacgttggcgctgattcagctgcactccgaggaaccgactaccgtattcgccctggcgcgtagccaagagcgcgagctgcgcgaatggctgtatcaggaacgttccacatcggatcgttcggtgggagccggattgaagcagatcgccgccgaggtggaggacgagcacggcaaaccgattgaggtggtcaccgtgggcgacgcgcggccgagtgcccagaccgatgcgctgctggacgccacccgtcaggcgttggtcaatgcggtcacgcatggcggcgagccggtgtctttgtattgcgaggccagcgacacgatggttgaagtgttcgtgcgcgaccatggcgaaggcttcgatatggacgccattccgcccgaccggctgggcatccgcgaatcgattatcggccgcgtcaaacggcgcggcggtacagtggagatagtgtccagggccggctggggcaccgaggtcagaatgcatatgccgatcgcgctgaaagcggcgcagggagaacatcgatgagcgagaatgagacagccaagattcgtgtggccgtggtcgatgaccatgagatgttccgtgcgggcgtaatcgccacgttgcgtgattccttcgatatcgtcggccaagcggcggacgtgcccggttcggtggcgatgatcgcacagaccaagccgcaggtggtgttgctggatgtgcacgtgcccggcggtgaaggtggcggcggtgccgagatcctcgccaaatcgcggccctactcccccactaccgtgtttctggcattgtcggtttcggatgcgccgcaggatgtgggggcggtgattcgcgccggcgcccagggctatgtgaccaagacgattaccggcgctgatttgatttcatccatcaagcaggtgcatgagggctatgccgtgttctcgccaaaactggccggttttgtgctttcggcctttcagggtgtgccggcggcggggtctgatggcggcgctgatggtgcggcacgggctcatgatgaggagctggaccggctgtccgcccgcgagcaggaggtcatgcggctgatcgcacgcggatacacgtataaagaggtggcggccgaactgttcatttcgatcaagacggtcgaaacgcacgtgagctcggtgctgcgaaagcttcagctttcgaatcgcaccgagctcacccgctgggccgccgataggcgcattgtgtgataaacgacagatgagctccctcatcagagggagctcatctgctcatatcactcggcgtcgcggaaaccgttggggttcttggtctgccagttgagggaggaggcggccatgtcgtcgatggtcagctcggccttccagccaagctccttctccgccttggaagcgtcggcgtagcaggcggcgatgtcaccggggcgacgcggcttgatcgtgtacggaatcggatggccggcggccttctcgtaagccttgatgacctcaagcacggagtagccgtggccggtacccaggttgtagacgaacacgccttccttgtcgatgtggtcaatgacggccacgtgacccttggccaggtcgaccacgtggatgtagtcacgcacaccagtgccgtcgggcgtgtcgtagtcgtcgccgtagacctggacttccttgagctcgccgaccgcgaccttggccacgtacggggtgaggttcgccggaatacccttcggatcttcgcccagcaggccggactcgtgtgcgccgaccgggttgaagtagcgcagcagcacgatggtccaggacggatcggccacatgtacgtcgcgcagaatctgctcctggaacagcttggaggtgccgtacgggttggtggtgccgccggtcggcgtctcctcggtaatcggcagttccttcggcgtgccgtacacggtggcggaggaggagaagatgatcttcttgacgttgtgcttcttcatcaccttgagcagcacaagcgtggagtacaggttgttgtcgtagtattcgatcggcttggccacggactcgcccacggccttgagaccggcgaagtgaatgacccaatcgatgttgttttcggtgaagacgcgttccataagcgcctcatcgcgcacgtcaccgtcgtaacgcttgaccggcttgccggtgatctgctcgacgcgctcaagcgccacgggagacgagttgccgtagttatctacggaaataacgtcgtagcccttgtcgagcagttcgatgtcggtgtgggtggcgatgaatccagcaccgcccgtaaccagaacagtagtcatatctcctcctttggaaggacttgccttcggttttccttcagtattgagcttacttcacttgacctgtttcacctagcggcaaaaccaagactttcgaggaatgtttgcgtggtggctttctgcttgaagacggccgtgttgccgaggatgcggtagcagacgctgccgagctcgtcacgtacggcttggtggatggcctcgcggtcgcggtttccggccaatgtttcagcgagttcgccccattcgagactgaattcgctgacttcatcgggcaaatcgcggccttcggcgagcgcctcctcgacgatgccgagctggtcgacgagccgtccgggcaggatgaacaggccttgggcttcgatcagtccaatcggctcctgcttgaccggccagtattcggggtgtgcatggaaaataccttccgggtactcgtcgctgatcgcattgttgcggaagatgagactcatctcatagccacgttcggtgatgatcgcgctgggcgagagggcggattggcggttgccgtccgcgtcatggctggcgatgccgttcgccgcgtcgtcataaccgacccatgcctcgcggatgatgtcggatacgtcgatgatgctctggcggtttttcgacaccacacgcacggcggtaccgggccagtcgaggatttcgaccacggcgtccggatagtcggcgagcgtgaaggcggcccaagtggcggccttgtgcatcggcagcagttcgccgccgccctggtagtggtcgtgggcgagcaccgagccgccgatgcgaggcagcgcggcgttgcatccgaggaagtatccggggaagcggtccacgaagtcgagcagatggccgaaggtgtcgcggtccacatgcatcggcgtgtggtcagtgttcacgcagatgccgtgctggtcgaagtagccgtagggcgagaactgccagaaccatgactcaccgccgagcgtgaccggcagggtgcgcagcgtgcgcttgtcacgtccggcgaagccctcgttctcatggcagatcgtgcacttcgggtagccgccggacacggcgttgccggccgccgccttcttcatgttcttgaattcgggtttggcgaggttgatggtcaccgtcagcccgtgcgagtcgaagcgcgggttccggtcgagctgggcacgcttgacataattgttggccacacagtagtcgtagaaccattgcatggcggccatgccgccgtccctgtgctcgatgagcaggaaccggtcgtcgagatcggcggggttggcggagaggatgcccatgatggtgtcggcgtaggccgggccttcctccggatcgaagaggccggcggttgtggcggcggcgcggaaggcggcgagtagggggtcgggggtcttttcgtcagagggggcctggcttcggctgccgacaatgtcttggactgcgtctgacactgacgccgccgacgttgtggttttgggtccggggtaggaatccaggtggaagagggcgaagatttggttgcgggtccagtctgcgttgcgtggatcgaggtcgagatgatccaaggcgtaatcgactagggcgtcgatgctggcgtatacctcggtcagctgatcgctcattgctcggcccccatcatgctggttcgggtatggttcgactgacggctcacttggcagcctccatgatgtcggctacgatggcgtgggtttcactggccttctgctccatctcctgcacgagtttgatctgggtgcgggtgcgcaccagattgtgctcggggtacttggtggcaaagtagatatcgccttccaagtagtcggcgagaaagcgcatgccgcattccatggtgagcaggttgccgctgaacggcagcagttcggcctcgcgcgcggtgatgctgccacgtagttcgcccacgaatccttccgtgtaggcacggaacagctcggtgctgaaatgcaccttgctgaggtccttttcgtcttccagagcagtggacgcaccaaagcgtatggaatcgccgaagtcgaacagcatggagccgggcatgatggtgtcgagatcgatgatcgcacgcgccttgccggtggtggcgtccatgaggatgttgttgagcttggtgtcgttgtgggtcacgcgcaacggaatcgaaccgtccctgagcccatccatcacgacggcatactggtcggcgtggctcagatagaagtcgatttccggctggcatgcggcggcgcggccgagcttgtccgcggcgagggcggccttgaagtcctcgaaacgatgcggggtgtcgtggaagcgggcgatggtttcggtcagctggctggcgtcgaattcggacaggaagttctggaagtcgccgaatgcgctgccggcctcgcggaacacgtccgggttcggcacgaggttgtacgacacggtgtgttcgatgaacttgtagacgcgccatgcgccgccatcgatctcggcccaggtggcgccggaggtggtgggcacaatgtccagcgtctctttgccctgagccttgagagtggaggtgaccagttcgacattgcgcatcagattcaccgtatcggggaagatgctggtgttcatctgttggaggatgtagcgggggccgtccgtggtcaccagataggtggtgttgatatggccgtctccgtaaggttcgatgccggtcacggcaccttccagcgcaaaatgcgaggcgatgccgaataaaacttcattgctttcggtcatgatgggtccgttctccaaaacgcgggaatcaggcttcacgccatgcgatgccgctgtcgggcaggtcgaagtcctcggtggtgccatcggccagagtcaccgtggtccgctgcggctgatcggtgttgttgattacgcagtacaacccttgctcggggaagtgcgccacctcgcactccgggttggacgagctccaagccgcatacttgtcttcgttgtgggaggcgtagaacagcacgcgttccagcagtcgggcgttggccgccgaatagggcagaccggagatgtacacaccgcggccttcgccataatcattggtcgcgagctgcacctgcccgccgtccgcgcgcagcagggtcacgttttcattgaccggatacgtgttgagcacgggttcgccgaagtcgatgccgcccaacggcttgatggactggccaccgccgcaaccgctcagcgggatgcggtagccggcctgttcccaagcctcgcgggccgccgggtcgaccggcacatcggcggtgatgaagtggtccggcaccaccggtgggaagtacttgtccacggagagggtctgatagcgctcctcgtccacgccaatcacgtcggccagctggaagaaccggcccgcttggaagcgcggtgccgagctcggctcgcccacgcccacgaacgcgccgccaccacgcacccaggcgcgcacggtttccacgagcttcgggttggtccacacgtcgccgccggtgaatgcggtgtcgaccgggccgccgttgatgattacgtcgatatcactatcgatgccatgcgcgagtacgtcgtcgaagctgatgaaccgcacgttcacgcgcatgccggacagggattccagaatgccgtagtaggagtaggtctgcttgttgggcagggcgtgtgccacggtgaacgccatccaggaacgcatcttgccccaggaattcagaatcgccacgttgagctcgccttcggcggccaccccaccggtgcggtcgtggatgtcgcggaattcgtcggcgatatgggtcaccgtgtccacgaacttcgggaacttggcggccaaggagaggtagccaccgtagcccatacggccgatcggcgaacgcaggatcgcgcggcgggccttacgccagttgtcgaggccttcgatgctcgggtcgttaccctcgtagaacgtgtcggggaagaagtacggcaggaagcgtccttccgtgtatttgacgcccggaatgtccgcgatcatgcgggtggtggtgccgtctccgatggagccgacgaccgcatccaaacccagcttttcgaacccgtccttatacggttcggtaccgatccactggtcgccaaggaacatcatggcttccttgcctgccgcgtgcgacatgtcggcaagccgcttgacgttctcgcgcacgaatccggagaggaagtcaatccagtcgcgttgcgccttgcggggcacgcgccacgcggagttgtaggcaccgccatccacgaaatcctccggacgcagacggtaaccgtactccttctcgaaatcgtccaatgcgcgcgggctcacggtgcaggcgcaaccgaaccagtcgaccaccttttcgcgacgcttggcatcgaacaggagcgtgaactggtagaagaacgtggtgaaacgcaccacatccacctgcgggctgtccttcagccactgctcgaacgtatcgaacacgaacttgcgggtggccggatggtagatgtcgaacggaatctcgtgttccttgtctccccaatcattggtcaggtggttgtacatctcgaccgggtcccagatgatgtaggccaggaaactcaccgtgtattcgtgcatcggcacggcagcggtcacgtgcacggtgtcctcgcccgggtcgagcgtccagccggacgggtccacgacctcgcccgtggtgcggtccacgacttcccagtacttatgagggtcggcgtcacggttaggcttgagctgttcctcgaagaaaccgtccatcagcggcacatccaccgcgttggactcggccaggatacgggcggtcagcaggtagacctgcggggtctcgtccatgtgcagggtgatccactcgttgtgggcgcgggtcgggaagtaggcgctgtagattttcttgccaagagcgagcactgcctcgtccagatgcgtgccgtcggagttgcggatggcgtccgcaccccacaattcggcgagttccttggtcttttcggcaaaattctcttcactgggcagcgtgaagcggccggtgctggtcatgagtgctcctttgtggggttggtcatcaaaaaactacaaagcgacgaattcgtcgcatacaaaatgaccggcgtcatcgcgggccctgggaccctgactgcgtagatccttgacgcttacggtgacgccggacgattggaatcgtgtcactgaatatgggagggacgttgcccggcaccggaaggagtgacacgacatgccgggcagcggattggttagcccttgacggcaccggcggcgaggccggactgccagtagcgctggaggccgaggaacagcacgatcacgggcagcacgccgagcaacgcacccatcatcagggcgccgcgatcggtgaacgtggccagcgagaccatgccgtacagaccgagggtcacgggcttcaaggtgtcggaagacaccatcatcaacggcaacaggaagttgttccacgtggccacgaacaggaacaggaaaatcgtcaccatggccggggccaggagcctcagcacgatggtgaagaagatcctcgcctcgctcgcgccgtcgatgcgggcggcttcaagcagttcgtccggcaccgaactctgtgcgtacgtgcggcccaggaagaagccgaacggcgaaacgcagcacgggatgatgatcgagagcatagtgttggtcaggtgcaacgtgtggaagatcgagtacatcgggatggtcagcagggcggacggcatgagcatgcaggccataatgatgccgatggccgcgttcttgccgcggaagttgaattttgcggtggcgtagccagccatcacagacacgatggtgccgatcaatgccgagacgcccgagtagatcagggagttcagcacccagcgccagaagttgccacgagtccagccaagcagcttggaatagttagtggcgatggcattgggcagctggtcaagcggcacagcaaaccacatgccgttgctaccggtcatctgggccggcgtcttggtggacgcgatgatggcccagtaaatcgggaacaggaagtagatcaacaccagtaccagcagcaccacggtgagggtcttcacggccgcggacggtcgcatggagcgaggcaaatcgtgttgcgcagcctgacgctgcttttcgagcttgcgctcggcctttttgcgggcgcgttcttcaacggttgcggagctcattactcgttcaccttcctttcggccaaggtgtacagcacggcaagcacacctgcgatcagagccatgacaatggcgatggccgaggccggaccgtcaccagacggggtaatggtgccctgagaagtgttcatggccatcatcatcggtgtatacgacttggaaatacccggatcagccgtagacatgatctgcggttcgttgaacagctgaatggtgccgacgatggaaagcagcatggccagcagggccgcgccacgcacgttcggcagcttgatcttcgtggcaatctgccaaccattggcgccgtcgatacgggcggcctcatagaggtcatgcgggatggcctgcagtgcggcaaggaaaatcagcatgttgtagccggtgaaggtccatgtggtgatgttggccatcgagccgagcacgatgttcttgttgaagaagtccacattgacgccgatggcggcaagtcccttgacgatcggcgagatttggccgttgtacaggtagacccagataatcgaggccacgacgccggggatggcgtagggcaggaagtagcccagacggaaaccggtgacatgcttgaccacgaacgagtcgatgacgatggccaacgccagtgcggcgatgatcatgatcggcacctgaatcagggtgtagagcagcaccctgccgacgccggaccagaagttgccggaagtaatagcatactggaagttctggaatcctacgaatttattgaccagctcgccaccgccgtatgcgccaccgccctcggtgacctgacggaagaagctggaatagatggcccagatgatgggcaagatgaacacgaaagtgaacaggacggcgaacggtgccatgaacgcccagccggtgcggttctcgcgcttctgagcgccggaccgcttcggcttggcggcggcacgcctaggtgctttgcccttcgcctgagtagtggatgcagtcataatacaaaacctgtcttcgcaaagaacagtaaaacaaatgacaagggccacagcgcccctgcagcaatacccccaaacaatacggaaggccggagtatgtgccccggcctttcgctatggtgatgcgaggcatcggaggtcttggacggccggctatttcaagccggcccgttgacaagacctagtgaggtcactccttgacggacagaccgaggttcttcagcgtatccaccgaggtcttctgagcggtgtcgaacacatccgaaaccttggcagaaccatcggcagccttggcggcggtctgtttcattgcagcgccgactgcggagaagccaggcatgtaggtgaagtcacccatgttgtcgttcgcggtcttgaactcagccatgacatcctgtccgctgaagtagtcggaccacttctgcggggtcttggcatccgcggtggtggcggccacgacaaggccctgggagacaaggtcatcaacctgggtgttgaaccagtcaaggaactccatggcttcggccgggtgcttggaacccttgagcacggccacaccggaaccaccatcggcgccggtcttggtgccattgccgaaccagtcaccgagctgggtgaccttccactcaccagcaccagtgccaccggcggaatcgatgaacagtggggcttcccaagcggcggccacggtgccgatcagctgaccggactggatggagttatcaaacgatgcatcccaacgcgggttggtgagggcggccttgttgtcgatcagctgctggtagacatcggccacggccttggagcccttagtctgggtgttgacaacccaggagttgccgtcgaccttgtaccacggaccggaagcgccggcctggccggacatcatcatcatggcctcatcaggttggaaggtcatgatgtacttgccctgggcagcggtcttcttggcggtctcgatgagctcgtcagcggtcttcggcacggtgatgccgagcttctcaaattcagcggcgttgtagaagtaagtcagcgggccggtgtcctgcggcagaccgtaggtcttgccgtccacctgcatcagtgcgaacgggccggaagcgaaatcgtccttgtacttggcggcctcatcggtgacatcctgcagaaggcccttggtgaagacctcaggaacctcggagtaaccgacctgagccagatccggcgcattgccagccttgacgtcggtctcgagcttcttgatcatgtcggcggcattgccatcgaacttggtggcctggacctgaatgttcgggtgctccttgttccacttggccacaatgtcgttgaccaaggtcatgccttcggaatcgggcagacgatgcatataggtgatgttgaccacaccgccatcgctgccggacttcgtgtcgccggcagtgtcgctgccgccgcaaccggccaaaccaatacccattgctgctaccgcggcaagagcagccacgatgcgcttgttgtgcgataccatatctctactccttcctagtgaaatcatcacctcagcgtgatgactgattgctaatttaggcctttgctcttttattgtcaacttagctaacaattaccgcgcgtcccgttgaggtgagtggcgttaaaccgattcgatgctcgattgtgcgggtttgttcatttcattaactccccttacaaagcaacgtacttttggtccaccggtagacctaatgagatattggatagcggcaacaatccaaggcgttagcttgcaatcgtccaccacaaattgcaagcacttgccaacattatcggttttcaggttgccggcgcaatacccgactagggggggcaccgcgccttaatgagacgctacacgagcagtctcagcaactggtagagctgccacaggctacgcacgttgaagcgcgtgccgtcaaccgtggcgttcgcctcgccatcgcccacatggacgatcacggtgcgccagttcacggtcagactaccgtgcatcgtgatacgattgcatcttgcaaccttgttgattaaaggcgcaagccggtaatcaacgcaaaggcccgatgccgcaaacgtcgggccttttcttatcggctcacgccgattggcccgtcatatcaacggggacaccgcatgttacggcatcacaaaccaatatatcagcaccccggtggcgatcaagaagacaggttccagaaaaagaaaaagggcctgggcatgttgcccaggcctcggttcgcggacagggcgagattcgaactcgcggagggttgcccctcaacggttttcaagaccgtctctttaggccgctcagacacctgtcctgatgcgcgttcacacgcgcaagtattcattatacagaagggagggatgttgatattcggcagtgcggtcggtcttggattcgcctgctggctattagcgatctccccctcagtcagctacgctgacagctcccccattaaagggagctaaagcacgatgagactcaggcctcccacttagtgggctcgatgacttccttgccgcccatgtaggcgcgcatggcctgcggaatctcgatggagccgtccttctgctggtggttctccatgatggcgaccagccaacgggtggtggccagcgtgccgttgagcgtggagaccggacgggtgccgccatcttccatacgctcgcggatgttcagacggcgagcctggtactcggtgcagttcgaggtggaggtgagctcgcggtagcggccctgggtcgggacccaggcctcgcagtcgaacttgcgggcggcggaggagccgaggtcgccggctgcggtgtcgatgatgcggtagggcacctcgaccttggcgagcatctcctgctccatggccagcaggtgctcgtgctccttgtaggagtcctcctgcttggcgtagacgaacatctccaccttgtcgaactggtggacgcggatgatgccggaagtgtccttgcctgcggcgccggcctcgcggcggtagcaggaggaccaaccgcagtagcgcagcgggccgttgccgaggtcgaggatctcgttctcgtgcatgccggcgagcgccacttcggaagtgccgaccaggtactggtcgtcgggctcgcgcagacggtagatctcgtcggcgtgggagttcaggaagccggtgccgcgcatgacctcggggcgcaccagcgtcggggtgatggccagcgtgaagccgtgctcctcggcctggtccacggccatggtgagcatggcgatctgcatacgggccacctggccacgcaggaagtagaagcgggagccgccgaccttgacgccgcggcgcatgtcgatgccggccacgccggtgccgagggtcaggtggtccttgggctcgaagccttcggccgcgaagtcgcgaatctggccgaccttcttgacgaccacgtagtcgtcctcgccgccttcgggagcttcgggctccacgatgttggagagcttccacatggcggtggtgtattcctcggcggcggaatcggccttggacttgtattcggagaccttctgggacagttccttggtctcggcgatgagcttggccttctcgtccgccggggcggaggcgaccttcttgccgatttccttctgctgggcgcgagcctcttcgaaggccttcagcgcctcacgacgtgcggtgtcggaggagagcacttcgtcgacgagttccacggactcgccgcgcttgcgctgggattccttgacgatatcggtgtgttcacggatgaattgaatatcaagcatgggcaccagactagccgcgtaagcagacaccgacaatggccgaatgcgcgggagtcacgcggaaatcacagggaagcccgggaaagtccgcggacgggtccacccggccaatttcgtcagatgagacgcgattgaaccataatcgcgccccacggggctgttgcgtgcaggaaatgttcacgtacggcgcaccatggccgcaaacgacctccccaccgataacaataggagccatgcctcagcctgccctcaccgtgtttctgatcatcgccgcaatcgccattgtggtggtgctcatcgccgtcatcgtcatcgccctgcgcgcgcagcgccgccgcaagctggctcagacgctggagaagcgccgggacgacgaggtgcagtacgccttcatcgtgaatccgtccaaaccgcaggccgaagcccgccggctgcatatccagaggttctgcgaggccaaggggctcaatcgcatccgcttctacgacacccagcttgacaaggacggcagggtctgcgcgcttgaggcgctggaggacggcgccgacgtggtgatcgcggtcggcggcgacggcacggtgcgcacggtggcgagcgccgtctccggcaccggccatgcgctgggcatcatccccatcggcaccggcaacctgtttgcccgcaatatgggcgttcccgtggacgatatcgacgccgcgctgaccgtggccacctcccacggctcccgcctggtggacatgggccgtctcaccctgctcgaccacccggaggacgaccacggccacgccttcctcatcatcgccggcatcggcttcgatgcggccatgatcgacgacaccaaccccgagctcaaggcgaacatcagctggctcgcctacttcgtgggcggcgtgaagaacctgttcgcgccgaagttccgcggcacgctgacagtcaccagcgccgacggctcgacccacaccatcaagaatctcgatttccgcacggtgatggccggcaactgcggccagattcccatgttctcgctgatgccggcggcatcctatgacgatggtctgctggacttcgaaatcatcgacaccaccggcggcatcctcggctgggccaacctgttcggcgacgtggtgcaccagacgatcatcggcaagcccgaacagaacccgctgtccacgaactcgaccatcgaacaggtccagggtgtcagtgccgaaatcacattggaaaagccggccaaagcgcaggtggacggtgacatgctgccggaaacccgccacatccgtttctcggtggatcaccgcgcgctgatcgtgcgcgtgcccgacgcctccgcgctggaaaagaccgcgcaggccgctgcttcaaatgccacctcgaatttcgccgaaatgaccggtacactcgagccgattcgctgattcgccaatccgctaatccgttactacgatgcgtggccggtgactcgggcgacatgcatcgccaaataagcgatttcgtcgtcgctgatatccgtgtcgaggcgcagttcgagcagggaggcgatggttcgcgcgcatcgcagcgcagcggggtaggactcacgaatcaccttcatcaccggtgccggctcgtccgtcagttgctggtgctggtggatgcgtacgaacaggtagcgcaggtgggtgatgaaccggcccacgttcacggaactgcggtccaacgtgatgccgtagctgtggtcgatgatgtcaagcagttgctggatcacgcctgtcatcgtgtacgtataggacaggtcgccggtggcgaagccggcgttgaccagatgcatggcaagcgcggtggcctcgccgtccggcagcgtgacgtcgagccgtgcattgagcgatgcgagcatcgcacgcccctgcgcgtattcctgcgggtacaggttgctcacctcgccgagcagcgggtaggtgatgtcgatgccgcgccgcacccgctccaccgcattcgccacgtggtccgacagggccatgaccagcgtggtgctgccggtctcgcgctcccccagtccggtctcctgcatggattcgacgaccacgcggatgatttcgggcggaatgtccgccagcatctgcgccagatggtcagggtcgcgcccgtccgatggcacgaaggtgcgcacaactttcgactcgtcgaccgtctgccccggcttggcctggaaccccagtccgcggccggtgagaatcacctcaccgccgtcgccgcctttggcgagcacgacgttgttgttgaacactcgcagtatttccatggcatcctttcgcaacgtcattgttccacatcgatgatcgggctgccggctgatacggttttgcagtcgccgccgttgtcgtcgctgctaccgtcgccgatcaacggcgtgaccacggtcagttcagcggcgttgaccaccgtcaccaccaccacaacgctgtgcccggccgccgcgactttgccgaaatccacggtggccagtggctctcccgccgcgatccgctcgcctttgcccacggccacgacgaatccctcgccatccatattgacggtgtcaatgccgacatgaaccagcacttcgatgccgtcatcggttttaatgccgaaggcatggccggtccgggccacggttttcagcgtgccactgaccggtgccagcacggccgtctcgccggccgtctccggcacgacgcctacaccctcccccagcgcgcgggaggcgaacaccggatcgccagtcgcttccagattcatcaaccggccggcgaccggcgacaggatggcgttggagtcaggagtccgatcggaggcaggccgcgatggggaatcttccgcagactccgcatccgacgatgtcgcgccaatccctctcaccgcatcctgcgagcatacgttctcgcccgccgagaccatctgcgcctccgtggcgcgcggcggcgtacggtacccgaacagcaccgtcagcaccatcgccattacaaacgcaacggcgatggacagcgcgtacacccacattctgtcaaacaccggaatcgtcagcaacgaggagaaggcgaacgccgtagtcgtgacgccccggaccatctgaccggatggcagcacggacgggaacagccagccaagcaccgcgctggtcacgccgccggccgcgcagccggcgagcagccagcggtagacgcggcggtgatgcagatggatgccgtacaggctcagttccgaaacgccactcagcaatcccgcgagcaacgcccccaccgcggtctgccgcatggccgaatccttgccgcgtacagccagcacgagcacgccagcggtggcaccgaagcaggcaaagttccatacacccatcggaccttggacgaaatcgtagccgagcgcctgaatgttcatcagcatcagggcattcaacggccagtgcagaccgagcggcacgagaaacgggtagagcatcgggatgatgagcgcgaataggaacggcacgtgcgcgttaagccatgctgtggccgctcccagcccaccgccgagccatattcccagaggcccgatgaccagtatggtgagcgcaaaaacgacgaccagtgagaggaatggcacgaacaccagctgtacgctgtcgggaatgacgcgcttcaacccgtggtagaccacggcgagcacggcagccatgagcaacggcacgaagacgttgccgccgtagtcgttgagttgaatcggtatgccgaacgccgacacggtgcaggtttcggcgccgaatacggcgttggccgagcattgaatcgccccggagagggcgctggatacggacatcccggacattccggacattccggacatcacgccagtaaactgcggggtcatcagcgcggccataatcgcgccgccgagccaggggtcgacgtccagtttcttggccgcattgtaggcgatcataatcggcagaacggtgaacacaccctcccaaatcgccttgagtagtatccagccggcggaggtctcgccgtcaggcacgatgccgagtgcaacgatcacgttgacgatggcgatgaccagcgaggcaccgagcagtacacccagaatcgggcggaacgagtcagacaggtagtcgaaaaacgcggcagcccaagcgcgggcggcactgccccactcgcggacggtacgaggcgtgaagtgacgggatgtattggatgggccgcaactttgttcggcgtcggtggcagtatcgcgcgatggtgcggcatcgtcggaaaggtacggcgcggactgcgcgggttgcgtgggctgtgtggattgcgctgactgcgcgggctgcgctggctgagtgggctgcattgactgagtgggctgcattgactgagtgggttgcgttgactgcgacgctgactgcatcactgccgatggcaattgcgctgccggcatcaatcgcgccgtccgcagccgaacgatctgctcgtacaccgaggcgaccgctccgccgatgatgacctgataacgattgccggctcgcgggaatgcaccgaggactccggggacggattcaagaccgtgctggttgacatggccggcatcggccagttcgaagtgcagtcgcgtggcgcaatgggtcaggctggtaatgttcgcggggccgccgacggcatcgacgatgcgcgccgcaatcactgcaggcgttgcgttcgatgcgttcgccacggttcctccttgctgccgtatgccactgtgttccattatcggcgctgggtgccccaaaagcacggcaatgccggcaaagcatcgcgaaacggcaactatgcgctacggtgctccgcgatggtgtcccgccataatgttccgcgatgatgcttcgccacacccgttctccgtatttgccgcagcgcccattccgacatcattccaccatgcagaatcctgcaatcgttgtcaaaaatcatcgttttttgccgcctattcggagtgtcgcgactgcggaagtcgtattctatctttcacacacgttgcgtagcagggttgttactcaaaacgaggcaagacctggagcgacgtggaatttgcgtatcgtgatatgcgaattccacgttgttccaggtcttttttgttttcgggcgactgcagacaatcgaagcctgaccttgcacgcggcagaggggccacgcaacaggcgcggtccgtcaacggcgaaaggacaaggcaatgacgacgacaacggcatcacccgtatcgaaacagacggcatccgcggcgcaggaaaccagcgcaaccggtgcggcggccaccgcaatcgaaaccatcgaaaccggcgtggccggagtggcgggcgcggccacaaacgcggcagccaacgcaatcgaggacctcgaagccgccgaatcgcacggcttctccacgcgcttcccgctcaacagcgcattcatcttcaccttcggcgcgctcggcggcatgctgttcggtttcgacaccggcatcatctccggcgcctccccgcttatcgaatcggacttcggcctgagcgtctctcagaccggcttcatcacctcctcggtgctgatcggctcgtgcgcaggcgcgctgtcgatcggcgcactgtctgaccggttcggccgcaagaagctgctcatcgtctccgcgctgctgttcctgctcggctcaggcctgtgcgcctcctccaccggattcgcgatgatggtgtgcgcccgcatcatcctgggtctcgccgtcggcgcggcctccgccctgaccccggcgtacttggccgaactggcgccgaaggagcgtcgcggctcactgtccacgctgttccagctcatggtcaccttcggcattctgctggcctacgcctccaacctcggattcctgaaccacaacctcttcggcatccgcgactggcgctggatgctcggttcggcgctggtgccggccgccttgttgctgctcggcggcctgttgctgcccgaatccccgcgttatctggtgaacaagggcgacacccgcaacgccttcaaagtgcttacgctgattcgcaaggacgtggatcagacccaggtgcagattgagctggacgaaatcaaggccgtggccgcacaggacaccaagggtggtgtgcgcgaactgttccgtatcgctcgtccggcgctggtggccgccatcggtatcatgctgttccagcagctcgtgggcatcaactcggtgatctacttcctgccgcaggtgttcatcaagggcttcggcttccctgaaggcgacgcgatctgggtgtcggtgggcatcggcgtggtgaacttcgtgagcaccatcgtggccacgcttatcatggatcgtttcccgcgcaagggcatgctgatcttcggttccatcgtgatgaccgtttcgctcgcggtgctcgccgtgatgaacttcgtgggcgacgtggccgtgctggcagtgccgacgatgattctcatcgctttctatatcctcggctttgcggtctcgtggggcccgatcgcctgggtgcttatcggcgagatcttcccgctgagcgtgcgcggcatcggctcatccttcggctcggcggcgaactggctgggcaacttcatcgtctcccagttcttcctcgtgctgctcgatgcgttcggcaacaatgtgggcggcccgttcgcgattttcggcgtgttctcggccctgtccatcccgttcgtgctgcgcttggtgcccgagaccaagggcaagtcgctggaggaaatcgagaaggaaatgaccaagcgctagacaaccggcacacgattcgcacaaaagttgacaactcttaacataagagtacccaaagtggcgaaaaacgtggcagaatagggaacatggtagcaaacaatgcgggtcagcccgccaccccagcagatctgattaatgtcgatgaggttatcggcaagtactatgacctcgtccccgatcccgaagtccccgagcagcgtgtcatcttcggcacctccggtcaccgcggatcgtccctgaagacctcgttcaacgaggcccacatcatcgccatctcccaggccatcgccgaataccgcaagaaggccggcgtcaccggcccgctgtacctcggctccgacacccacgcgctgtccggcccggccaagaagaccgccatcgaggtgctcgtcgccaacggcgtgcacgtgcgcgtcgactcccgtgacgacttcgtgcccaccccggtggtctcccaggccatcctgacccacaaccgtgcggtcgacggcacccagcgcttcgagggcgagggcctcgccgacggcatcgtcgtcacgccgtcccacaacccgcccaccgacggtggctttaagtacgaccccgtcaccggcggcccggccccggccgagaccaccaacgccatcgccgctcgcgccaacgagctgctcggcgacttcaagtccatcaagcgtgtgccctacgaggaggccatcaagtccgagtacgtcgagggcttcgacttccgcgagcactacgtggacgacctggagaacgtcatcgacttcgacgtgatccgcaactccggcgtgcgtctgggcatcgatccgctcggcggcgcttccgtgaactactggccgctcatcaacgagaagtacggcctgaacatcggcgtggtgcgtcctgaggtcgacccgacctggcgcttcatgaccatcgaccacgacggcaagattcgcatggacccgtcttccccgtacgccatgaagggcctggtcgacgagctcaacgccggcgcttgggacaagtacgatctggtcggcggcaccgacccggacgccgaccgtcacggcatcgtctgcccgaactggggcgtgatgaacccgaaccactacatcgccgtgtgcgtggagtacctgttcggcggcaaccgtccgggctggcctgagggcgcagccgtgggcaagacgctggtctcctcttccctgatcgaccgcgtggccgcatcgatcaacgcgaaggtcatcgaagtgccggtgggcttcaagtggttcgtggacccgctgttcagcggcgaagtcgccttcggcggcgaggagagctccggcatgagcttcctgcgcaaggatggccgcgtgtggaccaccgataaggatggtctgatccccgacctgctggccgccgagatcactgccaagaccggcaagaacccggcccagcttcaccaggagcaggtcgagcgcttcggcgagtcttggtacaagcgcgtcgacaccccgaccacactggagcagaaggccaagttcgccaagctgaccggtgatgatgtggccgccacgcagctggctggcgaagacatcaccgccaagctgaccgaggcaccgggcaaccacgccaagatcggcggtctgaaggtcaccaccaaggacaactggttcgccgcccgcccctccggcaccgagaacatctacaaggtgtacgccgagtccttcgtctcccccgaggctctggacaaggtactcgacgaggccaccgtcgtggtcgacaaggccctgagcgagtgaaatcactgcgttagtcgcgttcaccgcaaccaataaggctctgcattggattcatgcaatccactgcagagctttttttagcgcatatgcagttcgcgaccactgaaacacgcaggtcaacggttctcctcatgcaccgtgaccgcattttctcaacatcactgcagggcaggacggccagatgaccgcgaaacgttcgcctgcctaccatcatcattgtggggtcacagcggccagataaccgccgaagcgttcggtcggcttgcatcatggtcgagttttaacatcgttgtgggacgccacgacgaatttgcccattccagagctgccatcccacaaaagcgtgggacaacagctaagtcaatcgttttacatttcccccatcccacacactcaaactggaaaccccggaaagacgccattcctgccacacccgtcacagccattacccgaggggccgtgggacgccacgcaaaaatcggcaaaacatgcgtagcgtcccacacccattggcgcaaatccacgctcaatgcaccgacaacacccccaatcgaccactatgacacatttccctccacaatcgaacactagtcattcacgaaatccatcactacgaggcatcgcaatcgaacggcatgcaatatcaagcacacaccacaacaacaggtcgtacaaatattgcctttacatcagtccgtttcgaacatcatggtcacagcaggctctgcgccaactcttcaagagacatggcaactacatgaaactcgaatacggcaccgcgcgaagcaagcgccctcgccacgttgaaagcgaattcagcacgagcgtcctcgttagcgatacttgccgccgtggcgacgaagaccagccatctccgcccgaccagcacaccccttttctcttggtcacggcgccattgagccttactcgtacgatgatgatcgccatcatattcaacagcgaccttgaactccggccacgctaagtccaacgttatgggagctccagatgcaaaagccgcatccggcaccacatagttcgcaaccggctgtggaatcccatgcgctaccagagagagtcgttcttctgattctttgggcgaatcagcaccaggtgatatcagaggcaatgctcgaacgcaggacgggcgccctctgaatcgggtaaattgctccacgaacttcaccagatcctgatagattgcagcagcatcacgatccttggccaatactggctgtttgctcgtagcagcgatgacggcatccccgagcacaatcagggactcaaaagaaacatacggggcaagttgggcccatacgtgaaacaggtccagcgcaaacacgtgttggttcatttccacattggcggctttagccgcatgtttccaaatatgcgtttgcagtggtgcatggcgtgtacgaaaccgcttgcccttaacgctggatacagtgtgcagcttggccgagtcgaggtcgcaatcggcgggaatcggtacggattgcagagcgagggaagtggtcatgccgaaaagcagcttcttgcccgcccgtttcgcttcctcggtgcagcgtgcgaccatgtcgcgtctgcgctgggcgaggctttcgctcatggtcggtgtcgctgcagaatcatgtgcaccactgttcggcgatgacgagtcgcgagaagtcgggtatttcgagtcagtagaaaatgaccccgcaaattcgggcggaacaaaaactgcctccgattcttccggaggctgatcgtatatagagcctggcagagctccatagttggtgatgccgtcggtcatcctgttcatgacaccaccatatgggtagtgggtgcggaaacggaagccgatccgaggtatgtggtcctagcttcacttacgcacattcattgtggataaccatgtggacacctcacttatacacatagtcatccacctcttcaaccccgatttgacacactaactgtatctgatatgattacagtatcataactgtacacatcatagttacagtatcgactcggtaaggaggtcgtttcatgaacggcgaccattcactggcagtgcacgcattggtctaccttgaccatcgcgccacacacctgcccagtcagatcctggccgagaacatatgtaccaatgcggcgcgcgtgcgcaaagtaatgcgaccgctcgcctcagccggactcatcgccactaaagagggtgctgaaggcgggtacgctctggcccggcccgccgccgaaatcactttgcgcgcggtagcggaagccaccggcaccacttttgtgaaagtgaactggacaccgggcgacgtacacgaggactgtctggtgtcatcttcaatgggcgcagtgatgaacgacatctatgccgggctcaaccgcacttgcctcgaacaactcgaacacaccaccatccacgacatcaccgaacagatattcagcgagcgcaaaggctaataatcccgcgcgtttcccctagccagcatcagtcgataacgcttcggcagtcaaagaagaaaacagacgccgcacggcacacaacacatcagcacaacgcactcttatcactcgaatacgtaaggaagtaaccatgtccatcagcacacccaatgccatcagcacacccagcacctcccccactatcaccaccgacgccctgatcattggattcggcaagggcggcaaaaccttggctgccaagctcagtgcagccggccgcaaggtcgtcgtcgccgaggcaagcgccgacatgtacggcggcacctgcatcaatatcggatgcttgccgtccaagtcactgattttgtccgccgaacaggcgcggcgggatggcgcgaacagtactcccgaaacccgcgaagcagcgttcgaggctgctatcaaggagaagcgccgcgtcacttcgatgctgcgcgacaagaactatcacaagctcgccgaccaagacaacatcaccgtaatcaccggccgcgctcacttcaccggccctcatagcgtggaaatcgccaccgctgagggcccggtcgccgtgaccgccagcaagatcttcatcaataccggtgccacgccgcgcattccggatattcccggtatccacactacgcccggcgtctacaccagcactggactgatggatctcgacgatatgccgcagcgactggtgattatcggttcaggattcattggacttgagtttgcctcgatgtttgccgatttcggcacggcggttaccgtgctgcagcacaatgccgagttcctgccgcgcgaggatgcggatgtggcggccgcgattcgcgcacagttggaagcgcagggcgtcaagttcctgttcaacgcggataccaaggccatcgcgcctgctgctgacggcggcgtcaggttgtccgttgcggtgaagggtatgactcgcggcgcatcgcaagcttgcgattccacccccgccggcaccgggaacgctcataccgatatcaccggtgccaccgacgccaccgacgccaccgacactacaacaaccaccagccccactagcaacccgaccgatcacgccacgatgtcacacgttcaaacgaaaccatcagacgatggcgagccgcggttcgccgagccggctgaagcccgattctgcctgaccaccgacgcggtactggtggccaccggacgtacgccgaacgtcgagggactgcatcttgaggcagctggcgtggagctcaccgaacgcggtgccgtgaaagtcgacgagcttctgcgcaccacagcagccgacatttgggctctgggcgatgtgaacggcggcccgcagcacacgtacatttcgctggatgactatcgcgtggtgtggtcgcagctcaatggttccgaccgtccgtacacggtgaaggaccgcaagcatgtgccgtcgagcacattcctcgccacgccttactcgcgcgtgggattgaatgagcgcgaggcgaaggcggctggattggattatgtggtcaagcgattgccggtggccgctgtgccgaaggcccaggtaatgcggcgaccggatggtctgatgaaggcgattgtggaacgcaatactggccgcattctgggtgcgatgctgctttccgtcgagtcgcacgaggtgatcaatatcgtcaagttggcgatggatcttgacgcgccggccagcacgttgcgcgatatggtgttcacgcatccgacgattgccgaggcactgaacgacttgttcgcgtagtttgtccgcatagcacgcccgcgcagcatgacccgcgtagcgcagcccgcaacagactcccctaatgcgcgcgaaggtcctcatcgacgtaaaccgatgaggaccttcgcgctgtcgtcatgatccgtacgtgacagcaatcacgtccgaaccagccgttacttcaagccgagcttacggtccagaatgtcggaggcatccaatcccaagcggcgtcggatgaaccagccaagaccgagcggcaggccgggagccaaggccatgccgcctgaaccgagtgccacggttttggctaggtgtgatgttattcacactcttcactacgttgttttgcctcgcactgggcaaccccacttcagcaagagattgcacaacttgcgttagggtggagaacatgactatcacagtatccacagatgggtccgcattagggaatccaaacgggccaatgggctgggcctgggccgatcatgagcagaacgccggcggcaagcccggccataagcacgacgaccatggttatgatgcgggcggcgcgaccaacggcaccaatcagattggtgagctgtgcgcagtgctggaagctttgcgagcgcacccgggccctgagccattgctcatcgaatcggattcgcagtacgccatcaattgctcgaccaagtgggtcaaaggctggaagaagaacggctggaaaaattcgcagaaaaagcctgtgaagaacaaagagcttattcaggcgatcgaccgtgagatctcacaacgccctggcccggtggatttccgatgggtcaaaggtcacgccggcaacgagggcaatgagttggtcgatgaactggcacgcacctatgcgggcgattgccgttcgggtgcgcgcgacggctatctgccgattgaaggctggcagtcgctactgggctccgaatacgcacatggcaccgatgtgcctccagacgtgcagttggtgctggatggcaaggcggatgcggcaagtttgcgcaagccggctgcggcgacggattcgacggatgccacaaggccagagaccaagtcttcgtcacccttagcgacacaatcagcgcaacctgtacaatcagcgcaccccgtacaccccgcaaagccaagcggactgacggtatccggtacgctgaccttctcccccgcgccgaaaacgagcccgtatttcaacgggcagccgatgccgatcaaaggcagcatcgaaatcgaaggctatgtggacggcgacggcaacctgaccatcgccaacgcaccattcgtacgacactaacacccaaacacacgaatatgtaccgcaatcggacacgatgacacaaaatcgctcattcgcgttaggataggagataaggcttcacgccgttgatccatgcggcggaggcaaggatggcaaaggagaaaccatggataaggcacagcaggatgcgctgaagaaggcggccggcatcgaagccgccaagctcgttgaaaacggcatgatcgcaggcctcggcactggttcgaccgtgaagttcctggtggacgagctcggccgccgtcatcaggaggaaggtcttgagttcactggcgtaaccacgtctcgccgcacgcaggtccaggctgaaagctacggcatcaagatcgtggacatcgacgacgtggaccacatcgacgtgaccattgacggcgccgacgaagtcgacaagaacttcaacggtatcaagggcggtggcgctgctctgctgtgggagaagatcgtggccaccaactccaaccagatcgtgtggattgtggacgagtccaaggttgtggacaccatcggcaagttcccgctgccggtcgaggtcattccgttcggcgctggccacgtcatcaagaagttcgaggaccgcggctacaagccggtgcttcgtcttgacgccgatggcaaggaagtgcgcaccgacgagaacaacttcgtggtggacctgcacctggagcgcatcgatcacccgcaggagctggccgaagacctcatcaacacggtcggcgtggtggagcacggcctgttcctcaacatggtcgacaaggtcatcgtcggcgacccgaacggcccgcgcgtgttgaccaacgccaacaagtgatcgtctcacatcactgaacttttccaagcccgcatctgtacatcgcaggtgcgggctttactgttgcccgaacaaggcaaaggagccaaaaagagaaaccccgcgaccataacgatcacggggtttctaatgccttgattgcaggtaagactacttacgctggtggcgggtcttacgcagcagtttgcggtgcttcttcttgctcatccgcttgcggcgcttcttgatgacagaacccatctgaagcctccatttcgattaatcgtaaaagttgcaacttgcaccataatacacgtgttgccagacagaggaaaccagtatgttgtcgatagtccgcatatgccctgaacgcagttggggcatccacatcagcaatgtggatgccccaacgttcataagtttgtgcagcagctgacagccgatactagatactacatcgggaacttctggtagaagcgatcgaccgcttccttggtgccggtagcttggaagaccacggtatcgttctgccagatggcagcggcgttcttgctgttggaggcatcggccttcaccacgtacgcgcccgtgacgttgccggaaaccttgacgttgccggatgccgactcatcgccggtctgcgcagcgaccaacgcatcgtactgggtcttggcattgtccgccgacgaccactgcgcggcgaccagcgtgacatccttggcggcatcaccagtggagtaggtcagagtgtactcctcgagcggcgacgcggaattccacgtcgtggaggcatccgccttggtacgcgcgtaattcagcacgctgtccggcatggccttcaacagctcactggcatcatccggcaaagctgtggcgtcgatggtcggcttggtcggctcggatgattcggttttctgctggctgttttgggtggtagtggaggtgccatcattcttctggatggcccaacccggccacacaaaggccgaaagcactgccaggataatcacaacagctgcggcaaccaccactgcaatcaacttgccatgggattgtgtggtcgaggagttctcactattagtcataccccgattctctcacagccgcgtgacgctagacggccgtaatcttagtcgttgtgcgcaagccgcgtgaaactcttgtgaacggtaaaaatttaccgtccgctggtgtttgggttagggtgagaccatggcgaaatcaagtgtgcagtatgtatgttccgaatgcggttggaacgggccgaagtggtacggccgttgccccgagtgtggtcagtggggcacggtcgaggaatttcacgaggctcggccggcggcaggctctcgcacgaccgctcccggccgaacatcacgcacgcagtcggttacggttgccgacaacgccagatctgcagcccgtccgattaccgaagtgggcgcggaaagcgtcgagcggctcggtaccgggttttccgaattcgaccgtgtgctcggcggtggcgtggtgccgggttcagtgacgctgatagcgggcgaaccgggtatcggcaagtcgacattgctgttgcagacggccggcaatatcgcgcgcgttgtggcgggagacagtacattccgaggagccggtcagcggtctgcccaacagtcgggccgggcgcagggcggcacatcaaacacggtgtcggtacagggcaacgcaccgtcggtacatgccaataccgtgctgtacatttccggcgaggaatcacaggcgcaggttcgtttgcgcgcttcccgcatcaacgcggtggagccgaacttgttactggcctccaccaccgatctgtccacagtattggggctgatcgaacagaacaagccggccttggccattgtggattcggcgcagaccatcgtctcgcaggaggtcgatggcatttccggcggttcgactcaggtgcgcgaagtggcaagcgcgctgatagataccgctaagacgcttgacattccggtatttctggttggtcatgtgaccaaggacggttcgattgcaggcccgcgcacattggagcatctggtcgatgtggtctgccaattcgaaggcgacagcgagaccgcgctgagaatgttgcgagcggtgaagaatcgttttggtccgaccgatgaagtcggctgtttcgacatgagcggtgagggcatcgaagaggtcaccgatcccgccggattgttcctgtctggagacggccctgatgcggccaacgcggcacccatggaaggcacctgtgtgacgttcacattggatgggcatcgcagtctgcctatcgaagtacaggctctggtcaccacgtcggtgctgcccacacctcgacgtgcggtcaatggcgtggaccccagccgtatcgccatgctggtcgcggtgctctaccgtcacagcaagctcaacctgctgtccaacgacctgtatatctccactattgccgggggccaggccaaggagcccggttccgatttggcgatagtggcggcactggcgagcgccgccacgtcaaaacccattgcgcgagccacgtgcgccattggcgagatttccctgaccggtcaggtgcgcccggtaccgcgtatggaatatcgccttcgtgaggccgcgcgccttggctttacgacggcagtcattcctccgctgcgcaagccggtgcatgtcgagggacttcggctggtggagtccaacacattgtccgacgccttagatgccttgggagtgcgtaaatagccctgagatatgcctcaggcggtaagacgcttggtctcttcgacgttgcgcttgagttcgtcaacgagttggtcgggaccatcaaacttgacctgcgggcgcaggaaaccgacgaattcaacgcgaaccttatggtcgtacagatcaatccactcatcggtgatgcaataggcctccaccacgcgttcgttgagtcctgttttctcgctgaaggtgggtttggtgccaatggagatggcggcaggccagcggttctcaccatctaccagccaaccggcatagacgccgtcgaccggaatgtagcctgcaatgtcggagccaagattggcggtggggaatccgatggtgcggccgcgctcctcaccgtgtaccacttcgccttcgatggcgtgcggagcacccagaatggcgttggcatcctggattcggccatgagccagcaggtagcgcacattggtggagctccaggcgcgcattgccttggcctggttcttcttgctccatgcgcggcgctcggccttggtggcattggccagcgggtcgacgggctctccccattcgctcggggcttccggcttgaaatcgcgcggaatgcgcacttcacccgggccacggtcatcgaccacatcaagttcgaatacaccggtggcggcggcaagattggcgatatgcttcacatcaccttctcgccccttgcccatggcggcatcctgcccgaggaccagcgtacgcatgcccagcttgccggtgagtctgccaaggaagaaaatgtatgacatggctgcgaaggccagcgtgtagtgcaccaccaacacatggtccacgccgaactgttccatgcggtgcagtcgatcatccacactggtcaaggcttcggcatccacgttctgcaccgcgggttcctcgccatggtgcgaggcggcccagccgtgcacgaatgcggggcgcgggtcaaacagaatcaccacggaaaaagcatcatgctggtgcgcgagttccaccacacgcttgatcaccgcctgatgtcccaagtgcatgccatcaaatgcgcccaatgtcaccacggccttcttgtcgttactgaacgagggccattcaatcgaaccttcggcgtcaggggtcaggtgcgtgatatccatcagtgtgctgttccttttatccgtgcgatgttattcatgcaatataggcgttgttgtgcgcggcctgtatcaagctgcacttttcaccgcgtctactttacgcgagggggaatacggtgaccggcttggcctgatgagcgttggcacgctcgataatcgccgccacatcatgcgtttgcggcacaatggcggcagtgggctcgctgattgtacgctcgatacggcggccgaagcgcaattcgctggcttcctcaggtgtgatgtcaagcgccggcatcgcgcctcgagcggcctgttccatggtgagggcatggtcaagcagccagttgcggcgctcgtcaccggcaagaccttcaggagtgttcaatacgcacttgttgcgcgtgacggtttgcccttcccgattagtgaacgtcttctgatcggtatgtgcggtgacggtatgggttcgcgtgtcaagcatcgcctcagaggcgataagtccgctggtatcgtccggcaacgcgaatcggccgactcgcgtacggcgcaaacgggtcaggtatccgccgacgccaagttcattgccgaggtcgcgggcgagcgcgcggatataggtgcccgatgaacagctgacccgcacgtcaatatcaagtgcgggaatcgttcccgtgttcgcgtcttcccgcaatggttcagcggcctgctcccctgctacgaatccgctgcggatatccagcacggtgaattcgctgatggtcaccaggcggggtttgagttccacatccttgccttcgcgagccaagtcgtaggcacgctggccgttgattttgatggcggagaacgtattgggtacttgttcgatatcgccggtgaaattggtggcgatggtgcgagtgagcaggttttgccatgaggcagttggtgacgccgttggttcgccgctctggccgccctcagtcagctgcgctgacagcgtttgccagcgggagcgggcttcatcatcgacaagcgcctcgccttcggcatcgtcggtagtggtgcgcaggccgaggcgtatggtggcctcgtaggttttgtcatgcgccacgatggcgttgagcagtcgcgtggcgtggccgaaggcgatgaccagcgtgccagtggccatggggtcaagggtgccggcgtgaccgaccttcttgatgtgcaacgcgccgcgcacggcggcgacggcgtcgaaactggtcacgccttgcggcttgtcgatgatgagtaggccgctgggtgttgtatgaagcacactactcctcgtcggactcgaactcatcgccctcggcttcggcctcgtcgtcgtgcttgtacggatcggcgtcgccggcgtactgggcggtggcgcgggcgcgggcgagttcttcgtcacgcttcttggccacggcgagaatgtcttcgatctcgtgagcctcgccgggcacttcatcgaacacgaattggagctgtggagtcaggcgcaggccagccttgtggcccaccagagaacgcaggtgacccttggcctgatcgagcgcctgctgggcgcgcttgcgttcgccttcctcgtggccttcgtggccgagctgggtccagtagaccttggcgatctgcagatcgttggtcacacgaacttcggtgacggtgatgctggcgagtcgcttgtcatgcagttcgcgctcaatggaggaggcgacgacacgctgaatcaaggccgcaatacgtgcggcgcgcgggttggttcctgccataggaatttccttttctagacttgagccccctctgacgaggggctgccgaacgcagtgaggctgggggagagaaaatcatggaactaccatgtctctcccccagtcagcctgcggctgacagcccactcgtcagagagggcttaacaatgactacttgcgctcgacttcctgcatctcgaaggtctcgatgatgtcgccgagttcaatgtcgttgaaggtgccgaggttgataccagcctcgtagccttccttgacggactgaacgtcgtccttgaagcgacgcagcgaggagatctcgaggtcgttgaccgtggccacgccgttgcgcaggatacggcacttcgtaccacgcttgacctcgccgtcctgcaccatgacgccggcgatgttgccgaacttggaggagcggaagatctcgcggatctcggagtgagaggtgacgacctcttcgtattccggcttgagcatgcccttgagggatgccacgatgtcttcgatcgcacggtagatgaccgagtagtacttgatctccacgccctcgcgctcggcgaggtccgccacctgacggttcgggcgcacgttgaagccgatgataacggccttgtcgaccgtggccaggttgacatcattctgggtgattgcaccgacgccacggtggatgacctggatgccgacctcgtcggatacctcgatcttcatcaaggaatcctcgagcgcctcgaccgaaccggacgaatcgcccttgatgacaatattgagcatgtcgatctcggactcggcgaacttcttcttgaagtcctcgagggagacgaccttgcgacgcttggccagctgggcggcacgctcggtggcctgacgcttctcggcgatctggcgagcggcacgatcatcggaggcgaccaggaagaggtcaccggcggtcggcacggaggtcaagcccagcacctgaacaggtgtggacggaccggccgcttccatcggctgaccgttctcgtcgagcatggcacgcacgcggccgtacgaagtgccggccacgatggcatcgcccacgtggagcgtaccctgctgaaccagcacggtggccacggcaccacgacccttgtcgagtcgggcttcgacggtggcaccacgggcgtccatgtcggggttggcgcggaggtccagctcagcgtcagccgtgagcagcacggcttcgagcagcttgtcgacgtgcaggttctgcttggcggagatgtcgacgaacatggtgtcgccaccatactcttcagggaccaggccgaactcggtgagctggccgcggaccttctccgggttggcaccgggcacatcgatcttgttgacggccacgacgatcggcaccttggcggcctgagcgtggttgatggcctcaacggtctggggcatcacaccatcgtcggcggcgaccacgagaatcgcgacgtcggtgagctctgcaccacgggcacgcatggcggtgaacgcctcgtggccaggggtatcgaggaaggtgatcttgcgcggttcgccttcaaggttcacggtgacctggtaggcaccgatgcgctgggtaatgccgccggcctcacgtgcgatgacgttggtcttgcggatggtatccagcagtcgtgtcttaccgtggtcgacgtggcccatgacggtgacgaccggcgggcgaggcttgagatcctcgtcatcctgcagttcttcctcgtcaaggttgatgtcgaactgctggagcagttccttgtcttcctcttctgcggagacgagctggatgttccagccgatctcttcgcccagaatctggaaggtctcctcatccaaggactgggtggcggtagccatctgacccaggtggaagagcacggtgaccagcgcggcctggttgacgttgatcttctccgccagatcggccagggaagcgccctgacgcagacggatggtctgaccgttgccgttggggatgcgaacgccgccgatggtcggtgccttcagctcctcatactcatggcgctttgccaggcggttcttacgggccttcgaggacttaccgccctgacgtccgaatgcacctgcggcaccgccgcgaccgccgcgaccgccgccacgtgcgggaccgttgctcggtgcgccgccgccctggaagttattgccgccgccttggcccccacggaagccgccgcgtgcgccgccctgaccggcaccctgggagccgccgccctgacccggacggttgtggccccactggccgggacgaggaccgccctgaccaccttggcccggacgaccgccacggaagccgcggccctgcccctggccttggccgggacggcccggacgaccgccacgaccgctatcagcagtcggacgagccatcggatgcggacgcggaatatcacccggcgtcggggtgtgcataccctgcttgcgggagaacgggttgttgcccgggcgcgggccctgagcgtgcgggcgcggaatcgcgtttgaagcggcattgccgccattggcaccggcgccgccctgagcgtgcgggcgcggagccgaagcattgtcgcggttgttctgatactgccccggctggccattgttcggacggccctggttgttacgacgatcgttgttacggcgatcgttcgggcgactctgacgaccgttctcgcggccttcgcgattatcgcgaccattctcacggttgtcgtgctgaccgtggcggccgggggtcggcatgccggggcgtgcgccgccctgcggacgcggtgtcggtgcgcccggagtcggagcctgctgatgtgccgaggcgggcgatgcctgacgtgcgggagcggccggagtcggtgcggaagatgaagtggaagccggggctgaaggtgcggccgggcggcgctgctgcacgggcttggcagcaggcttttgtacggaagatgcgggcttggaatcgcccttggcgttgtccttggcgaactctgccttcagacgccgggctaccggcggttcaatcgtagaagaagcggacttgacgaattctcccatgtccttaagcttctcaagcacggttttgctatcgacattcaaaaccttagccagttcgtatacgcgtggtttcgccactaattactcctattctgtgaccacgcgcgtgcatgggcgtggtcagttggtgatgacggcaagcctaccctgtctcatcgtgcgaccatgatcgtgttacctcgtctctggtgtgggcgatttcgcgcacactgcaccagcccacatacgccaatcaagcatactcatagcgctggatagcgcagacgcagcgagccgcgccattgctgacgcggctcgtatcaggaaataatgcgccctgaagatcattcgccttcgagcccggcggcctattcggcttccggagcagcagcctcggccgcagcctgggcggccttttcggcggcgaccttcttggcatgggcctcggcggattcgatgccgatcttccagccggtcagcttggctgccagtcgtgcgttctggccttccttgccgatggccagggatagctggtcgtcgtggatgaaggcgatggcggtcttgttcttctcgctgatcacctgtacgccggtggccacagccggggacagcgcggctgccacgaacttggccggatcgtcggagtagtcgacgatgtcgatcttctccgggccaaggttctccataacggcacgcacgcgagcgccgccggggccgatcagcgcacccttcgggttcacgccatcggtgttggccttgaccgcgatcttggtgcgggcgccggcctcacgagcgatggccatgatggacacggcaccggagaccagttccggcacttcacgctcgaacagcttgcggaccagctccgggtgggagcgggacaccacgatttccgggcccttgatgccacgggccacgttcaccacgtacacgcggatgcgttcgccgtggcggtaacgttcgccgggcacctgctcacggcgaggcagaatggcttcgacatcgcccatcgcgacatgcacgttggaggggtcggaagcatcctgttggatgatgccggtgatgagcttgcccttctgaccggagaacgcgccgaataccttctcatcttcggcgcggcggaacagctgggtgatgacctggcgtgcagtggcggcggcgagacggccgaagtcacgcggggtgtcgtcgtattcctcgcccagcttgggagcggggtgcgggtcgtcctcggtgggctcgaccgggatttcgtcggcggcccagacggtgaagttgccggaacgttcgtcaagctccacacgcgcgtgcctggcggcgtgcggggtcttgaggtaggcgaggcgcagggcctctgccagcgcatcatccagggttccggggtcgattccttgctcggcggcgagcttgtgtattcctgtcaggtccagttccatcgatccgtacctcctatgaagttatgtggcgcatggcctatgagtggtcacagttagctattagtgtaggtttccatgcagacacgcttctcttcaggacggtttacccggcgcttggcatccgcactatgcgcgagcgcgatgctgtgttcgctttcggcgtgttcgatgccgcgactggccggacgggccgaggcggaagctcaaatgagcccttgcgagaaagcgatgacgttggcggactacgccacccatccggctgaaggcacgccgttattagagcagtatgccaccggcctggccgctcccctgacttggattgacgttgccgggtattgttcgggtcgttttgccgagggaacgttacgtgacgcgcagaccaagcaatggctggcttttctggccgataaattcgggcagtccgcgcctgaggtgacgccggcgcgtcttgatggcgtcacgtccgccaacgttgaccgaccggtattggatgcgatggccgtggccgaggatcgcgccggattcgctatcgaggtcttggccgcacgaggacagaccgctggggctacgttggcgttgagcgatatgcataagaccgccgggcagcagctggtgtcgctggcgaacggcaattttgatgattccggcgcacagtccagttcttccggccagagcgacccccgccaaaaggtctatgccatcgaccaactactggccaaccccaccaccatcgccgacaaggcaagcggccagaccgtaccgaccgccgccgccatcgaaatggactgcgcccgcgcgcagatcaaggccgtgaccgaatcgaaatcttccaccgagagcgatacgctgctcatcctcgccgcactggccgccaagcacgcctacaccgcgttccaacttggctacccagcgactgacgccgcattgttcgagtagacacacactcctcacgaagccgatgcgaacttgttggaggctagtgggcaagtcgagttgaggcacgttccaccaatgtgaaatcggtggtgtacgtacgggccgggcctgagtatccttcgatgcggtcgataagtatgtcaacggcatgcttggcataatcgtcgtcggtacattggatatcttgcagttcgatgaggagcgggaatcaggagccgaataatgacgatgccggtggccccgacgggaaagaggaggaaaaccgtcggaaccaccggcatacgggtgctcagagcctatcgttcaacgttcacgacaccgaatcgggactcatcggcgcgatcacgccacccgttcccatacggaccataaatcgtcctgatgttgactccgacaggcaatgccgggcattcgttttcgccgttcgtaccccagttgacccagccggattgaggcctctgcacgatctggaacgccgaggacgcctccgaggtgatccagatcatgcaccggttggtattggtgtcgtattcggcgctgcaggcagacggcccggggaagatggtctcctcctcctgtgccgacacatcgaccgccccctcggggaactgccaaggacgggaggtctcatcagctgcgcggtgggcaagcgcccgcacatgcccgagcctctcatcgagccccttgggggtaagggcattttcccatcgcgagaacaaacgccagtagagatcccagtgagcgttctccagatccctgtcaagcagagtggagaaataggcgaaccttgatgtcgtttccgtccgctccgatagcacgttccgcacttcatccttgaggaagccggcgtaggggtcccctccgcggaaaggaacaggctggtaggtgtcgaatcggttgaagacaaggtttccttcgccgctttcgaactcgtcaccgaccgtgatacggttcacgacgcttctgccatcgacctccgtcacaaacgaatccacatggtagacacgatcgaagaaatcgacgttccagtagaacgtgaactcgatggagaaggtcttgccctgcagttcaggtcgaagaccatcagggatgcgcccctcaagcaggtaacggcgcatgacggggccgaactcgataagacggacatcggcgatggcatgttcgggcgggttgatcagaccgttttccggagtgaagaaagggccgtagaacccgccaatggcgttgttcccgctcttgagcagatcgaatccctcgtccttggtgaggaaatggcggatgccccatttggaggcgccctcgcccttgccggtgccacgacatagttcaatgtcgaaatatcccgtatcaaggtggcagaccgcatcgctttcgagcgtgttgtcgtcggcgacgatgcctccttcaaacgtctcccccgggtccgggtcatgtagggacaggacctctccgtcatgcggcaccagaatgccgatgaacgtcgtcgaggaaccgtcggaatcccccagcaccttctggaacggcgaagactgtcccaaatcggtggtaccgagaatcagatcggcctcaactttttccggcacggtcaccgtgaccggctgtggctttgtaggatggtggtggctattggtgatggtgaatcgtggatattcgtgcgtcattgtcgttctcctgtttcagttcgcagccttggcttgtgtggcacctatgcctttgaggaacccgaacgagaacgagttctccttgagaccatcgatgagcacggcgatgatgatgacgatgcccttgacaagctgctgggtgaagaacgggacattcatgagcacgaggccggtggtgagcacgccgaagatgatggcaccgatcagagtgcccgggatcttgcccttgccgcccatcagggaggtaccgcccaggacggccgctgcgatggcatccatctcataaccgtcgccggcagtcggctgcgcggagaccacacgcgccgcgaagatgcagccggcgagaccggcgcacagtcctgcaatcacatagacggatagcagtacgcccttgacattgatgccggcaagccttgcggcttcggcattgccgcccacggcgtagacatgcgagccatacttggttttgtcgagaacgatccacatgactacataaacgattatcatcacgatgaacggaatcggcacatggaacaggtatccgttgccgagggcgcggaagttcaaaccgttgtctacgatcggcagaccgccggtgatggtgtatgccaatcctcgcatgaaggtcatggtgccgagggtgacgatgaacgcggcgagattgcagtaggcgatcaggaatccgttgatcaagccgatgagcgcaccgatcaccatgccgagaaggatggcgagcagggggttgagcccctgctgggcggccagaacggcgatgcaaccgctgacggcgatggtcgaaccaacggacagatcgatgccggtggtaatgatgacgaatgtcatgcccgcggcaagaatcgcgctgatggagatggacctcgccacgttgaacaggttgctcaccgtgccgaagttcggggccttgatcagcatgaatacgaccagcaccagcaatacgaacggcatgccgaccttctcccaggtcgccgccaggttcatctttttcttttctttcattggaagctcctctttatcgttgcgctccgtcgcgcgtttcggaatcctcggattgcgccttcagcacgcccgttgcgtaccccatgactttctcctcggtagcttcatcctcggggatacaggcagcgatgcccccctgcctgacaacgaggattctgtcgctgatgcccagcacctcgggcagatcggaggagattacgagaatcgccttgccttgcgctgcctgggaactgatcagctcgtagatctcctgcttcgcgccaacgtcgacgccacgggtcggctcgtcaagaatcagcacgtcggagttcttcatcatccatcgggcgaacacggccttctgttggttgccgccggacaggttgatgatggaagtggtcaacagacgttgcgcgatgttgaccagtttcatcgattcctgcacatccttgcggatgcggtgcttctgaagcagacccagcctctcgtattcgcccagcgaagagacggagatgttgtcttcgacgcttctgacagggaagatgctctgcgttttcctgctttcgggaagatacgcgaccccatgaccgatggcggccttcggggatttgaacgacaccgccttgccacggagccggatctcaccggaatcatgcttgtctgctccgatgatcgctctggcgatttcggttctgccggcgcccaccagcccggacatgcccagcacctcgcccgcatgcacggtgaaggataccggcggagagtccggcgaaagcctgagattcttgatctcgagcacgccctcccccggatgacgcttgccatggtcgtaaagtttctcgactttgcgtcccaccatcttggcgacgatgtcattctggtcggcatgctcgatgtcggtggtcatcaccgtatgcccgtccctgagcacggtgattctgtcggcgagccgccacacctcctccatgcggtgggagatgtaaatcaggcccgtgcccttctcccgcagcatgttcaccagcgtgaagaggtgctccgattcggctcgggacagcgatgccgtgggttcgtcgaggatgaggatcctcgcgtcctgcgcgatggccttggcgatttcgaccatctgctgctcaccggtgcccagatcaccgaggaatgtgtccgggtcgatgtccgccttgatgacatcgagtttacgtacggcgtcctcccgcatgcgcttcttgtccagcagccccgacttctgcaacggttcgttgccgagtgcgaggttctgcgccaccgtcatggtgggcaccacattgagttcctgatggatgatggcgatgccgaggtcgtcggcctgcttcggcgtggagacgtctacctctttgccatcaatgagaatgcgtccggagtcccttttcagattgcccgaaaggatgttcatcatcgtcgattttccggcaccgttctcacccatgagggcaagcacctcatgttcataaaggtttaggttaatgttgtcgagtacgaccactccggaaaagctcttgacaatgttctcgagctgcaataggggcagcaactgaggcatgctcaccatcccttgtaatcgttgacgttctcacgagtgaccatgacactcggaatgagaatcgtggacttcttgggggtatcgcccttggcgaccttctgggcgtaggcgacggcctgcttgaccatctcgccggggttctgcgtggaggtccccacgaacggggagccggcgcgcttcagctcgtcgacgccttcgggacttccgtcgatgccggtcacgatgatttcatcggtcctgccggcctgctcgacggcgagcgcggcgcccagagcggacggatcgttcataccgaagatgccctgcacgtccttattggcggtgagcatgtcggtggtcacggacaggccggtggcacgatcgttcttggaggattgctgtccgacgaccttgatgtcgggatagtccttctccagggccgccttgcaacccttgatacggtcggtgatggtctggatcggggttccgtccacgataaggatgttgcccttgccgccgagctgctcggccaggtaagagcacgacagttcacccgcctgcacgccatcggtcgttacgaccgcatcagcgcccttcgcaggagtgtccacggcgaccacgatgatgccggcggccttggcacgctcgattgcgggcttcaaaccactctcatcgacggcggagacgatgatcagatcgaccttctgctgaatgaacgaggagatctggttgtcctgggtggccaaatcgagctgggcgtcctggacattgagcgttgcaccgatcttcttggcttgagccttggcttctttgtccatggcggtgaagaacgggttggacatatcctgcaccatcaggccgatgctcttgatttccgtgggcttggagacctcggcggcatcgttgtcgccattactcaccgcgctgcagccggacagcagcagcgacgctgcgagcagggtggaagcggcggaagcgatcttcttgatgttcatggttgttttctccattggaaatagctgtcttgcgttcggatgcggcctattgcccaccgcatccgcatgactccctgatcttcagggatgtctcgatcatgtcgtggatgggattcggcctcatcgtcgccccatccgggtttttattcacctcctcctttccttccatctgtccaagcaggtagttcgccgccttggcaccgatgaatcggctgtcttcggcgacaagtgttatcttcggcgataccaggtccgaccaggcgaagtcatcgaacgcgaccagcgccatatccccgggaatgtcgacggatttccgattaagagccgacatgacgcccaacaggatgggattgttgccggcgatgatcacatccggataataatcgttctggtcaagaaaacggatgacttcggtgcacgcttccacatcgttgttaccgcattccagcacgcgaatctccgccccacactcctcggcggcggccctcaggccgctctcgcgagcgaacctgctgttccaggtgtccggatagatggcaagcagccaacgatggaaatgatggagtttcagatgacgcccaagcttggcggcggcatccacgttgtcggtggctacatacgagaaaccatcttttatttcctcatcatcaccgtatccgggagtggaatcgacgaatacgacgggaatgttccagttcttcagctggttcctgctgtattcgctgagtcccaaggtggagatgatgccgccaggacggttctccacgacctgacgcaacagatacgcctcgttctccttgctgtaccggccgttgacggccatatcggcaatgaacaggctctccttcttgtcctgcaggacgctctcgatgccgtcgatcagatcgagataataggagttcgacattcccgcggtgagcagggtgatgaaccggtgcgtgcccgtgcgcaggtcacgcgcattgacgttggggatgtagcccacctcgttggctgtttcgcgcaccgatgcacgggtgctctcggatacaccgctgagaccgttaagagcgcgagaaaccgtataaacggacagtcccatccgctttgcgatatcggtgatagtaacgtcgtgtcgtttcatcattgaagtcctaaacgtttatgttctgatgtattcataatacacacgacccaagacgttgtcaacacaggacatgcagacggactcaaaacgagtttattccaatggttcacaatgaactcggacggatatcccgaatccgtcacttgcctcattctgtctcattccgatgaggcacgaggtatcaggcatacccggacacttcgtatcccatcgggatgaggtgtcgattacaatcgacatccaccggcacggtcccgatatgccggacgcatatccgcgacagtcagatggcccctcacgccgtcacgtactccacgtgcgcgaattcgggcactttgtaccacttgaccgggtagccggcgccgtaggcgcagaacacagaatcggacgtgttctccagattggcttccggatcgtacgcggcctcctcgatcacgcgccgttcgtcgtggcagggccggtagccgccgaacgaggcggagaagcgcccacggccgtgcgtatacgcgttcacgtccatcgcgtagtcgcgcatctcgctcaccggtgccccgcctgcgatgacggcgtattcgccgtcgtccgtaggcgggtcgaacgtgccggacattcgttgcacgtcggtcatggcgtgaacgacatgcaccaaaggctcgtcaaggcgcggcgcatgatccgcaggcgcatccgggagggccaaccgttcatgttcctcgacgaggggctcgcggcagccggcccagtgccgtccacgaacaacctcgtcgaatcatggaacgcgcgcctgcgcgacatgccgcgccgccaccgcggactgcggctggtcagacggctgaaggcgatctgctggtggtgccaccagcacacggaacggcccgaaagcgacgcgtggctcgcggccaacgcgatgaccgacgaacgactcgagcgcctctaccggcgggcatgggagagaagcccgcagagcatgcacgagacgttcggcattcccatgagacacggcaccggcatcgactggaacgagttccacaccagggtcgaatggcagtcgaacgactagaccgccggacatacattttggcctataaccccgaatacggacgttcgcatcaaaaacaaaaagggttccgggacaaaccccggaaccctaaaggcggataaggcgagattcgaactcgcggaggctttcacctcacacgctttcgaggcgtgctccttagaccgctcggacacttatccatgctgccaaaatggcaacttgttcattatgccacattctgccgacctggcaaatcggagtttcgctgagcaagtctcgagtgtatgccgcttgagacatgtcagatcacaatcccggaattcgcccgaagcgctggcattgcgtttacgcgccaagcactccgacaggaattacatacactccatcatcgcgttgatacgcgaactcgccgacccccaccaacaccgccaagaactccggttcacgggttcgcgcactcggatttctcagcagcttatctttcagtctgcatagatttgccgatgcctcagggactttatcctcactggacttaatttcgatgccgccccaccgtccatcggacaattcaataatggcatcacactccagaccggaatcgtcacgataataccgaaccggttctatcccaatatcgaggagagatctcgcatacaccaacagatcacggatgcatagattctcaaacagaaacccaaaagtctgccaatcgccgataagagcggcaggactcatgcccaacattgcggccgcaatggaaggatcggcaaaataccgacgcgccttggtctggagtcgctttggatcccgtgccggcgggacccagccctttatcggatcgatgacgaacatgttctcgaacatggccgtatacccggataccgttctctccgaaatgaaatcgtcaaggttttcttcagtaccgtacatatccttacgtaaggttttgaatgtcacagcttgactgatattgcgcgcaagcgaatccagcagacgacgagccacatcaggatccttgccttgcctgggcacactctcagtcagcgtgagtcgcatgtattcccgaatcagaatctgtgcgtcagatacaggcagagccaccgcctccggccatccacctcggcatacggcatccaacaacatttgtgtacttatctctgattttgcagcggcgaacttatgttcaaacagtccactgagacttaccgcacctgtcgagagtccggactcatataaagtcagaggattcatacggatacgtccgattcgtcccgcaccactatggttcggccgattctcattgagaggagtggatgaaccggtcagaatccactgacctttattcgcggaatcatcgtcgacgcgatgacggacttcatcccatatagctggagcgagttgccactcatccacgatatgaggcctatctcccagcagcatcaatgacggatccgccttagccgcagccaaattgttattgcgatccacataggtaatgctggctgcatgggcccgcgcagaccaagttttcccgcaccacttggtgccggtaatctccaccgcgccaaagatgcgcatatatcgttcgatctgtgcatccacgatacgagggcgataggctttcggcttgatgtcgctcgccagagaatcggccattccgcgcacctcccgttatttcacgtccgccatcgcaataatccgaatgtctcaactaccaaaatccgaatgttgcaacgacgaaaatccgaatattggtggtggtagaagcggtgacggggccactctgcattgagcggtctctctcagtctcgctacgctcgacagctcgaacgcaatttaaggacagctttccagctgccattttatttgctcactgtcattcgccttcgcctaaaaacgcctccggagttttcttcacggctcagctcatcagagggagcttggatctcgtcctttacgccacctgttcgtggacggaggcattgacccattgggtctgctggacgttgtagccggagaagatgccgatgtcgagcatgcagtcgcggtaatcgcggccgtgggcgatggtgatgtagctgtcgtccaccaatcggttatgcgtgggatccagtccgacccatcggccatcctgatacacctcgacccaagcgtgggtcgcgccctctcccccaagcaaaccggcaatgtagcgcgcggtcaatcccacatgccggcacacggacagcattacatgggcataatcctggcatacgcccttgcgctgggccaaggcctgttcggcggtggtgcgaatcgtggtggaaccgggcgtatacacaaacgccttgtagacctcatccatcacttcggcggcctgctgcaccggagtggcgtcggcaggcaacgcagccaagcgttcgcggcatacgtcgatcatcgcctccacgttcgggccgggaatggtgagcgctgaattgaatcggtacagcggtttataggcttccttatggatatgcgcattgtccacgaaggcgatgccggtcaccgaatagctgaatatgtcgtgcggctcggggatgaatccggtcatcaccacggagccaaaggagtcgatggtggtttcgagttcggtttcgggctgaatcttcacttccacgtcaatcacctgttggcgagggccagtggcgggaatacagcgaagctggaacctgtgatcggtgaccggtgcgctgaaggacagcttcatctcatagtcgaacacgagttttttcacaacgtctcctgcacttacacacgagccggcaaccggcacattctcgggataacgacactacagccatggctgaggtatggtccgcgcgctcacagtccacgcatatattccggcaattcgccgatacgcatcggccggcactcgggcgcacggtttttcgccataccaccatagcatttgagcccgtcagggcgaacgtcgggttaggggcgcttggcatccatgttcatggagctcagtgagcccatgtctttgatggccagggcgctgacacggccggaataatcgtcaaggtacttcttcagcaggtcggcgacttcctgatacccgcgagacggcagctgaccgaccagccagctcagcccatcggcgaagcaactaggcaacggcatgccgtcgaggatcatcgagtaggaggcgagcttcctaagcggggcttccatctcctccatcgtcaggccgaagcgcgtgtacaggtcgatgcgctcaagatacttgccgatgaagatgaacgccttcagcgtggggtcgaccggcgaattctcgatgccgccccagaaggcgagcatgtcatcggtaatatcgcgctgcttgtagatgtcctcggcgtcggccgcgtatttggcggcatcggtgatattggtcatcgccaactccacgtactgcaacagacgcgagctcaattccgggcgcagaatcacggcgttgttgaatgcggaggttacggccgaccgcaccgaatcagggttggacccgtcgtacaggaagctgttcacgaacccgtcgaagtcctcgaaatcttcgggcaggtcgagtgcgtgagcgaacggacggaaggcgtccacatcggtgtccatcacacgatcgtagaacgggaagaactggttcagcgtggtgaaggcgcgctcggtgtaccgacccagccaatacaggttgtctgccttggaggcggtgaccagagacaacgagtggcggcgggactggctcagcaagttcgccacctgcacttcagcaccgtattcatgctccacgccggattcgggtgccaacacccacgtatccttgaatccgccaccctgcgacgagttgacgatcatctggccgggcaccgacgagtatcgagtcaagcccgaataccacacgtgcgtgtttttgccggtgaccacaaaggcacgcaaatcgcatttgcgcggcgacatctcaccggtcttcgggtccaccacatcgatatcgcggaactgaatcacctcttgggcgatgaatcgacgaggctcctccttgatccggttggcaagctcctcacgtgcggcagcatccagcgacgaaccgaacaccacgccgtaaccaccggcttcggccacatccttgatgaccagctcgcccatacgattcaggacttccttacggtcggcctcgaacatcggcatatacgtgggcgcgttgttgagaatcggttcctcgccgagatagtacttgatcatctgcggcacgaagtagtagatggccttgtcatcggccgcgccgttgcccggcgcgttgacgatggccacgttgcccgcgcggtaggcggacaggataccgggcacaccgatcaccgaatcaggattgaaggcaaacggatcgaggaattcgtcggacagacggcggtagaccacgcccacacggtggcgtttgccggcgtagtcgaggaagtagaccttgttgtccaccacttcgaggtcttcggggaaggccagtgcggcgccggttttctccgccagataggcgtgctcgaagaacgcggaattgtagcggccgggggtcagtaccacggcgatgccctcagtggacacaaagtccatggccttgcgcagtaggcgcgggtattcgcgattgtcgcggatgtgcacgtcgcggaacaggcgcggggagatgcggcgctcgatgtcgcgcacgaacagcgggtagctggcgcccgaggggatgcgcaggttgtcttccagcacccaccagcggccatcttcaccctggaccaggtcttcgccggcgatgtgcgcgaagatgccgccgggaggggtcacgccgttgacctgcgggaagtagccggccgaggtgtatacgtattcctccggcacgacgccgtcatggatgatggccttgtcggagtagatgtccttcagataggcgttcagggcgttgacgcgctgcttcaggcccttctccaattcgtcgtattcgtcggattcgataatgcgcggcacgggatcgtacgggaagagccggtcatggtattcgccgttcttgtagatgccgaagcgtacgccgttgcgggacagctcgcggttgatcgcctcgcgacggtttaccagttcatgggccagtctgcgtgctgcggattcgatcatcgtgtctgctccttgctgtggcggcttctgtggcctcaagcggttaggcgtttcgagcgcacgctgacgccgcaagccgtaaccgggtttgatggttacaacctaaggcggccccgtttcagcaaacgcgcgagaatgttacaggcaggtcacttcgccgaccgcactcgtctcgccgaccgcgcgcatctcgccgaccgcactcgttacaatgaatggctatgacacgactgcgcattgacttggcctacgacggcggcggattctatggctgggccaaacagcccaatctgcgtacggtgcaaggcaccattgaagatgcgctgcacaaggtgctgcgggtgccggccgatgatgcggccgaaccgttgcgtctgacggtggctgggcgcaccgacaccggtgtgcacgcctcccaccaagtggcgcatttggatgtatccgatgaggtactgaatcgctgcgtaggtcacatgaccattccggtcaccgaggcgctgactcgcagactcaaggctgtgctgccttcggacatcgtcattcatggcattgccgtggcaccggccggtttcgatgccaggttctccgcattggagcgcacttatgtgtatcgggtcgccgatcgttcgtccgagatcgacccgcgactgcgtggatgcgtgcttaccgtggatgaatcgctggatctggagcttatgaaccgcgcagcctcattgaccatcggcctgcacgattttggttccttcgccactccgaatccgggaggcactacgatccgcgaagtcaagaccgcctattggcggcgggtgccgatcactcccctggtgccggatgcgatggcatcgcatgaagcatatcggactccgtcgctggagtccggactggcggtgttcacgattgtggcggacgcctttgcccgcaatatggtgcgctccttggtcggctcatgcatcaaagttggttcgggacgcaaatctctggaatggtttgccggcaaaatggccgagccagtgcgtgaaggctcaagcgggccgattgcgccgcagggcctgactttggagcatatcgcataccccgtcgatgatcagctggccgcaagagccgaggccattcgagccgtacgtacgttgtagtttctatgaaacaacgcaaaagggctggaacccaaacggattccagccctttcagctagcttggcgaaacgctattcagctcactcggccttctcggcgtcagcggcttcctcagcgggagcctcagcctcagcggcggcggtctcctcgaccggagcctcagcggcctcagcctcaacggccggagcctcttcttcggcaaccttggcggcggcttcagcttccttcacaacagccttcttggcaaccggctcggtgacgagctcgatcacagcggccggagcggcatcgccaacgcgcggggcgatcttgacgatacgggtgtagccaccttcacgctgctccatctgctcggcaatctgggtgaacagaatgtgcaccacggacttgttgcggatgacgcgcatcacgcgacgacgggagtgcagatcaccgcgcttggcgaaggtgatcaggcgctcggccagcggacgaaggcgcttggccttcggcagcgtggtggtgatgcggccgttctggaacaggctggtcgccatgtttgccagcatgaggcgctcgtgtgcggggctggaagccagacgcgggcccttcttgggtgtaggcattgggtttactccttatatgtccgttcttcaggcaagcaggtgggcatatgcccgaacatccgcttgcctagtgaacgaacgattggtcaaagaggcagatcactcgtcttccggcgagaagaacgtaccaccttcgagattattggtatcgaaggccatcggcgaggacttgaggctcaggcccagggtctgcagcttctccttgacctcatcgattgacttcataccgaaattgcggatgtcgagcaggtcctgctcggtgtgggagacaagctcaccgatggtgtggatgccctcgcgcttgaggcagttgtaagaacgctgcgtcaggttgaggtcctcgatcggaacggccatctcggggttggtctcctcggccaccggggccggaccgacctcgacgccttcagcctgggcgttgagctcacggcacaggccgaagagctccaccaaggtggaaccggcggaagccaccgcgtcacgcggggagatggcgggcttggtctccacgtccagaatgagcttgtcgaagtccgtgcgctgttccacacgggtggcctcgaccttgtagctcaccttgagtaccggggagtagatggaatcaaccggaatacggccgatctcatcgttgtcctgcttgttcatctgggcaggaacatagccacggccacgctcgacagtgaactcgatctcgagttcgccatcgtcggcgagggtagcgatgtgctgctccgggttggcaatagtgacgccggcaggcggggtgatgtccccagccacggcttcgcccttgccgctcttgcgcagatacatgaccacaggctcgtcatattcgctggtgagcacgatgcccttgatgttcagcaggatctcggtgacgtcttcctggacgcccggcagagtggtgaactcatgcagggcaccggaaatacgcacggaggtcacggcagcacccgggatggagctcagcagcgtgcgacgcagcgagttgccgagcgtgtagccgaagccaggctcgagcggctcgatggtgaagcgggagcgctgcggattcagagattcctcggtaagagtcggacgctgtgcaataagcactgtggttatcctttcagcttgaactcggtggtgcactcaccggtcaggcggttttggatggatttggtattgctgagtgctcagacgcgacgacgcttcggaggacgaacgccgttgtgggcttgcggtgtgacgtcggtgatggaaccaacctcgaggcccgcagactgcagggaacggatggcggtctcacgaccggaacccgggcccttgacgaacacgtcgaccttcttgacgccgtgttccatcgccttgcgggcggcggactcggcagccataccagcggcgtacggcgtggacttacgggagcccttgaagccgacatcaccaccggacgcccaggacaccacggcaccggacggatcggtgatcgaaatgatcgtgttgttgaaagtggacttgatgtgagcctggccgaccgggaccgacttgcggtcgcgacgacggggcttacgagcggcttgcttaggcgctgccaatgaccctcgtttcctagtaacgaactttgttgttgacgttcgggcgatgggatgaaatcatcccgtggcccgaatcatgccaccgactacttggtggccttcttctttccggcgaccgtgcgcttcgggcccttgcgggtgcgagcattggtcttggtgcgctgaccgcgcacaggaagtcccttacggtgacgctggccttggtagcagttaatctgaatcttgcgacgaatatctgcatcgacttcacgacgcaggtcaccctcgatcttgtagttggcttcgaggtagtcacgcagcgtaatcagctgctcgtcggtgagatccttgacgcggatgtccgggctgataccggtcgcggcaagcgtttccttggcacgagtgcgacccacaccgaaaatgtaggtgagggcgatctcgatgcgcttctcattggggatgtcgactccggcaagacgtgccattgcgattccttcttgttgccgtaggtcttgcacccgctcgcccggttacccggcacgggcctacgtacccgtggttcagtgtcgttcccttgcgggaagcactgtgagagagtgccttatttacttagtgccgctggagaatctgctctcagccctgacgctgcttgtggcgcgggttgacgccgatcaccatgacgcggccgtgacggcggatcacgcggcagttttcgcagatcctcttcacgctagggctgaccttcatggttatccttttcttgtgtacctttacttgtaacggtacgtaatgcgtccgcggttcaggtcgtaagggctcatttcgagcacgacacgatcctgcggcagaatacgaatgtagttcttacgcattttgccggaaatcgtggcgagcacgatgtgcttgttctcgagttcaacgcggaacatcgcgttaggcagtgcttccactacctgtccttcgacttcaatcacaccgtcttttgccatgtgcctctagtcctattccgttggatgattactatggcatatccgaagacacaccaactgtcaactatatacgcacatacccctgtacgaacactcggcgtgtcgcacaggggtatggaaacgttgatgtggtatttcggcatcactccggcttgttggccgggctgccgaacctactactcgaggtggctgatgatacggccgctgatctcgtcgatgtcgccgacgccgttgaccacgacgagcaggccacgggattcgtagatgtcgagcagcggagcggtttccttctcgtaggtctccaggcgcttggcgatggcctccggagtgtcgtcagcgcggccctgctcggcggcgcgcttcttcatacgctccagcagcacgtcacgggcggcttcgagggccaccacgtggtcgagcggagtgtcgaggtcggcgagcatctcgtcgagagcggtgacctgggcggcgttacgcgggtagccatcgaggatccagccgttattgcagtcttccttggccagacgatccttgacgatcttgttggtcagggagtcaggaaccagctcgcccttgtcggtgtagctcatcgcctcaagaccgagttcggtcttgttcttgatgttgtagcggaagatgtcgccggtggagatggtggggatgttgaagtgctcggcgagcagagcagcctgggtgcccttgcccacgccctgggggcccatgatgagcagacgcatggtggtctccttttgtgtcggttattaatacggttttggctcccttggttaggggagccattgagttatatgtggaagaaagattgctccgtcgtggaacagtccactggactgttccactcctcgcgcggccgcctgcccattgcgggcgaccgctgccaagcgggcgtcagccttctttgtggtccacgttttcgaacaggaagccggtgtactggaactgttcggtctgggccttggcctgacgcagggtgtcgaggcccacgcccgcgatgatcaggatcgtggtgccaccgaacggcagcttggcgttgagtccgagagccatgatcagcacggtcgggatcagggccacgaacagcaggtagacggcacccacggtgttgagtcggttcatcacgtaggtcaggtaacggctggtggcgttgccggcgcggatgccgggaatgaagccgccgtactgcttcatgttgtccgcggtctcgtccgggttgaacgtgatcgaggtgtagaagaagcagaagaacacgatcatcagtgcgtacagggcgatgtaccacacggatgtggtgttcgccaggttggcgttgatccacttgacccaggactggtcggacttgccgaactgggcgatcagggtcgggatggcgaggatcgaggaggcgaagatcggcgggatgacgccggacatgttgatcttcagcggcaggtaggtggaggagccgccgtacatcttacggccgatcatgcggcgcgtgtactgcaccgggacgcggcgctggcacagttcgacgaagtcgacgaagatgaggatgaccacgagcacgcccacgacgatgccgaacttggtccagtcgccgttcttgccgttggtgccgtagccgatctcccacagctgcggcaggaagccggagcagatggacatgaagatcaagatggacatgccctggccgatgcccttgtcggtcacgagctcggccatccacatgatcaggccggtgccgccggtcatgatgaggaccatgaccacgaggttccacacggagccgtccgggatgacctggtcgcagcggtagttgaacagggcaccggagcgggcggtgaccaggatggtggtggactgcagcacggccaggccgatggtcaggtaacgcgtgtactgggtgagcttggcctctccggactggccctccttatgcagggcctcgaagcgcgggatgaccacgcgcagcagctgcaccacgatggacgcggtgatgtacggcatgacgcccagcgcgaagatagacagctggagcatagcgccaccggagaagaggttcaccagtccgatgaagttctcctgggaggcgctgccgatagtggccatgcacttgttcaccacgttgtagtccacgccaggggtcggaatgaacgaaccgatgcggtagacgatgatgatgaacaggacgaagagaatcttcttcctcaactctttggtcttcagggcctggattagtgtcctcacctagatttcctcccaatagcgcgccaatcacgcgaaatacacaaactaacgaatgagcatagtctacagtgcctacttcggccacttcatgtctcgcgaatgttacctgaattatgctccgccgtactgaacgggggaagcatactcaaaacgatcattgtgttgagactgcttctctgcgctcagaacaacagtttttgagaaaagggaacccccgtccacctattggcgggcgggggttgtacagcctattgcgctccccgtaggactaatcagtcctcggaaacggaaccgccggcggcctcgatcttggacttggcggaagccgaagccttaacacccttgagggtgaaagccacggtggtctcgccgtcgcccagaaccttcaccggagcattgtcacgaacagcgcccttggcgatcaggtcggccacagcaacctcgccaccctcggggaagagctccacgagacgagcgatgttgatgacctggaactcgaccttgaacgggttcttgaagccacgaagcttcggcaggcgcatgtacagcggcagctggccgccttcaaagcccggacgcacgtggttacgcttcgtctggcccttggcgccacgaccggaggtcttacccttggagccttcaccgcggcccacacgggtgcggtccttcttggcgcccggggcgggcttcaggtcgtgcatctgcaggatttcgttatctgccataatcagtcaacctcctcaacggtgaccaggtgacgcacggcgttcaccagaccacggttggccggggtgtcctcgcggacaacggtcttaccgatcttgttgaggccgagggtcttgacggtggcgcgctgagccggggtacggttcacgatgccgtggtgcagggtaatcttcaggttcttagccatgagtatcactcaccatccttctcttcggcggccttagcggcagcagcctcttcgcgagccttgcgagcctcggcaatgccggcggcacgggcgcgcagcagagcatcgggagcaacctcgtcgagcgccaggccacgacgggcggcgatctcctcgggctcttcgagctgcttgagggcgtcgacggtagcgcgcaccacattaacggcggtggcggagcccatcgacttggtcaggacgtcggtgatgcctgcgcattccatgacggcgcgcacggagccaccggcgattacaccggtacccggggcggccggacgcagcaggacggtgccagcagcgtcgtgaccctgaaccgggtgggtgatggtgccgcggacgcgaggcacagagaacatgtgcttcttggcgtccagctggcccttggcgatggcggccgggacttcacgggacttgccgtagccgacacccacggtgccgttgccgtcgccgaccacaaccagtgcagcgaagctgaaggtacggccacccttgtgggtcttggacacacggttgatggtcaccacgcgatcgagcagctcgtcgccgtggttttcttcacgacggttacgacgctcgccgcgacggccttcaccgcgctggccacgacgacccttgcggtcctcgttgttggattcggtcgccacagtgttctgagtttcttcagccacttgggtttccttcgtttcgttgtcgctcacagtgcaagacctccctcgcgggcgccatcagcaacggctgcgacgcgaccggtgtacttgttgccaccgcggtcgaacacgactgcggtgatgccggcagccttggccttctcggcgatcagctcgccgaccttcttggcggcctcagtcttggtgccttcgaaaccggcgaagtcggcctgaagggtggaggcggacaccaaggtaatacccttggtatcgtcgaccacctgagcaaccatgtgacggttggagcgggtgaccaccaggcgcggacgctcgggggtaccggagatgcgcttgcggatacgcgcgtgacggcgcttgagagctaccttcttgccttttccgagaatagcaacgctcatatcacttaccagcctttccagccttgcgcaggatgcgttcatcggcatacttgatgcccttgcccttgtagggttccggagcgcgcagcttgcggatgttggcggcaacctggcccacgacctgcttgtcggtgccttcgacaaccacgtggttggcgtcggtcaccttcagggtgatgccttcgggcgggttgacggtgatggtgtgggagtagccgaggaagaactcgatgcccttgcccttggcgacggcgcggtaaccggtgccgacgatctcaagagtcttggagtagccatcgtgaacacccttgaccatgccggccatgatggagcgggccagaccgtgcttggcacgggtcggacgcaggtcatcagcggcggtcaggacgatctcgttgccttcaacggcagcggtgatgccttccggaaccacgtaggagtcagaacccttagcgcccttggcggagaagttctggccttcaatcttgacttcaacgccagcagggatggcgatggggagcttaccaatatgcgaggccatgtttcagctctcctttctcaccacacgaaggcgacaatttcgccgccaatgcctcgatcgaggcattccttctgagtcagcagtcccgaagaagtcgagatgatggcgatacccaggccaccgagcggcatcggcagggagtcggacttcgcgtaacgacgaaggcccggcttggagatgcgcttgatgccctgaatggaacgctcaccgttcggaccgtacttgagggtgacctcaagagtctggccgaccttggcttccttagcggtgaagtccttgatgtagccttcgcgcttcaggatctcggcgatgttcgccttgaacttggagtacggcatatccacggtttcgtgcttggccgcgctcgcattacgcagacgcgtaagcatgtctgcgatcggatctgtcattgtcatttgggcttgttgccctttctcgctatggtttccgccgccctcacgcttcttctagaagcgttcgggccgcggaccttcagcgtcgatgtttaccaactggacttcgtaacgccgggcagttcaccgcggtgagccttctcacgaaggcagatgcggcacaggccgaacttgcggtagacggagtggggacgaccgcagacctggcagcgcgtgtaagcgcggaccttgaacttcggcttgccggccgccttgttcttaagagcggtttttgccatatcagttctccttgaaggggaagccgaggtgcttcagcagcgcgtaagcttccttgtcgtccttggtggaggtcaccacagtgatgtccataccgcgcacgtgatcgatcgaatcaggatcgatctcgtggaacatggactgctcggtgagaccaaagttgtagttgccctggccatcgaactggtggccgttgatgccgcggaagtcgcggatacggggcagcgcgagggtcagcagacggtccaggaactcccacatgcggtcgccacgcagggtgacgtacgcaccgatggcctggccttcacgcaggtggaactgcgcgacggacttcttggccttggtgatcttcggcttctggccggtgatcagggtgaggtccttgacggcaccttcgatgagcttggagtcgcgggcagcggcaccaacacccatggagacgacgaccttctggacacgggcaacctgcatcgggttggagtacttgaactccttctcgagctcaggaatgatctgctcgttgtacttgaccttcaagcgcggggtggccggcgcttcgacagtagtatcggtcatgccagctcctttccggacttcttggcgacgcgcacgcgcacggtcttcaccttgccgtcacgcgcctcttccttaacggtgatgccaacgcgggtcggctgcttggtctccgggtcgatgaccatcacgttggagcgatggatcggagcctcagtggagacgatgccagcctgctggccctgctgcgttgcacgcacgtgcttcttgacgatctgcacgccttcgacgatcagtcgatcgttggagagcacctgcttgacgatgccttccttgccgcggtccttgccgcggatgaccttgaccaggtcgccgctcttgatcttggctgccatgtcagatcacctccggggcgagggacacgatcttcatgaacttgtgctcgcgcagttcacgaccgaccggtccgaagatacgagtgcccttcggttcacggccggagccgagaatgacggcggcgttctcgtcgaacttgatgtaggaaccatccgcacggcgggattccttgacggtacggacgacaacggccttaaccacgtcgcccttcttgaccgacccgccaggaatggcgtccttgacggaggcgacgatcacgtcgccgatgccggcatagcgtcgcttcgatccgccgagcacgcggatggcgaggagttccttcgcacccgtgttttctgcgacatgaatccgcgtttactgctgaatcattgattctccttagccgagctggttctccccatttaccggggcatcgtggttgcccataatgccccggtaaatggcgagccttgccgaactttacttacttggcgcgctcgataatggattcgagacgccagcgcttggtcttgctcagaggccgagtttccataatactcacgaggtcgccaatgtgggcgtcgttgtgttcatcatgggccttgaccttgctggtggaacgaacgaccttgccgtacagcgggtgggtcgaacgctgctcgagctcgacggtaatcgtcttgtccatcttgtcggacacgacgtagccgcggcgaaccttacggaagttacgctcttcagccataatcacttctccttggattcggtagcggccggctcctggctgatgccaagctcacgctcgcgaagcacggtgtacatgcgggcgatgtcgctcttgacagccttgagacgggcggtgttctcgagctgaccggtggcgtgctggaagcgcaggttgaacagctcttccttggacttcttcaggaagccttcgatttccgcgttggtcttctcgttgagattcttgatggagtaatcagcggtaccgactgccatcagatatcaccaccttcacgtgcgataatgcggcacttcatcgggagcttgtcgatagcgcggcggagggcttccttagcgacgtcctcggacacaccaccgatttcgaacatcacgcgaccagggcgcacgttcgcaatccagaactccggggcacccttaccggaacccattcgggcaccgagcgggtgcttggtcagcggacgatccgggaagatcgtgatccacacgcggccaccacgcttgatgtagcgggtcatggcgatacgcgcggcttcgatctgacggttggtcacgtaggccggggcgagggactggatgccgaaatcaccgaagttgatctcgttgccgcccttggacatgccagaacgcacagggcggtgctgcttgcggtacttagtcctcttggggataagcattcttgctcactccttcgtttctgcagccggagcggcctcggcgggagcctcagccttgggggcttcgacggcctgcggggcggcggaacggttgccacggcgcgggcggcgatcgccaccacgacggcccggacggttgttctgctgagcctgctgctcttcgaactcggattcggtcatgtcgcccttgtagatccagaccttgacgccgatacggccgtacgtggtcttggcctcgaagaagccgtaatcgatgagggcgcggagggtctgcagcggaacgcggccctcacggtagaactcggaacggctcatttccgcaccgccgaggcggccggagagcttgatgcggatacccttggcaccggcgcgcatggcgtcctgctgggccttgcgcatggcacgacggaaggtgacgcggttggtcagctgctcagcgatgccctgagcgacgagctgggcgtccagcgcggcgttcttgacctcgaagatgttgagctggacctgcttgccggtcagcttctcgagcttggcgcggacgcgctcggcctcggcgccacgacgaccgatcacgatgcccggacgggcggtgtgaatgtcgacgcggacgcggtcgcgggtgcgctcgatgacgatgcgggacacgccagcgcgctcgaggtccttgctcatctccttgcggatctgatcatcctcaagcacgaagtcgcggtagcgttcgccggccttgttggagtcggagaaccacttggagcggtggttctcagtgatgcccagacggtagccaaacggattgatcttctgacccatctttagcgggctccttccttgttagccacgacgaccgtgatgtgggaggtgcgcttgttgatacgagcggcgcggccctgggcacgagcgcggaagcgcttgagggtcacaccttcgtcaacgtaggtctccttgatgtacaggtcgttctcgcggaacggctcgccggccttgtcggccttcacgcgagcgttggcgatggcgctctccagggtcttgcggaccggcagggccgcagcctgaggggcgaacttcaaaatggtgacggcttcggtcgccttcttgccgcggatgaggtcgaccatgcggcgagccttgcgcggcgtcacgcggacgtgacgagcgattgctttagcttccatgttctattccttatccttagcgacgggccttcttgtcgtccttcacgtgacccttgaaggtcttcgtgggggcgaactcacccagcttgtgaccaaccatggcctcggtgacgaacaccgggacatgcttgcgaccatcatgaacggcgaaggtgtgtccgatgaaatcaggggtgatcatcgaacgacgggaccacgtcttgatgacgttcttggtgcccttctcgttctgctcgtcgactttcttctgcaagtgggcgtcgacgaaggggcccttcttgatgctacgagtcatcttctcgatactcccttacttgcggttcttgccggacggacggcgacgaacaatcatcttgttcgaagccttcttcggacgacgagtacgaacctcgcccttgccccacggggagaccggcggcttaccaccgcgggtacgaccgccgtgcgggtggtcgaccgggttcatggactcaccacgggtgatcggacggtggccgatccagcgggcgcggccagccttgccgagctgaatgttggcgtggtcctcgttgccgacctcgccgacggtagcgcggcagcgcgcgtcgacgttgcggatttcgccggacggcatacgcagctgagcgtaggcgccatccttggcgacgagctgaacggcagcaccagcggaacgagcgatcttggcgccacccagcgggcggagctcgatggcgtgaaccacggtaccggtcgggatgttcttcagcggcaggttgttgcccggcttgatatcagcctgagcaccagtctcgatgacgtcgccctgcttaacacccttcggcgcgatgatgtagcgcttctcgccatctgcgaagtgcaggagggcgatacgggcggagcggttcggatcgtactcgatctcggcaaccttggcgggcacgccgtccttgtcccaacgcttgaaatcgatgagacggtactggcgcttgtggccgccgccgcgatgacgggaggtgatacggccgtaagagttacgaccgccggtcttggacttcttgcgaaccagcgacttctcaggcgtagaacgagtcagctcggagaaatccgagacggacgcgttgcggcggcctgcggtcgtcggcttataaacgcggatagccataatgtagttcttcctttaacttttctcggctagccttcagttaccaaagatgtcgatcgtctggccctcggcgacggtcacgatcgcacgcttctgggaagcgcgctggccgaaaccggtgcgagtgcgctgcttcttgccagcgcggttgagggtgttgacgttcgtcaccttgaccttgaagatctcttcgattgcctgcttgatctgcaccttgttcgcatccggagccaccacgaaggtgtactggccacggtcggaagcggcgtagctcttctcggagacgacgggcttaagaatcacgtcgtgagcgggcttgtgaatagcgaccatctaaatcaggcctccttcggctcggtcttggcagccacgaaagcctcgaaggcttccttggtgaagaccacgtactgcgaggtaatcacgtcgtacgtgttgagctgatcgacgaaaatcgggtgaacggtcgggatgttgcgcacggagagccactcgttgatgttgtcgcgagtgaagacgaccgtggtgaacttgtccgcggtgatcggggccagggcggcgacagcggccttggtggacggctcggtgataccgaactccaccacggcaacgcgaccggcgttggcgcgatcggacagggcgtagcgcagagctgcggccttcatcttcttgggggtgcgctgagagtagtcacgcggctgcgggccgaacacgacaccaccgtggtaccactgcggagcgcggatggagccctgacgagcgcgaccggtgcccttctgcttccacggcttcttgccgccgccggaaaccatgccacgagtcttggtggcgtgggtgccctgacgagcagcagcgagctgagcggtgacaacctggtggatcagcgggatgtgagcctggacatcctcggcggaaacgccgaagagagcctcaggagcttcaacggtgccggtggcctggcccttggcgtcggtgacgttcagagtaacgtttgccatggtttatcaggctcccttcacagccgagcggacgagaacgatgccgcccttggggccaggaatggcgcccttgatggcgaggatgccgttctcgacatcagcggagacgacggtcaggttctgggtagtggcggtcacatgacccatgcggccggccatacgcttgcccttgagaatacggctcggagtggcgcatgcgcccacagaaccgggacggcgctcgttcttgtgagaaccgtgagtacggcggtaggacttgaagccccaacgcttgatggtaccggcgaagcccttacccttggtggtgccggtcacgtcgacctcagcaccctcttcgaacaggtcagcggccagttcctggccagcctcgaactgatcgacgtcgtcggtgcgcacctcgacgaggtggcgacgcggggtgacaccggccttggcaaagtggccagccagcggcttggtcaccttggtggggtcgatggcgccgtagccgagctggacggccttgtagccgtcagactcctcggtcttcacggcggtcaccacgttggtggacacgtcgacaagagtgacgggcacgaagaagccgttctcgtcccacacctgggacatgccgagcttcttgcccagcagagccttgcgattagacataatgcttcctcctcccttacagcttgatttcgatgttgacgtccgcaggcagatcgatgtgcatcagggagtccacggccttgggggtcgggtccacgatgtcgatgaggcgcttgtgagtgcgcatctcgaagtgctcgcgagaatccttgtacttgtgaggagaacggataacacagaagacgttcttctcggtcggcagcggaacggggccaacgacagttgcgcccgcgttcgtcaccgtttcgacgattttcttcgccgattggtcgatgacctcatggtcataggacttaagcctgatgcggattttctgtcccgccattgccgtccgccctttctagcgatgttcgttgtactgtttaccaacctgcttctagggcaccggcgcgcatggcctcccttggacatacgtcctctggcggtcatccgacatcagtgcgcggtttccggctgtcacttcacttgaagtgactcccggcccgcgctcgcttttttaattccaatttgcgagcccaaatcaggcaacttgtttattcaagcattgaggtgggacagcgcggaggaattcgcgcgtgtcgcgctcatgccgttcgtattacctcgcggcatagccgctcggcgtcgcctaccaacatccttctgagacttacctatatatagtggcacagctcacgttggcgaatatggattgattaattgagttggacggtaacgcgaattactcttaaggctcgtgacacaatcactggcaaagaacatcaaacctattcgtgagcacggtgccaacgtgttatatcagcacggcactttggccttactcgtgccggggctgctggaaggcaccaccaccatcggcgaattgctcaagcatggcgacaccggcatcggcaccggcgagggcttggacggcgagctcatcatcctggatggcgtggcatacaagataggccaatccggtgtggccgaacgcgtgccggacgacttcaccatgccattcgctaatagccatcgcgcggccttccagtaccagtgcgagcgtcatgatatcggcctagaagagctcaacgaaaagatcgtcaaggcgaacggccgcgcgaacacgttcttttcggtaattgtgcgcggcacgttcagcttcatcaagacacgcgcggtcatcaagcagcaggcaccctaccccacgctggtagaggtggccgaccggcaggccgtgttcctgcgccacgacgtcaagggcaccatgctcgggtacttctcccccgtgatgtttcacggcgcggctgtggccggattccacgagcacttcctgtccgacgacaagacgttcggcggccatgtgctcgatgcggtgctcgagcgcggcaaaatctacagtcaggtgttcgataccttggtgcagcatctgccggtggacgaccctgattatcgcaaccacgacttcagccaagatccgatagccgaggccatttccagcgccgagggcgatactcaacgagattagtctcacataaacacaatgtgagccaaatgaacatttccgaacaatcgcacatgttgcataatggcggaagcactggcttctcgcacttcctatgttcgattgtcgcaatgcaggtctcacatctttcttattgagaaccattcgctgcgatatcatgacagatatgacttcccgccgcaagactcttaaacgcgattggttcgacaaccaacctggcgcatggggaatggttatgctgcccgctgtggctggcttctttatcggcgggcctaatcttgatacgctttggctgttggcgacgtgggccgtgtgctattgcgtgcagttcagcgccgcgcactggttcaaagcacacttttcacgccgttatctgccgccgatgctcacttatgccgtagcgctcatcgtcatcggcttgccattcctgattacgcataccggcatactgcgttgggctcctttatatatagtgctggttgcgctgtcgatgctgtcctcgtggctgaggaaggagcgctcgctgtggggcaatgccgtgtcggtgattgccgcatcggccatggccacggtgatcgcgtcgtttggcaacgctgttgagacggcatgtgttattcccatcaacgcagcacatgcctcgtgcgcagccgctgatgtcaccgccgcacgcgccgcgattcggaatatgccggatttgagccagatattcgaccttcacgcctggtggcctgcgggttcattgcccgtgaacgggctgattgccaccgtgctgtttgcgctgacgcagtatgggtcggttttggtggtcaaaaccatgatccgggaacgcgggaagcgttcgtacgtggcggcttcgtgggtatggcatgtggcgctattgctgctagccgccgtgccggctggacgcagcccgtatctgattgcgatgactgtgctgctgttggcccgcgccgttgcgttgccggtggttacacggcgcacaaccttgaagcccgtggtgaccggcattaccgaggcgtttgccagctttattgcttttggctgcattattgcagtgatttagcgacgctcagcgattccatggggcggtaattccctcatggggcggtaattagcccatggggcggacggtaaaattttaccttccgcagaatagagccgttttcgtacaccgccccatggggttttcaccgccccatgggcaagttaccgccccatggggttttcaccgccccatgggcaagttaccgccccatgagtaggttaccgccccatggaggcacctgccggctgagggagcgccacatatgcaaaggagcccggcccctgtaatggggtcgggctccttgtgtccgctatgcagccactaagctgcaacaccgcggttggtggctactgctggtgccagcagccgccaaccgcctgcaatcagcgctcggaggcttcctcagtggcggcctcaccctcgcgctcgatgcgtagcttgtggccttccgcctgggagacaccgtagtaagcaccgacggcgatgtccttcatgtcgttgatcagcgggatgcgcgggttggccggggtgcactggtcctcgtaggcgcgcatgccgatctgatcgagcacggaccagaagtaatcctcgtccacgccgcaatcctggaagctcttgttcataccgagcttgttatcgcggtagtcctcgacagccttcgccaggttctccacggcttcggccggggtcttgccggtgtcgatgccgaggttgcgggcgatgtcctggtagcgctccggggcgatgtacttgttgtacttcggccaagaggtgggctcctcaggaatctggccgttgtagcgaatcacgtacggcagcaggatggagttggtacggccgtgggcgatgtggcacagggcaccgatggtgtgggccatgccgtggcacatgccgaggaacgcggagccgaatgccatgccggccatggtggcggcgttgtgcatcttctcctgagcgtcggtcttggccaggccgagctcgccgttgacggactcagccaggttgtcccagatgagcttggccgcgtgcagggccatgccgtcggtgaagtcgttcgcgtacacggacacgtatgcttccatcgagtgggtcagggcgtcgaagccggcgtcggaggccagcttgcgcggctgggtgcgagccagcaccgggtccacgatggccacggacggggtcagcgcgtagtcggtgatcgggtacttgtagccggtcttgtgatcggtgatcacggcgaacggggtgacctcggaaccggtgccggaggaggtcgggatgcacacgagcttggccttcttgcccagcggcgggatcttgaaggcgcgcttacggatatcgaagaacttctcgcgcacgtcggagaaggcgatttccgggtgctcgtagagcagccacatgatcttggaggcatccatcggggagccgccgccaaccgcgatgatcgtgtccggctcgaactcctcgcgcatcatctccgcgcccttttcgacggtctcgacggagggctccggctcgacgtagtcgatgatgcggaaggtcacacggttggagcgggcgcgcagctggtcgatgaccttgtcgacaatgccgagctgctccatgaccttatcgcacacgatgacggccttctcgatgccgtacatgtcgcgcaggtacttgatggcgttcggctcgaagtaggtcttggccgggatcttgaaccactgcatgttgttgttcctccgagcaatgcgcttgatgttgacgagattcacggcctgcacgttgccggacaccgagttgccgccataggagccgcagcccagggtcagcgacggggcgatggcattgtagatgtcgccgatgccgccaagggaggaaggctggttccagatgatgcggcaggcgtgcatacggacgccgtactcacgcacgagctcctggttgttggtgtggatggcggcggtgtggccggcacccagcttgagcatcttctcgcacatctcgaaggcctgctccttgttgtcggccttgagcacggcctgcaccggagcgagcttctcgtgggtcagcggctcgtcgtcggagacttccttgcactcggcggccagaatggtggcgtcggccggaatctcgaagccagcagccttggcgatgaactgcggggacttgcccggcaccacggagttcagcacgggcttgacgccggaaccggcggtgcagccgaacatgtactgctccagcttggccttctcttcagcgttgacgaagtaggccttacggaccttgagctccttgatgagctggtcgtagacgtccttgtgggcgatgatggcctgctcggtggcgcagatcatgccgtaatcgaagtgcttggagagcaccagatcgttggcggcacggacgatgtccacatcggaatcaacataggccggggcgttgccggcacccacgccgagggcgggcttgccggaggagtaagcggccttgaccatgcccggaccgccggtggcgaggatcgtggccacgcccgggtgctgcatcagcgcgccggtggcctggatggacgggtgctcgatccactggatacagttctcgggagcaccggcctcgatggcggcgtcgcgcacgatcttggcggcctcgacggagcacttctgcgcgccggggtggaagccgaagacgatcgggcagcgtgtcttcagggcgatgagggacttgaagatggcggtggaggtcgggttggtaaccggggtgacaccggcgaccacgccgacgggctcggcgacctcatcgatgcccatcacgtcgtcttcgcggatgatgccgacggtcttctggccggccaggtagttggtgacgtgctcacaggcgaagatgttcttggtggccttgtcttccacgagaccacggccggtctcgtcgacggccatcttggcgagaacgaggtgcttgttcagagcggcgatggaggccttggcgacgatacgatcaacttgcttctggtcgaggttctcgaattcgtcgagagccttcttggcgcgggcaaccagcgcgtcaacttcggcctcagctgcggcctgcttctcttctggggtcggattggcagcttcgactttcttctttgcttctgccacttggggtcctcctcgatcttcttggggtattatggcaaagttctgggccatcgcctcgtcacctcagttgcaccagcgggataccgcctcagtaaccgaaaatggccggtgatgcgttgtcacattgcatatgtgacttgagtcacaatataccgaacggtccggcgcgatgcatacgcacaaaatcgacggcgtttcacgtgcgatattgaacagtttttgttaagagttgtgcgaaatatcgaacaaatcctcactttattcggcgatttggtactttttgttcactttttaccgaaaatcacatgcttgcaaacaacgcaatccgacaactttcttaaatcaagtttccaaaagtactcattttccccacatttctagaaaattggtttaaaaaagtgcccaaaatcgcctacaaatatacgattgttgcctcataatctccgcgtcgaggcacatgaaagccactttcataaagtatacttacatatatctcatcgcacaaaggggtaaatatgagggcaatgccatcgaccgcagtgaaagcgcacaaccgcagtgccatgacccagtatctgtatggccatagccatgtcaccaagcaggaactggaacgcgaactcggcctcagcctgcccaccatcacccaaaatctgcgcgccctagaagatgacggactcatccgcaaaggcgaactgcaggattccaccggcgggcgcaaggcgcaaaattatgagttcaatcccgatcatcgcactgccatcggcgtagtgatgcggtccaacgaactgcgcctgtgcgcgattaacctgtacggcaacgtcatcgaaaaacgcaacgatgccctgccttaccgcaacaccaacgtttactaccagcgtatcggcggcatcatcaacaacttcgcctccgacgtcgaaaagaagcacggcaaagtgctcggcgtctcgttcgccatccaaggcatcctctcccccgacgccaccaccatcaccttcggcaccattatgggcaacacggggcttacgctcgaaaccatcagccagtcggtccattacccgtgcatgatgatccacgattccgatgcctccgccatggtcgagctatggttcgactccatgctcaccgatgcggtgtgcgtctatctggagcgacgcccgggcggcgcggtgatcgtgggcggcaagctgtatcagggtccgaatatgtgcaatggcgccatcgaacacatgacgctggtgccgggcggccgcgaatgctactgcggccagcgcggttgcatggacacctactgctcgccggagaccttgcccgaggattacgaaagtattcccggcttcttcagcgtgcttgagcagggtgaacggcatcatcgcgagcgcatggacgaatggctggattatgtggcgcaggccatcgtcaacgcgcgatccatcatcgcgggcgacgtgattgtcggcggtgaagcagcccagcatcttgaagacagtgacatcgaggatctgaaggcgcgcgtcatcgcacgcagtccgttcggcaccgaccatttcaatctgcgcaagagctactgcgccgaagaccagaacatcatcggtgccgcattgcgattcgccgagaattatctcgacgatatctgtggtgctgcggaacgcggcaggaaatcaagggcttccaccagaagtgacaacacgtctacaatggaggtatgaaaaacccaccgttgcatcgttacgccactcgcccagggctgtacttcactgacgacggtggggctgacgtcgttgttcgttccgaaactgccgatcaggtttggctgtgtgtgctggagcccattgacgagcccggcgccttcttccaagacgccatccgcctgttcgaagacccgaacgcctcgttcatccagcagatccatgagtttccggtgtgcacgcgcattatcgaacatttgtatctgcgcgagaccctgttccgcatgaccggaccgaactacggcctgtggtacgtgcacctgcccaaagcatgggacggcatgcgttatggctaccgcgtggacggcgcatgggacccgaaacacggcgtgcgcttcaatccatacaaattcctgcttgacccgtatggcaagggcatcgacggctccatggagctcacccccgccgccttctcctatgaatgcgatgtcgtggaccacaaggtaaccggctcggcatacggtgccatgagcaccgtagactcgctcggccatgtgccggtatccgtggccatcgacgatcgcgatatccataagcatgagggcgacccgcagcacccgcatgtgccgtggcgcaaaaccgtcatctacgagatgcatgtcaaaggcttcaccgccaacgcgccgtggctgcccgaagcgttgcgtggcacctacgccggactcgctcaccccacaacgctcgcctatctgcagggattgggcatcacctccatcgaactgctgccgattatggccaagcaggacgagctcttcctgcaagaacacggccgcaagaactactggggctactccaccctcagctacttcgcccccgaaccctcctatgccaccaaagcagcccaagagaagggcgcggccgccgtgcgccaagaagtcatagacatggtgcgcgcgctgcacgaggccggcttcgaagtcatcatggacgtggtctacaaccacacatgcgaaggcggcgtcgaaggcccgacggtctgctggcgcggcctcgacgacctggcctactatcgccatcaaaaatccaataccggtcgactcgaagacaccaccggttgcggcaatacgctggacttcaccaacacgcatgtggtcacctttgccatcgactcattacgatactgggccaagcgtatcggcatagacggtttccgtttcgaccttggcgtcacgctggcccgcctggaaggcgaattcacccatcatcacccgttcctctacgccctgcgttccgatctgctgctgggcaacctgaagctcattatggagccgtgggatctgggcaacctcggctggcgcaccggccaattctccgtgccgttcgccgaatggaatgaccgcttccgcgacacggcccgcaccttctggcttgaggatgtggacggcggctccgatttcggtcgtatcagtttgcaggagatggccacgcgactctgcggctcggccgatctgttcgccaccgaacccgggcgcggcgctccggcctccatcaatttcgtgtcctgccacgacggtttcacgctgacggacctcaccagataccgctccaagcacaatgaagccaacggcgagaacaataatgatggctcgtcggtgaaccattccgccaatttcggcgtcgaaggcgtcaccgatgatccagacgtcatcacggcacgcgaacaggcggccatgaacatgatcggcatgctgctgctctcgctgggtacgccgatgatgctcgccggcgacgaattccgcaacacacaggacggcaacaacaacgcctactgccaagacaacgacatcacgtggctgaagtgggattggatgtattccaccaacaagacacgcgaaatgcgtcgcctgaaaaccgtgtctcgactggtggcgctacgtaaatcactggacctgtatcaccacgaggacttcttcacccgactgacccaactcggcctactcaagccctcaagccgcgtgcagtggttcctgcccgacggcaccacgccgatggagcgtgactggttcgatctgggcgtacgtagcttcaccatgcgattgctgtccaacagtgaggtggacgtgtgcattgtggtcaacggcaccgctgacgaccgcacattccacctgccgccagacactcactggacgcctaaatggtgctcggccgaaatcaacggccgccgagccgggcatggcattcaggtcgaggaatgcgatttgaacgatgacaccaccgtttggacgcagcatgtaccggacgccagcgagacggtacgcacgctggtcgaagaagtggccatgcaacgcacggaatcctcgactgaggatgaagcggataccatcgaattcgcgatgccagcaacggatcacgccgcaaacggcacctcgtccgcgcctcgggatgaggtatcagatgatatgcctgatgcccctgtggatgatacgccggacactcccgtcgacgacaatgtctggaccatgccggcgctgagcatcacgctgatgaaacaggtgtgagtcacactcaaaacagcacgacacaaacacaaaggctctccgcggaattccacggagagcctttgtatgctcggtacaggacaagcgaaattaacgcttggagaactgcggggcgcgacgtgccttgtgcagaccagccttcttgcgctccacgacgcgagcgtcgcgggtcaggaagccagccttcttcagggcggcgcggttggcatcacgatcgatggcgttcagagcgcgggcaacgccgaggcggatagcgccggcctggccggtggtgccgccgccgtcaacgaggacgatagcgtcgaacttgccttcgagcttgagcagaacaatcggagagttgacctcacgctgcagcagcttggaggggaagtactcctccagggtgcggccgttgatggtccacttgccgtcacccggaaccagacggacacgggcgacagcctccttgcggcgaccggtgccgtagcccggctcgatcgcggaggtgccggtgccagcgccagcgttggtctcggtggtgtagttggtgagctcctcttcggtctcgacaacctgggagtcgttggtgttttcagccatgattcttatctcctctcaggtttcacttggcctgctgcgagacctgggcgatctcgaagacctggggcttctgcggggtgtgcgggtgctcggcgccgcggaagacacgcagacggtcgagctgcaccttggccagacggttcttcggcagcatgcccttgacagcgttcttgatgatgcgctcggggttcttctcgagcagctcggcgtaggagtcacgacgcagaccaccgggacgaccggagtgcgagtagagttccttgcccatcttgttgccagtcagagcaatcttgtcggcattgatgatgatcacgtggttgccggaatcggcgtgcggagcgtaggtcggcttgttcttgccgcgcagcaggattgcagcctgagtggcgagacggccgagcaccacgtcggtggcgtcgatgacataccagtcatgagtcagatcagctggcttcggagtgaaagttttcactggattaccttttctatattgtgttccgggtctcagctgcttggcgtggcttggtcagggccgcatccaagaggcatcgaacctcattatccgtgggctccctgaaagtcctcgatggcgagtgggatagcgctttgaaggaccccttagggaaacacaacaatccactagtatatcgccgggcttgacatagggcaactggggacactccattgggtttatggcttctcttcccctatttatggtttctcttccacccacttcggctaaccgactcgcctacggtgaggcaattccctgccttctctcagctatcgcttcgttcaggcctcgtctacggacagcccaccggactgtccgcttaacgactcggctcgtcagagggagataaagtgggtcaggaattgaagatttgggcgaagcgttggacgccgggggtgtcgaagagggtttcgagcggtaccacgttgcccttggcgtcggccagcgggatgcgccagttcgggtattcgttgttggtgcccggctggttctgcgcgcgcttctcccccaccgcgtcggtgatcgaggcggcgagcagcttgcacggcgaacccttcagtgcgcggtacagcgcgtcgatgatatccgcctcgtgatcctcacgatgttcggcgaagtcggcatcaagatagccctgctcgaccagcatgaccagcatcgcatcctgctcggcctttgcggaggcttcgaattcctcagccgggccggtcagcaagcccagacgctcacgaatcttgacgtgctcgtattccaggtaaccggcggtcggcggcaaatcgtgcgtattcacggaggccaatgcgtacggacgccactgggagggggcgcggaacacgccgtcgcactgctcgaaccattcaacggcgcaaccgagaataccgtggctcgacagggaatcggccacatggtccggcaccacgccgaggtcctcacctacgaccacgccgccagcgcgagaggcctcgatggccagaacgcccagcatgatgtctgagtcgtagtacacataagcgccatccatagccgaccggttctcgggaatccaccacaggcggaacaggccgagaatgtggtcgatgcgcaccgcaccggcacgggcgaacatgccatgcaccatattgcggtaggtctcgtagccggtggcctccagattgatcgggctcagcggcggctggctccagttctggccttgctggttgaacatgtccggcggggcaccgaccgtggctcccttggcgaagcgctcgggattccaccacacgtcagcgccggaggggtgcacgccgacggccatatcggacatgatgccgatatgcatgccggcgtccttggctgcctgctgggcggaggacagctgctcggcggcagtccattccagccagcggtagaagtccaaagtgtccgggtactgcttgcgcagattggcgatttccggggagttgcggttgaacttgcgctcccagttgctctcctcgccgttgggtgctccccacttgtcgtagcacaggcaccacgtggcatacgcctccaagtcggaaccgcagtccgccttgaattggtcgaacgcgctttggcgttcggcggtacggccggccttgaagataatccacagggcgtgcatcttgctgcgccacatggcgtcacggtcgatgagctgggaatcaccgttcagcggttcggtgtcggcatgcagtccgtcgacggcgttcttgtcgcccgcgctgagcgtggcatattcggcgatcgcctcggggcggatgtacgtgaagttgatcaggcgacggcttaccggcagatacggcgacggggtgagcggggacaccggctcggcggcatgtaccggattgatgagcacaaagtcggcaccggtcttctgcttggcgtccaccagcatggtcttcagatcctcgtaatcgcccacgccccaggagttggaggagcgaatcgagtacagctgggccatccagccccacagactgccgcccttcatcgggtcaagcagatcgacgcgatcaggtgcactgatcaaagtggcgtcttgcacacggtcggcgaccttgacgtgcagcgtatggtagccaatcggcagatcggcgggaatgaccacagccgcattcgaaatgaacgtgccatccaagtcgtaggcctgggatccatctccaggaccaacttcaacggtgccctgatatggctcgccgttctccagcgtgatgctcgccgaaggcacgtccagaatgccggtgttcaccagcacccggtcctcgctaccggcgatatgcagcacggtgggtgccaccaatcgggagtaacgctcgttcagaatgcgtcggatggcgatgagttgggcgttctcgctggaggcgtcgatgcccagcgctgccagcacctcgatcaggacgtcatcgtctatctcgtggtagtcatggctcatgcccacataactcgtgccgacaccgaccaacttggccagtcgaatcaacggacgggccagacgctcttcactctcggtaatctcactcatagccccagtctaacgccgtttgattgcgccacaccgtaagcaaaatgccgtgattccgccaaattatgtactttttaccctcacatagtgagatgtgagcgctcacaatggtgaatagagggtgattgccggccaaatttgcacggcaaaacacagcaatagtgtgcttagcggcggctttccacggcgtgccgcacctcggccgaggggtcgttggccaatttggcaagcatcgcttcggacgtattggggttcagcgccacggcacggcggaccatcgaggaaagcactgccggtgctccctcttcggattcggtgccaagtacgcccaagaaatccaatgtctccgcatccgcagtggggtcctgcgcaccctcaagccgcatcttccagctggtgcgcttgtttttcaacgccgtatcccggaccgcaggtaccgggtccttggtcaggcggccgaccagccaattcttgtcatccccgttggcggccacggcttggcgcacggacggttcggggtcttcggagagtttgaccaatacgttcgggaacggcatggtgtcggcgaggaacacgcgatcggccaccggggtgtgcgggttgccggccacagcctccaaaagtgcggtggcgcgggagaacgccgcctgatcggcacggtcaggcaacggccgacgggcgaattcggacagttcggccgggtcggtggaatgacgcagacgttcgtatgtggcggtcagcggttcgaaatccaccggagcggcggactcggctgcggcctgcgcgccttggtcccgctgctgggcgcccgtgtcggttgcagtctcggttgcggcctcggtgggctgggtccgctggctggtggtgttctcgtcggtcatgatgcccagcttagtcatacaggcgtcacgcgagcggaaccggaatgttgaccacgtcaatcggatccggcaccaccgcggcattgaacgcttcccgcacacgctcctcgaatcgcgcgcaatcatcctgcggcaccaccgcggtcagttcgacgttcaccgcatacgattcatcctcctgactgccaccgagctgcgccaggatctgctggaatcgggccagctgcgggtattcgagacggacccggtatcgcttggcggtcatgatgcgggcggcgcgggcggctttcatcgccaatgatgcggcggatgagtacgcgcggaccagaccaccggagcccagcagaatgccaccgaaatatctggtgacggcaactacgcaatcggtggtgccggactgcttgagtacgtcgagaatcggcttgccggcggtaccggacggctcgccgtcatcgctcatgcgttcggacagtcgcccatccgcgcctccgcacacggcggcatacgccacgtgtcgggctttcggatgctgctcgcggatcgcggccacgaacgcgagcgcctcgtcgagcgtatcgacatgggcagcgtcgccgatgaattcggactttttttcgacgagcgaatcgtgggcgggatcgtcggacgtgttgagaatcgtctgcataagcgtgttccggtggtcggctgactgggtgttcgattgagcgcgaggctagacaggactatcagtgttcggagacgacgacgttatagtcctcgccggcgaagtaggcggtcaggcaggcgatcatctggcgggtgagctccttgaacgcgccgtcggtacgccagccgacgtgcggggtcaggacgatgccgggcacatggcagatggcgtcgtcggcggtcagcggctcgtggtcgaacacgtcgagtgcggcgggaacatcgcccttttgcagtcgggcaagcagcgcatcggattcgatgacttcggagcgggcggtgttgatgaacagggtgccgggcttcacatgcgcaaggttctcggcggtgacgatgccgcgcgtggcgttgttgagcggcagatggacggagatgacgtcgctggtttcgatgagctcgttgagatcgtcgaccggagtggcgccggagcgttcgaaatgctcgggcggcacatgcgaattccatgcggcgacctccatgccgaaggcgcgggcgatgccggccacggtggcgccgatgccgcccagtccgatgatgcccatgcgacggccggcgagttgcagtccatcgccgccggcccacgcccagttgccggccttgacatccttatcgagttggccaacgcggcggatgagctcgaacaggagggcgaaggtgtgctcggccacggcgtgatcgccataatgttcggcgttgcagacgcggatcttcagctcgcgcgccttatcgagattgatgtagctggcgacgccggtaccgcagaacacgatgcacttgacgtgcccctgctcgctgatggtgcgcagcagatcatccgaaatgtggtagccgcccaccagcagggcgtcggcatccttcagacgctcggctacgatcgcctcgtcggacgtgaattcctcgaacatacgcacgcgggcaacgtcgtggagcgcggggaactgggccttgatgggctcgatcatcgcgtcgagcacggacggcatcacgacgaggggcagatcggtgcgttcgctttgggtttcgtaaatctcggtcatgggctccacattaggaggccgacgggaaaagcgtcaccttgcggcttcccctccttgagaccaagccgagcaactattgctttgccgcctgctcctgcgtgatgttccattccttgacgacgttctggtccgcgcccatcgaatagatgacatcccagatgcgttggcgtatctgagcgtcgtaggcttcgtcccaacatgtgcctatgggatggtcgctggatatcgggcaccattggtagttgccttgatgcacgttggcggtgggcacccagtcgatgcggttgacgcgccacgaccccttgacgcccttcttgccggcgaactggatgcgtgcggtcacaccctggttgttgaccaaggtttccggcgtgttcgccgactcggtgacggtgttgcccagaccgtagacaatccacgtgccgttatagttctcgatgggctgcgcacaatggcatccggcaccgtagataacgtcgaaggcaccagtgtcggcaagctcatgggcttccgaaatctgccaggaatcggcgtaatcaaggtattcctgcaccgagtgcatggcgatggccaccacatcggcaccttgctcgcgggccttgttggccttgtctaccgcgcgctggatgtcgctgccgtgattcgggtcgccgtcttcgcgcagacgatccacctgccagtcctcgtcggcggtcatgccgttgagggagaccgtgccggtgaccagacccagcttgccgccgccggtcggggaatcgatgactaacggtttggtggagtcggcttcggttttgtacgagccggtctgggcgatgccatcggcctcaagcgtgtcccacagacgggcgatgccatccgccccctgatcccaggaatggttggtggcgtgtgtgcaggcgttgtatcccacgttgcgggcggcatccgccacttccggcggaatgttgaagatcgggtacgcggcatatgggccgccgcgctgggcgatcggggtttcgaattcgcacacggcgatgtccgaagcctgaatgtactgcttcatcggcgcgaacagcgggtcgaagttgaaggcggtgccatccgtggcgttggggttcgggccttggaaatggctccacaatccctcatggaacaacaaatcgccgttgaccagcatggcgatgcagtccgtatccgggcaatccggtgaattgccgtgatgttcggtcaccggtttgggcgtgttcttcgctttattcaacgcgacgtccgacactccggcgcgtgcggggccattgccgtccgtgcgatgggttgcgaaccatgcgccgatgcccagcgtaacggcgagcgtgatcacgaacacgataatcagcgccgcacggttggttcgtgtcgagttggagcgatgttgcccctgcccagcgatatggctcatctttgcccacccttcggaactcttcttctctctctaggataccgcccatctcagtcaaacactgcggggaggaaggcgatgggcaagcgattggacaagcgacataaaccggttaatcttcaatcaccattcacgaacaccacgcaaaagtctcacttagtggacattcttctttcgtttgttagcctttccccgaggtgccgcactcgttcacccgctaaaatggcggtttggaggcggacggacaatggcgtacctccgactccgcttaccacaagcggagaccgaccgtcctcggttatttcggttatttcggttatttctagcgacacattcccaggaaagtttcgcaaaacagacccccaagcaacccactagaaacacattcccaggaatgcgtcgcaaaacagatatccggacaacccaccagaaccgtattcccggggttcgaatccctctgactccgcgaagtgcgaacaggcccatcatcaggagtttccggaaaacaaaaaagattccaagctttcacccggaaccttaatcggcggagtcagagggattcgaaccctcgagccgtttacacgactaacaccttagcagggtgcccctatcggccactcaggcatgactccacgttacgcaataatgcgcaacagcaaatcactgtaccacgtcctgcggatacgacgtgccgaacgacacattattgaccgtccgcgggcgcggcatcgccggagaacgtaacgataaccgcgcaaatcaccaacgccacaccgatgatttcaccaacgccgggaatctcgccaaacgccagtcccacggccaccgccatggcgggattgatggattgcattaccgaaaatgcgccggatgtggtgcgtcgcagcgtgatctgctccaccacatagggaatgaacgaggccatcagggaaatcacaaacagcagagccagcagcttcagcgagccgccgggctcaagcgcccacgtggcatcggccttggggtgaaccacatgagccacagccggcacgccaaggaacagggactggaccagccagccgatggtcacggcgatgcacagattatccagcgaattgccgccagccgccacgcgccggccggtgatgatgtacatgccccacatcgacccgccgatcaaaatcgcaatcagaccatacaaaaacgtgcccttgccggacggattggccaatgatatgccggccaacagcaccacaccgaccgccgcgatgccgataccgacccgctcacgccagcttttgccggtaatcaccgccaccgaaagcggtcccaaaaattcgatagacacggcaatgcccatatccatattgctgatggccacataaaacagggtattcatcagcaccagcgagcagccgagcagtacgaccagcccccagccgcgggcgtcgcggtgaaacagctgcgctcgcttagccttgctccagggcctgcaccacagcagcaacagcaccgccatgaatcccacgcggtaccacaccgaatacagcgggtcgagctgggtgaacgcaagtttggcgacggccgtagccaaataaatcaccagtgcctcaccaatcacgataagcaccacgggaacacggttgaggataccgaccactgccttcttcacgaggtttacgctactcggagagtcgggacagcgcgcagcgacttggaaggcgttacggacagtgacgcaatgtggacgattccgtggaatcgcacccaccatgcgaaacagccgcacagtgcgcaaacccttggaattccggcgatattcggcattacgacaatgagcgccgcgccatgcgcgccacatagtgagcatgacctcgttcggcattcctacaatggtggcatgagcaccgcaccgagacttgaggccgccaaacgcgattggggtcacgacgagaccggatgcaccgtgctgcatatcgacatggatgccttctatgcctcattggaggtggcgcgcaaccccgggttcaaaggcaagccggtgatcatcggcaccgggccgcgcgcggtggtgtccgccgcgagctacgaagcccggagatacggcatcaattcggcgatgccggccgcgcgcgcccatcagttgtgtccgaacggcatttttctgccagtggatatggcgtattaccgcatgatgtcgcaccgaatcatgcatgaggtgtttttgaccgtcaccgaccggttcgagcaggtttcggtggacgagggctatatggatgtgtccgccgcactgctggagtgggggcggccgagcgcgatcggcgcgtggattcgcgctcaggtggccgagcgcttccacgtgacgtgttcagtgggtatcgcctgtaacaaactggtggccaaaatggcctcgaccaatgccaagccggacggcatgctgctgattccggcggcctgctcggctgagttcgtgcagatgatgccattgcgtggcattccgggcatcgggccgtctttggagaagcggcttaatgcttggggcgtgcattcggtggctgaattggctcagctggatgaggctgcattgactcgtgccactggctccccggctgcggcacgtggattatgggcggcctcgcacgggttggattcccgcgaaattaccacggtgcgcgaggagaaatccattgggtccgaggaaaccctggccgaggatacacgcgatatgcgcgtggtgtgtgggctactgcgttcggcctgcgacgaagtagccagcacgctgcggcgcaaggggctggtggcgcgcacgctgacggtgaagttgcggttcgccgacctgagctatcagacccggtcttttacgatggagcggccgaccgatacggccggcgtgctgtacccggaatgcgtgcggcagctgaaagtcatgctggggctaccggcctcggcggagtctgccactcccctgcccaaaactattcgcttggccggcatgagcacgtcttcgctcagtaaggcggcggctacggccgtgcagccttcactggatgacatgctcgaagaggccgacaatgcccgcggccagacctcacaggcgcgtttgcatgatgccgaggccgcactggacgctgtgcgccgcaaatttggcagcaaggccgcccagtttggggcgtgacggccctgcggcgtggcttcccgccagccgcgcgggctttccacgttggacattaacaaacaccgggcaggcaccaagcaggcaccagcctcttggcgtacgtttccccagaccaatttccccatcatctggaacaacgtacgccgagacgaagcaaacgtacggcacctcagacaagaacgaaaacagtccggaacaacatacaccgagctgaagtaagcgtacgtttccccagacaaggacgaaaaaagtctggaacaacatacgctagctcacacgcggacggccgcgccctcccaggggccaagctcacggttggcgagggagaccacggcgtgcgaggcgtcgtaggtggaaatcacgatatccggttcggtcaccccgtgctgcaccagttcggcggcgtcgcgcggcagatcgaccgttcgtccggacaggttgaccgccaccagcagcttctcgccgccgagcgtgcgagtgaatgcgtagacgtactggtcgtccgcatcgatcagttgccagtcgccggcggccaccaacgcattctcgtggcgaatggcgatcagccgcttgtagaacgtgtacacggagtctggatcgtcgaattcgcccgccgcattgatctgggtatgattccggttcaccgaaatccacggctccacggcggcgtccggcgcggtgaaccccgcataggcggaactatcccactgcattggcgtacgcgcgttgtcacggccgcgggcggcgatgccggccatcatcgattccgcggactgcactttggcttcctcgacccgctgatggtaggcattgagggattccagatcgcggtactggtccagccgggtgaagtggacgtcggtcatgcccagctcctcgccctgatagacgtagggggtgccgcgatgcatgtgcagcatcagacccaacgccttggcggaacgtacgcggctgccctcggtggagtcgtctccccaacgggagaccacgcgcggctgatcatggttgccggtgaacaggctcgcccagccggcattcttgacggccgactgctgcttggcgaaaatacgcttgagctggggcaggtcgagcggcagcggcttccatttgacgttgtcttcgcagtcgaagtccacgtgttcgaacaggaagagcatgtccagttcgccgttggcgggattggtgatgtgctcgttgcgctgggcggtgatgccgggggcctcgcccacggtcaggaagccctcgcgcccggcgaacacctcgcgacgcatttcggccaggaattcatcctgacgagggccgtccgcacagaacgggttcgggttggagtagccctcctcccccacgggcaggtcctcaagttcggaaccgtattcgccgggcagacggccggccgaatcgatacgcttggaaatgagggtgatgacgtccatgcggaagccgtccacgccccggtcgagccaccagttcatcatgtcgtacaccgcacgacgcaccgcaggattctcccaattcaaatccggctgcttcttcgagaactgatgcagatagtacttgccgcgttccgggcaatactcccacgccgaaccgccgaaataggaaccccaccggttcggctcggcccccggctcacccggggtggttcccgggcgggccggacgccaccagtaccaatccgcatgaggatcggacttgtctttggacgcctcgaaccacgcatgctcgtccgaagtatggttgaccaccagatccatcacgatcttgagcccccgcttgtgtgcctcggccagcagctcgtccatatcctcgagcgtgccgaacagggggtcaatgtcctgatagtcggaaatatcgtagccattgtcgtcctgcggcgacctgtacaccggcgacagccatagcacgtccacgccaagatcggccagataatccaaacgcgaggtgatacccttcagatcgccgataccgtccccgttcgaatcctggaacgaacgcggatagacctgatagaccacagcattcgaccaccacggattcggcgtggtgccattggttcgaacggaatcgggaagcacgacacgctgcgcagtagtcatgattgcaacctttctaacgaatgtgacgggaatcccggagggcggcaagaaccctccaggattccacagactgatgacgggatgagacggcttacttgttcgcgcctcgcatcacgccgctgatcacccacttctgggcgaagatgtagacgatgaggatcggggccatggccatcaggtagctggcaaacgccaccggatagttggcggtgaactgcgagctgaacacgaactgcgccagcgggatcgtctgatccgcggaattggacagcaggatcaacggcaggaggaagtcgttccacgcccacagcgcggtcaggatcgcgatggtggcgttgatcgggcccatcagcgggaagatgatggtccagaagatgcgccaggtggacgcgccgtcaatgcgggccgcctcttccagcgacaccggaatcgaacggatgaagccgatggcgatgaacaggttggtgcccaggccgaagatcatatacaggatgatcaggccgaacttgttgtcgaggttccacccgcccatctgcttggccagcggcagcatgatcacggagaacggcacgaacatggctgcgatgaagaagtagtacaggaagcggaagaaccgcttgtccatgttacgggccaccgcataggccacgaacgtgttggtcagcagggtgagcacgatggcgcccacggtgatgatcgccgagttcagggccgcgcgcggatagttcaccatgttcgaggcctcggcgaagttgccccactgccagctggtgggcagggcgaacgtgccggcttcggccggggttttcagtgcggtgacgatggtgaagtagagcggcaccagaatggtcaggctcagcaccgcgaccaccgcggtcagccaccagttgatcttatggtccttgcggaacttgtttttcttgggttgtgcagcaacagcgctggtcatgatcacaccttctccttgctaccgaagaacttgagctgaatgaacgcgatgatcgcgaggacgatgaagaacatcaccgcattggcggtctggtaggcgtattcgccaccggtcaggccgccctggtagatgaggtaggtgaccgtttccgtagcggagttcggaccgccaccggtcagggcgaccacctggtcgaaggtgcctaaggcgcccttcatcgtcaggacgaggttgatggtgaagaacggtccgatcagcgggaaggtgatctgccagaacttctgccaggcgttgacgccgtcaagggcggcggcctcgtagatgtcggtgtcgatggtctgcaggccggcgaggtagatcagtgtggtgtaggccacgccctgccatacggagagcaccacgatcggcgcccatgccagcgattcggaggtgatcatcgattcggacagccaccctatgcccaacgccttgccgagttcggggatcggcatcatgaagatgtacttgaacacgtagccgaccacaagcacggccagggtgtaggggatgaagtagatggcgcggaacccgttgcggaacgcgatcttggagttgagcagcacggcgatgaacatggacagcaggttcaccagaatcgtcaccacgatggcgatgaagaacgtgaacaggtaggcgcgcccaatgcgctcatcctggaacatggccttgtagttggtcaggccgatccatttgtatttgccgtagcccttggaattggtgaaggagtacatcacgccgcgcaggaacggccagtacaggaacaccatgaacaggatcatggccggaacggtcatccagtagtatgcgggatcgaccttgcgatgggagaaagcggagacacgcttcttgcgtggtttttcggcaatggcggacatggtgaacctccttactgtacggtcctggcttggatctgatcccactgcgtctgcattgaattggtgaacgcctcaacgttgccggtggtcagcaggctttgcaggctgccggccatggtcatggacgaggggatgtagtggtcggcgaaatcagcgatgcgtccctccttgtagaagtggaggatgttctgcagagcctcgtcgccggcgtaggtgtccttgaacggggtgaagcagaactgcgattcggcgtattccttgagccggtcctcgtccatcaagaattccacgaacatgcgcgattccttgggatgcttggtggtggccgaaatggtgagcacggtgtcgtcgccggcggtgagcacctgctcgtccggatcgtcggtggcgggcagctgggcgaacttcacgttgatgtccgggttgaccatgcgcacctgcggcacgacgtaggtgcccaggggcaagatggccgccttgccgttggcgaagtcctgggtggcctgctggtaagtaacgcccggattgtcctgcgtgtactggtagaactcgacttccttttccgccacgggaccccacaggtcggcgaatgtggcggtgccgccgctgagcttcgagtattcgctgatcggcacaagtgtgccggccagggaggcgaacggcgcctgagtggtccacggttcggcgaggctgccttcgatcggcgtgatgccggcctgctggatctgcttcatcgcggcgatgaactcggaccaagtttcgggcaggttgtccgggtccagcccagcctgacgccacaggtccacgttgacgacgtagccgttggcgttgccggcgaacgggatgccgtacgcgcggtcggcgctggtgtcgtacagtttggccagatccttgagcagcttgaccatctgcgggttgatgttgtcgaggatctcgtcgtcggtgaagtcctggaagattcccgaggcggcgaattcgccgaagtaacggccgccgtccacggtgaggacatccggcaccttgttcttgacgaagcgcgtgcgcagatcggtggcggcatcggcggtgttgatgatgtcgatggtgatgttggggtgttccgcctcgaatcccttgaccagcttcttgaactggctgactgcctctaccttgtactggaagaattcgagagtgacgtttccggcggtggatgtgccacaaccggcgagtgcggccacgcatgcggcgccggcacagacggcggcgatggcgcgggatatgctgcgggtctttgccgccatacggttcgggcgtcgatcatgcccggaggacgaccagcgctcggtccaagacgatgcggacttcatctgctgcttctcctttcatttacacttcacgacttcgctactccgcgactgtcgtgatgtatacgttaacacccatatttattgatatcaaacggcataattacaggatttctgtaaacggttacattccgtcatggtatgattgtggccattatcgagcacccatgaggaaggttcgcgcgtgatacattccacgatctacgacgtagccgtcagggccggggtgtccgtggccacggtgtcacgaacattcgccaaaccggatatcgtcaccgaggccacgcgcaagaaagtgatcgaagcggccaacgaactcgacttcgccatctcccggtccgccaccgcgctgaaatcgaaacacacgttccgtatcgctatgctcaccggcgaggcgatcgccacctggttcgactccaatctgtacaaggggctgaccgaggtgctgcagacccatggctacgacgtgtccctctacggcattgcggacaccgaacagcgcatgtcgttcttcgacgagctgcccctgcgccgcaatgtcgacgcggtgatcgtggcctcgttcaacgtaaccatggaggagatctccaacctgcagggcatgggcgtgccgctgatcggcgtcaacgtgccgcacaacgaggggttcaacgccaccgtgtccatagacaacgccaagagcatgcgcatggccatcaatcacctgcatgccctggggcaccggcgtatcgcctacatctgcaccgacgtctcggaggcgccgatggaatacagtgcggactcgcgcctgcagagattcgaatcggcctgtgcggcgtatgaggatatcgaacagttgaccatagccctgccccgcaacgacttcaccgtggacgaggcgatcgcgcgcatcaccgtcatggaccagccgcccacggccctatgctgcctgagcgacgggacggcgctgcccctgctgtacaagctgcccaaagccgggatcggcgtgccgaacgacatgtccctgatcggattcgacgacagcgactatgcggccgagttcgggctgaccaccattcatcaggatccgcaggccctggggcgcaaggcagcggaaaaggcgctgtcgctgattgattccgcgacgttcggcattgacctgggcgagccgttcgagaccgcgcgcacgttcctggccatccgcaataccacggcggcgccccggcggtagtcggtgtcgtcaggcgcgggccgattgcagacgttcgcaggcggagcggatggcctcgtcggtggcggtggcggagaaacgcaggtaggcgggagcgccgtagaattcgccggggctggggatgatgccgattttggcgagctcggccatatcggcccagcagtcgccggacttggccttgacccatacgtacagcgcgccggagggcatttgcgccggatagccatacgccttcagcgcgtcaaccagcgcggataggcggcgacggtaacgaccccattgctcgtgcacggcggctgtgtccttcagacccgcagccatggcggcctgcactgggccagggataatctggccgatctgcttgcggtattcggccatttccttgaccagccggtaatcgccggcaatcagagccgtacggtagccggccatgttggactgcttggacagcgagtagagcaccaggatgccagctgccgaaccttcacacacatgtgaattcagggcacatggcgtggcggagagactgaatgcggtatcggaggcgggctcgttggattcggccaccggtgcggcaggcacagacgcagcagatgcagacgtggcaggcgcagaggacaaggctgtattgcggcgcaccgaacgccagtccatcaacgcatagcattcgtcggagagcaccacggcaccgatgcgacgggcagcagccacgatgtcggtcagccagtcagcggagatgacctcgccggaaggattacacggcgagttgatccagatggccttgacgttcggaatattcacccaggaatcgacgtcggtcacatcatcgactttgaccacggtggcgccggcaagttgggtaccgatttcgtaagtcgggtaggagacggccggttggacgaccacatcgccttcgccaaggtgcagcaggctggccatcagtgccacggcctccttggaacccacggtgggtacggcggcagcgttgatggacttcagatccacaccgcgcagttcgcggaaccatgtatcgatagcggccttaaggtcggcgctgccggcggtgaccgggtatccatgggcgttgggggcgtctgcgccggcaaccagcgcctgctggacactgctcggcaccgggtccacgggcgagcctacggacaggtcgatcatgccacccggcacggttttggcggtggctttgaagccggcgatacgagaccagtcgtatggcgacgaatatgcgtggaagcccatgagaacccctttcttggacggtatgttcctaagatacgacgaaccctcggccgtgatagaccgagggttcaatccgaactatgcgctgtgtgcagcgcttatccgcaaatcagcttactggttctgcggcggcagcgcggcgacctgttccgggtctttgccgattgggccattggcggaagcgccgcccaaatcgccgacttcagcgaagaagttgacagcggcatccttgtaccaagcccactcgtccggcagatcatcctcatagaagatggcctcggtggggcacaccggttcgcatgcaccgcaatcgacgcactcgttggggttgatgtacagcgagcgggaaccctcgtaaatgcagtcgacggggcactcgtccacgcaagccttgtccttgacatccacgcaaggctgagcgatcacatatggcatggaatcctccttaacaaatactgatacaagggtacgcgcccgttgggacgctcctcgctctcagccgttaacggccttatcggtttcggcggacagcgtttcggtcaggtcgcccttgccgaggcgcgcatgccagtagccgtagccgaagtagatggcgacgccgaccacgagccacaccacgaaacgaatccaggtgagcacggacaggttgagcatcaaccagaagttggccacggcgatgaggatcggaatccacgggtcgccgggcatcttgaaggcgcgcggcaggtcggggcgcttcttgcgcataatcgggatggagatggccaccagcgtgaaggcggacagggtgccgatgttgaccatgtcggagagcacgccgatgtcgaagaaggcggccacgagcgccaccaccgcgccgacgacgatctgcagagcggccggggtgccatgcttgccggtcttggacaggccgcgcggcagcagaccatcgcggctcatggcgaagacgatacgggtcaggccgagcaacagcaccatgaccacggtggccaggcccagcacgatgccgaagctgatgatcttggcggcccagtcggcacccaccagttcgaaggcggtggccagcgaggggctgtcttgcttggcgagatcggcataggagaccatgccggtggtcaccacggccacgagcatgtacatgacgatgatgagcagcatgcccacgccgatgccgagcggcacgttcttgtgcgggttcttggtctcctcggaggcggtggccaccacgtcgaagccgatgaacgcgaagaacacgagcgccgcgcccgaaaggatgccgggaacgccgtacacggatggggtcatgccggtggcgaactgccacagcggctgggtcatcacgccggtgacggcggaggaaccttccacggtggaggccggctggctcggcggaatgaacggggtgaagttggaggccttgacgtagaagaagccgacgatcaccacaaagaacacgatggcgatcttgagcacggtcatagcaccgtccacgcgggcgccgatcttggtgccgaatacgagcagcgtggtaaagaacgccacgatgatgatcggggcgatatcgatatggaaggagccgaacgccaggttggtgttggcgttccagcccatcaggcgcatgaaatcgttgaggtatacgccccaatatttggaaatcacggagccggccatcagcatttccagaatcagatcccagccgatgatccaggccatgatctcgccgaccgtggtgtaggtgaaggtgtaggcggagccggccaccggaatcatcgaagcgaattcggcgtagcacatcacggctgcgccgcacacgatgccggcgatcaggaagctgatgatcacggccgggccggcgtggaaggcggcggcctgcgcgcccaccgagaagatgccggcacccacggctacggccacgcccatgattgacagatcccaccaagtcaggttgcgcttgagcttgcggccctcttcacccgtttcggcaatggtctgttcgacggatttcgtacggaacagttgcatagtgctcttctttttctctgttgtttgcgcaccgaatgcgcacaataccgacaatcgagtatagaagagcccgcgtgtcttgtctattaataagacttagagtccgcaatatatgggattaatatccaactccatcaatcaatagcgcgattacagcacgccgacgcagaccggttcgggcaccaagtccactccgaacgcgctcttgaccgcctgctgaaccgcacgcgccaaagctgcgatatcggccgcgctcgctcccccacgattggtcaaggccagcgtgtgctgcgtggatagactggccggcgcgtacgcatcgaccttatatcccttatggcagccggcatggtcgatgagccaggcggcggacgtcttggtgccgggagtgccgtcaggcagagtcgcgtcgaacttcggcgcatcttcgggcagggccgccgcttggccggcggtcagaatcggattcataaagaacgagccgcagctgtggcgattgtagtcgggagcaggcaggccgtcatcgccaacgggaacgccggcggcctcattgagggaggccagacgctccagatcggtcaggatattggcctcgcgcttggcggtggccatgtcgggcaaggcgtagcgagtgggatcctcaagcatgcccttggcggcacgtactgcgagcacggctttgcggatgtcggcggtggccatacggtcgcccacttcgacgccaagcgctttggcaagctgtccgtaacctaccgtgccttcggccgagtgggtcagggcaaaggtgacggagagcaccacgtaacgtggcgtcgggaagaatcggtcggccggctggccgggaccggcgtacatgctggccttcagtgcggagtatcgatagccgaatcgaagatcggcgggtgtgaggtcgcgcgttgttttggtgtctcgatcccagacttccaccgattcgaccgaagtggcgacttcctgtccgtaggcaccgatgttctgcaccacggaagcgccgactgtgccgggaatgccggacagtccctcgacgccctcgagcccgagctctacggtgaaggccacgaaatcatcccaattggcaccggcctcggcattgacatgcacggtgcgatcctcgccctctaccggtgcagcctcgtccggcacagtgatgaggcgtcgggcgtctcgaaccaccacgccgtcaaaaggcttatcggaaacaagcaggttggagccgccaccgataacgaccaagggcaggcctttggaatcggcatcctccacggcttcgatgagccccacgcgcgtggtcggctcgatgaaatgggcgatggggccgcccacgcccatggtggtgatgtctgcaaagcttgtcatgacttcctatcttagtggcgcaggtgcgatatcggggcaatcatcggctgaaacggcagaacgcccgcgaggggttcgttcagacgcgggatttctgccatttctcacgcgatgcggatactgattccgcaccctaccactcggctctggagtcaatacgcaaaaacccggccgaatgggccgggttctgtaaagctgtgatgcttgcgatcaacgagtctcgcggtgcacggtctgcttgccgcagcgcgggcagaacttcttgagctcaagacggtcgggcgtattacgacggttcttagtcgtaatgtagttacgctccttgcactcggtgcaggccagcgtgatgcccggacggatgtcggcgctcttagccattgtcattcacctctgtgttcttaggtatagtgcgcgcccaccggttagcgggcgcgatttgtagcgaggaagaggctcgaactcttgaccttacgattatgagtcgtacgctctagccagctgagctaccccgccagagagccccgagtgagaattggactcacgacctcttccttaccaaggaagtgctctaccactgagctatcggggcgtggcggatagtggattcgaaccactgaagcacgaagcggctgatttacagtcagctccctttgaccgcttgggaaatccgccagtctgtttcccgccgcggtgtttgacctcaacaggcaacttggctatataaccacatattttccaagtacgcaaatcgacctctacgcgaaccttgttttaccgcggaattctgcggttttatcggcgtgtctcacagcgtggtttcagggtccgcttcggccctgcaaacagccccgaccaaggctgcaccccgcacttctaccaatcatttttcttatatggtgttccagaaccttgcaatggcgcggttttcgagtggcgtcgcctgcttgcggcggcacagcgcatgccggcatgctgggcgcatggcttctgatcttgtacatcacggacaatcattcgacgaccagccgctcggattcggcacgctggccattcacctcggcaacggggtcgacgccgaaaccggcgcgatccgtcgccccatcacgctggcgaacacctacgcgctgccctacgacgcctcggccttggcgattgccaagcatctcgaatcgctggatgtggtgcgtttcgtggcgtaccccggtctggaatcgcacctgcaccacgaggtggcggccagccagctggcccgcccggactccgggttcggcggcgtgctgtcgttcggcctcgacaccgaccacgacgggcacaaccgattcgtttccaagctcaatgtgattacgtctgccgtctcgctcggccatgactaatcgctgatcgtgttcctcggtgaggatgacgagcgccagtacctgtacccgcctgagttccaccgcggcttcttccgtctggccgtgggtctggaggatacggacgatttgattcgcgacatcgatcacgcgctggtggaggccggattcgaggtgtgagaccgcaccgcgcgcatgatttcggcctcttccgccctgctgccgccgtcagtgagtcacaagatggctcggtgacgacgatggcagggctttttacgtcggcacagggacaatacctggcggtctgccgacgatgacggcacttatcgtcggcagaccgccagtttttggaccgtcgccgacacaaaacgccgatttgccgtcggcaatggtccaaaaactggccctataacgacgccaacgcggctcagcatcggcacatcgccatttcgtggcccactgccgacgctggcctcatgccacggcactcagcgtcggtagagagacaaccattggcacagcgacgacaccacgaacctgcgacacggaaaaaacaacataccgtcgatctactgccgtcttgtgcaaaatgtcttaagccgctcggccaagtcgccgactgagcctcttccatagggaccccaatccgttacccagtgtagatgcggtgcaacgccgaactcaactacgctgcgcgcatgcacctttatgcatagcaggcatggctgggcgtttggcgggagcggttttcggctcccctctctgaggggagcccctttccgcctgacaagagaaaaccccgactgttcgtgggaacagtcggggttgttgaagttcgctaggcgactaatcagccgaggatggcgagaatgtcgcgcgcgccgacgatgaggtagtcctcaccctcgtagtggacttcggtgccgccgtacttggagtacagcaccttgtcgccgaccttgacatccatcgggatgcgctcgcccttgtcgtcacgacggcccgggccaacggccaggacttcaccctgctgcggcttctccttggcgttgtccggaatatacagaccggaagcggtctgggtctgggcctcggcctgcttgacgatgatcttgtcttccaacggtgtgagcttaatcgacactgtgggtcacctcgtatctacttgtagttcgataatgccgcgccagaacgcctcaagaggctgacgatcacttgcgttgtccctttgcgctaggacacatcgtagcgcgattattagcactctgccaactcgagtgctaacgctgtgagagaaaatcggcgaatcgcaacgctcagttgccgcggcgggcaagaatggagtccaggcctgcgcccaacgaatcggtggtcgccgctggcgcttcgacgtcggcacgctcctcggattcgtggaatgcggctcgctgggcggcgtttgcagcctcgtcatcggcgtccgtagcggcgttcgtatcggcatcatcgcgctgctccgactcagtgtctacagcgtttccggcactgacagccttgcccgcatcggcggccttggcatcgtccgcggccttgacggctcgggcctcgtcaatcaacttttccgccactgcgggttcgacaggttccgccttggacacctgacgggtcgacttgatctccaagctttccggagcgttgtcggcgttatgttccccgcccaaagtgaaggagatgagatcctgcgaggtggccatatcgaagacatccagtgctcgggcagggcgtacgctgaccagttccgacgtagcgtcggcagcggcatcgtcgcgctcatcacgctcatcacgcaccgtaagcgatggttcaactcgaggggcgacggacttatccgacttagtcgacttatccgtgcgagcggaggcatcgggcgcggcggaagattcactggtttcggcagcggacttacggtcagcggattcatcgaccatagcagacggttcggcggcaggcttatcggcggcggactgtgcagtatcagacttctcagactgtttggcgtgctccgccgcggcctgatatgcggcggcggactgacgcaacgccttggccttggcctgctcaatctcggcatcgcgtaacgcgcggcgaatctgccgctgttccatgacctcggtggcagcatcctcaacatgctcggaaagctccttggcaggcgcagttacggccgcaaccggttcggccttgttcacacgcttgctgtccttggactcggcagacggtttcttggaccagcccgtaccgctatgagtccgctcgtagcggaccaccttgcgctcccattgccgggcctggcgtgaggcattggctcccagcaccagcaccagcagtaacagcacgaacggaataagagcaagcagcgggctgaaatgcagggggaacgatacggcaaacaccaacacggttatggcaagcaggcatacggcgagaatctgccggcggcggatggccgcgcggcgcagttcccgcacatgggcgatgtgctcaggtgtcagcctcgctgacggtgttgatgctggcattgctgcccctttcgccttatgcggcttgatgtctccgaatcgtctgccgttctctgcatcaacgatatgcagggaaggcgaataacgatcctgccggtgctcgtccacacgtttcatgccgttggccgtacgtacgggcagccatacaacgataataatcgccacaatcaccagcacgacgacagtgctcagtgactcataacccatagagtcaaggataggagacgtaccgacgaactggggctttccgtccgggcgtgtcggagcggaattcttccggtcgacgcttatctggaaccggtggcggcgagtctggcagagaacccttgccccatatcttcagccaacagcgcaaatgttacgtggtcgcgccactggccattgacatacatataccgctcgcgcagtccctcatgatgggctccgaccttacgcactacagccaaagagcgcgcgttatccggaagaatggcgatttccagccgatgcaacgcgggcccgaatgggtctccgagtgcccaatcggcaagcatggccagtgccatcggcgcaaatccgtggccggcgtaccgttggtcaacccaatatccgaccacaccggtgcgcatggcaccatacgcgatggctcccaacgaaatctggccgacgatacgcatctggtattcgatggcgaaaatcacgccgacgccatgctgctcattacggcgctgtcgctgcacccattgattgaaggtgatggagccgccatgcatcgggtcgccggattcccaaggcgccagccagtcgttgttgcgccagcgcacttcgttccagccgtcctcatcgtccatggtcagggggcgcaggattatcgggaaaccgggatgggtgaggcgcggcggacggatctggtggtccagcttgaacgcctctttaatcgactggaaaactgacacggcctttattgtagccatatgaagggcttgcgccttcgcctcggccactttcgttttacggtggaaacactagattgtgcggtatgagcgaagcggacaatggcatgaatatcggcagcgaccacagcggcacggagaaaacagaaaagatggataaagcgacgctgcgccaccatatactgtctcggcgcaagcgcattccagcggaagaacgtggagcggccggtgaattgctggtgcgacggttcccggcacacatgattcaggatggttccacagtggcggcatatgtgtcgatgggttcggaaatcgaaacccggccactgttgcgatggctgttggctcatggctgccacgtgttggtgccacgattgggatctgggttggaaattggctggagtgtgctggattcattggaatccttgcgctcgatggatgcagtgggtggcgcgaacaatgccggtagctgcagctctcccagcaccgtccatcacagacccgatgagccaactggcgcagttctaccgcccgaagcgttggagaaggccgatctggtcatcgccccggctttggcagtggacccgcaaggcaatcgtctggggcgtggagccggctggtatgaccgggccttggctcgacgcaagcccgcgtgccccctgattgcggtgtgctggccgtgggaggtgttggacaccgatttgccggccgaaccacatgatgtgccggccgacggagtgctgacgccggggggataccggcggcttggcgaatcgggccggctgagttgaccggccggccaagatactcggcgcaagccagactgaccaaccagccacgcacactggccgatggaaccagagtggcaaaagcaggctggctagtaagaccgtaacgccaatgtgtcagggcggcgactaggatatgaacggttgcacggcatggtgttgcacgccatgcgcgagaaatatgactttgttggaggaatccgttgcctacctatcattaccgttgcaagaactgcggctatgacttcaccgaacagcagtcgttcaatgacgacccgattaccgtgtgccccaagtgctcgcaggagcaggtgcgcaaggtgtattccgccgtgccgattgagttcaagggtcacggattctaccgcaccgacaaatccggcaagtaaggtcggctccccgtttttcctctgtaaacgacggtgtcgacggcggtatgccgcggatattggcactacgggcactgtctgttgcacgggtttgaagcgttgtggataacttggcaagctagaaccacataggtcgattcagcttgcgcttacgaaaaacttcaggtcaccatggttgcatggtgaccttttcgtttattaagccgcctgcgcgcggctcattgcggcgacggcgcatggcggatgccttgcgccgactcactgctgcgttgtgcgtgggactcgcagtgttgtttgggcttgaagccgtattggccgtggtggagaccgagccgatggtggtggccgctcgctcgattcgacggggtgacattattctggccgccgacgttcagttggctgatatgccggtatctgcgataggcccatcttgggcgtgcaatattgaggatgtggtgggcaaggtggcgcaaatcgatatcgaagcagccgatcccatttccacgcatatggccagagatgcgcccgtagcaccgaccggcactacggtgattgaagtccgcttggccagtagcgtcgacgatgtattggccggcgatcaggtgagactggtttccgccgtcggttgcgaaggtgccgattgcacgctggccgagaacgccacggtgatgaatgtcgacaaaccggatacgactggcgcattgggaagcaacgaccgactggtgtcgttcgcaatgccgccggaggccgcggccaaggttatggagctgcaacaggccggagcgattatggccgttgtgcggtaggaagcggaatcggccttcggccgatgttgtgttttccgcagccgcacggctgcggaaaacacaacatcagagcgcacagagtgcgcctcaactcctactcgcgctcgttgaaaacagcccagtgtggcggcagttcgccgaggatgcgtttgtcgtcgtcggattgccgttgttggtcggtctgcatgtctccgggctcgagtttgacgccgtcagcgtcaaactgctcagtgcctttcatcaccacgcgcttgtgcttgcgcggtgtgcgccgtgtagccgagtattccgccatgattattcaacctcgcggtagatctcgccgatacggctgacgatacggtcgacttccttatcggggttcacgaaggcggcgacactccagacggtcatcacattccagcccaaggaaatgagatcctgtgccgacaaacgatgacgcctgcgcgtggattgcacggacataaagttcgcgtcatcggtctgcacggccaaggcaaacggcttgtccttcaatcccaccacgagcggaatcttcacgcccttgtcgaatccataatcaacagcagcgttcagtcctcgcgcgcgcaacctgtcggcgatatcgtcgaacagcacgttgccgcctgccgcaccacgcaacggaagcaccggacggtcgtcaagctgttcggcccacgtcaacatggtcttcaggaaccgaggaccggactggtgcagtcgttcttcatccaaatcttcggaaccaaaggccgacacaatatccaagctgtggtccgccaatgccagggcatccagcaacagtccgcgaccgcctgtgctttcgagcggaccgaactgctgaagcagacgtccgtgcgtggttttcgcatagcacatcgacagaatcacgtcagtggcacgacctccggccacgtcacgcaaggaaaccagccgcacatggcgcaggaatcggcccatcgccttggatttgcctgccaacgacttcaattcggcacccaagcgtgtgcggaatgcgtcggtcaacatcacgaccacaagtcgatagctggaaggaaccacagcaaaaccggcggcacgttgcgtaatcagacgcaccacttcatcaatctccgactggctggattccaccagaccagaagacataaccggcacaccgctcgcttccacacggtggaatcgcacctcaccggcagccggctcggtggccacatcatagcgaacaggaccatatccctcggattcaaggaatgcggacaggcgcggcgcacggcgagacggggcagcatccacctcgatatgaggcaacgtgtcgatcagctgcttgacgctttcgctggttaccgtcgcgcagtgggcgatcaccaccacctgctgcacgcggccgatgatggacagcaactcgatagcgggaatgtgcgcgcacgcatcgagaatcgccacatcagccagcacacccggctcggtgagtgcggcgagcgtacccggcgaggccaccagaatcggcttggccgcggccagaatctccggatgatcacggcgaatcctgctcagcgacacactggcgcgccctgccagcacggtgtgcatctggttggcttcctgagtgcgggagaacagcatgtcgcacaggcggcgcatggattcctgcgacaccatcggtccgatggagcgcacgtgctccacatcgacctgtgcgaagcggtcggatgcggtctgcagcgcagcaccatcctggttggagatgatggcggaagaacgcacaatgtcctcgaacacggtggtccaccatgccagctgcacttcgccacgcacctgctccacgctcactcggcgagcgttgagatcggcgaccagttcgttcagaccggcagaggcgaattcctgctccagcaggcaacgctccggcaaggtgtccagtgccttgcgatcatccagcagtgctttcaggcgtgcttccaccttctcgaaatcggcggtttccagattgccaccagcgggtgtggtggaaagcacggtatccagcgcggtcatattgctgaccagcgcctcttgggtggagatgatctcgtcgagcttgctgggcagcaccggccaaccgccgtgaggcacgaactgatgccactgctccccttgcttggcgactaccttcaacgcttcgtgcaagtcctcgacctgcgcgccgacgcgcagcagatccttggcttccttgacgtggcggcggcgctcccagaatcccatcgacgtgccctcggccttgcgctggctcttcggcttggtggcctcgatcatggagctgatgtctcgctcgaaaatctctggctggaacacgtcaagcactcgtcgcagattcttcaaaaccgtaacctgacgctcccactcgcgagtggtgggaggaaccgggaatccgcaggtctgcacggtgcgtgccacctgctcacgggtggcgggcaggaagcgacgcagcaaatcgtccacgcgctggtaagcggttaccgcttgttcttcagtggtgatggacgccttgtaccatgcggtgtcttccgggccgatggtgtattcgccgagctcgccggcacgttccatcttgctgatccatgtgtcaatatcgttggcgatgctcagggcacttgactcgtcaagtcgaacgtgggtggcggggtgtgtcgggagcacggagatacgggccaggttctgaatggtctcgtatgcggacacattccacttatcgttgcccccgtgcaggtcgcccagatagcgggtcaagcgcgagcgcacgcccacgagttcgtcggccagctggtcgaatcgctgggtggcgactccgggctggaatccgactgcggcaatcagctgcttatcaagcgcggcgttggcgtgttcatcggatacatccagtacctgcgccttcatctcattggcggaggccgtctggatgaacagacgcttctgctcggccacgccgggcacgtacagcacggaacgaccattcatcaggcagcgcgatgcgatggccacagcctgctccgcggtgcccttcgggaaggtgccgtcgaccacgatgctatggccattggcagcaagtgacgcggcatatcgcaccgtattgtccacatcgccgacttcgtactcggcatgcgggtctacgtcgaaaggactgtattgcggaatattggcatctttgagcgcggtgcgggcggatttgtcgccggcaagcgcgtccaacagcacattgccggtggggccattctccagctggtcgatgaactgtcggctttcgctgatcatctgcgacgaggggtccatgaagcatccgagcacaatctggcgctcgatggcgaagccggagatacgctccgatgcttcggacgaaatacgggcgaacatcgcggaagtttcgggagtgccactgtcatagctggcaccgtcaaacagggaatcctcatccaggaacaccccctgctcacgcaatgcattgacgaacgcggcgttcagggtcacgcgaccggtgaatcgaatggtggtcgacaagccatcatcctcgatcgtgacgctcaccgggtacaacagcaccggcagcgcgttgcccctccacgtggccacgccgaccacgagcgacaactccgccacgccggaaatcctgcgcttggcggcctggtcatccagtacgcgcccgatatggcgttcggcggccttaagcacacccgtgtcacggaacaacgaatccaaccgaacatggccggaagcgaacagctgggcgatgccggagggatgggcatgggtcatctccagcttcgcggccagttgattcacatcctcgagcggcgatggcggctgcatgctgcggtattggtcacgccagcgacggatgcgattcagaccttccgtgagattctggttctgagtctggctctgggtcatctctcgactcactttccaaccgcttcgcggtattcctgatagcccttgttgtgagacagggcttcgtcaatatcggcctcgccacgggcggcgagccaagaatacatgtcgtcgtacaggtacggattcatggcgaggaacgccagtaattcgggatgacgggcgacttcgaactgaacgttgaaatcttgcgtggtttttgcctcgtcagaggtcaggccatcgacttcgactgccggctcctgtgctttcagctcgcccttggccacacgctcgaacaccgagccgggctcgaagaccggagtgtgtacgcccgtggagtagatatcagacgcttcatacgcttcggagaccgactgctgggcggtttcggtttcggtcgccagctgctgatcctcgggtgcgtcggttgccggttgagcggtttcaggctgggtggttgtcggctgggcggtctcagactgagtgttttcagactgggcggcttcggactgagtgccttcagaatgctgtgcaacagcgtccaccggctgagaatcgtcggtattcggagcggactgaacgttttcggctgacttgcttgcgccagccaccacatcggattcaacaaccgccgccgacgccactgccggctcgcttgtgctgggagcgtgcttaacaacggcatgggcgatggcatctaccgggacaataccggagatcctgctgtgcttggatgcgggcgttacagtcgtcgactcaggttcggtctgctgcttcggcagtaccacggagtccatggcctgctggtttttgcgttcggtctcctgctcggcatgctgggccaacgcatccgcgaacaggtcacggggtatggccggctcatcgtttttcgtcactggctgcgtgatattcagcgagccaagttcaagctcgtcgaccttgcgtcgaacattatccgcgctgaagatggcggtcggctcgccggcccgcaaatcaagaatatcgtcgacagacatatccgccgcatccggctcctgcggtgcttcgtgaaccgcatagccaaacaaatcaggcaccttaaggtcgagtggctttgccactggatcgtcgatacgaatgaagtccgcaggcacatcaccgaactgcatgcgcatgggagacgtcggcaacaggaactcgacattggccggcaagcgcaacaaatcaccattttcccgcaccacatacgatccattggtcgatccaagatcgcggaccgaagccgtaccattgctttttaccgtgaacatggcgtgccgtttggacatcgatttggtctgatcggcgacgtcaaggcgggtgttgccatcatcggcaagggggcgtaacggcttacggccgatttccacgcactcccccggcttgacgctgatccggtcgacaccgttgatcttcaccgtccactcgctcaccgtgaccgccttcctggacacactatttgaccacactacgtgccattgtgtcatcttttaccggcttttggcggattactgggcacagaattgacaactttcgctcattgccagctttgtgattccacgccggatcgcgttctccgcctcgccctcgtcaactagtctactcagtatgcggaaaccccgcagcctgaaacacaggtgcggggttcctcgaaaagctgtgattgcggcttatgccgcacaaatcacttgagctcgacggaggcaccagcctcttccagctgagccttggccttctcggcatcttccttcttggccttctcgaggacggccttcggagcgccgtcgacgagagccttggcctcggccaggccgagggaggtgatggcgcggacagccttgatgacctggatcttcttgtcgccgacggcggagaggatgacgtcgaactcatccttctcttcctcagccggagcagcagcgccagcaacagcggcaacagcggcaaccggagcggcagcctcgacgtcgaacttctcctcgaaggccttcacgaactcggagagctcgaccagggtcatctcgccgaaggcttccagcagctcatcgttggggtacttagccattatggcttcctttcaatcttggcggcggacgaagtggtagatccgctgcctaataaaccttattgtttaaattatcgaagcgactgattcatgccgtgagggcgtaaatcaggcagccttctcctgcttttcgcgcagggcgtcgatcgtacgcacagccttggtaggcagggcgttgaacaggtacgcggccttggccatcgatgccttgatgtcgccggcgaattcggcaagcagctgcgggcgggacttgaggtctgccagcttcttggcgccctcggcatcgtagacagtgccgtcagcggcggcacccttgatgacaagagccttgttgtccttggcgaagtcacggatgaccttcgcagcctcgatgaagtcgcccttcacgaaggtgatggcggtcgggccggagagaatctcgtcgagaccctcgatgcccgcttccttggcggcgatgcgtgccagcgtgttctttgccacggtgtaggaagtatcgcggcctagcttttcacgcagatcggaaatctgcggaacggtaagcccgcggtactcggtcaggtagacggcgtcagcgttacggaattcttccgtaagctgagcgactaccgcttccttttcgggcctcttcatggcgttccttcctaagtcggccgttgacttggagttcggaactttcggccgggcaacaaaaaagccctgcgcacaggcagagcaatataatctcgcgaagcgaccttcgccggcccttgacgggcttatatctctcaacctgcgctggcttggcgaaccaaacttcggaaatgcactcgcgcgcacttcaaccaacggtctgtggtttacggatgattagattacggatggtcagcgacattgcagaattcgggcgtgtcgcaaggcattacaacgtggcggcgtactgggctacggacgcggtgacttccttcagatagtcgagcgagcgacgccagtggccgggcacctcgatcgaatggttggcatccgggtattcgtgcacgtgcggggtgagcgcgttggcgcgggctcgatcgtagaacgggtcggcggtgccggcgcagatcagcggtgccgggccggagtatcgggagctggcggcgtgcgactggtcggccagttctgcgcggatgatcgcccttgcttcggccacgctcggagcctcggattcggcgacgatatcatcgccgacagccggcaccggaatcacccgggcggatggatcgaagtcggcgtgatgcagcaccggggtcagcagcacgaacggcagaccgtagtgtgaggccacatgtgggtaggtcatcgtcgtcagcgacttgccgatcagcaacaggcgagggccggacggggtgtcggaatcacggttcggcgagccagctgcgccatcggccagcacggtagcagaatcatcgacggcaacgccatccccggaatcaccggctttacccgcgccggactcgcgcgcggcggccatccagccgtcaatcgcctgattgaggaccggaatcaccgtggacaggtcgtcggaagcgttgcgtacgttcatgcggtcgattcgccagccggcctcgaccagagcctgggccgaccagtagagcagcggacggtcgcagttgtagccggtgccaggcatcagcagtacgcggccgtactcctgaccgggcttgacgacattcttcttccaagaggtgatgctgacttcgacggccggtttcatcgcgcgccttccttccacgggtgtgccctgcgtgtccctgagttgttccgaattattctggcagtcagtctactcccggacccgttcacgttacctccacaagctataatcggccacggttctgattggatgcgcagcgcctgacgcgcgttgggcaggccgatcagggcgagtcgcaattctcgccggggccagccgcagcattatgcgcgcggtgcgcaaccccgcataaaaccaaggaagtagagagtaaatggagaagttcttccatttgaaggaaaacggcacgaccgtctcgactgagattctggccggcctgaccacgttcttcgcgatggcctacatcatcgtcgtcaacccgcagatcctgtcgcagacgggtatgccgtggggcggcgtgttcctggccaccatcatcgcggccatcatcggcactctggtcatgggcctgttcgccaatgtgccgtacgcccaggccgccggcatgggcctcaacgcgttcttcacctacaccgtgtgcttcggcctcggcttcagctggcagcagaccatgtgcatggtgttcctgtgcggcctgatcaacatcctcatcaccgtcaccaagatccgcaagatgatcatcatggccatcccggagtccctgcaacacgccatcggcggcggcatcggcctgttcgtggcctatgtgggcatgctgaacgtcggactgatcaagttcacccccggcgacccgaaagccgcggccaagggaggcgccgtggcggcgaccccgagtctggccgacttcaacgacaaggtgctgtgggtcttcctgatcggcctcgtactggccattgtgttcaccgtgatgaaggttaagggcggcatgctgctggccatcgccatcaccaccgtgatcggcatcccgttcggcgttaccacctggtccaactcgcagtccatcagcgaaaccttctcccagctgccgcagaccttcggcgcgatcttctccgctgagggcttcccggcgctgttctccgacgtctccaagctgcctctggtcatcgtgaccatcttcgccttctccatgtccgatacgttcgacaccctgggcactttcatcggcaccggccgccgcaccggcatcttctccgccgaggatgagaaggctctggagaacggccacggcttctcctccaagatggacaaggccctgttcgccgactccatcgccacctccattggcgctatctgcggcacctcgaacaccaccacctacgtcgagtcttccgccggcatcgccgcaggcggccgcaccggcctgacctccgtggttgtggcgatctgcttcgccctgtccgcgttcctggccccggtcgtctccgccgtgccgtccgccgcaaccgccggcgtgctggtgatcgtcggctgcatgatggccgcttccctgaaggaagtcaagtgggacgacatcgccgaagccatcccggcgttcttcgcagccgtgttcatggccttctcctactccatctcctacggcatcgccggcggcttcatcatgtactgcatcgtgaagacctgcaagggcaaggccaaggaggttcacccgatcatctggattgtggccgcgctgttcattctggacttcgtgtgcatggcgattctgtaacgctgattgacaacggattagcctttaaggattaatccgccgccatacggcataaaggccgggctctcacaagggcccggcctttgttgttgccacagtgatcaacgcccatgagtaccttcgatgatcatccgccattcaatcaacggctggccatgactcggacatggcgcggcacggcaagcggattttgctgttgggcataacaacagacgagagaatagatccggtcgtgagcaacaggataggtgccatgcggtgccgtgtacaaactgttgtcagttgtcaacgctttttagcgtggctccaatcatcttaatggctgttttccgccattcttgatgcatgagaatagttgtcaactgacaactgaatgtacatggcagcagcacgagtgccctattcaacatcgaaatatgtagcgcgaagaagccgaaaaaccaaaaggcttctataccgaatgaaacggtatagaagccttttggtttgcgattaagctcttctcacccgagagaagctagagaacgatcagtcctcgaatgccgaaccgttaagcgggaagccctgcgggcttcccgtaggtgaggggggcggctatgccgcgaccgatccgtgagagggctttagtcctcgaacggatcaaagtcgcgacggacgcggcgacgcgggcgctcagtgcgctcttcgcggtcggcgcggtagtcgtcgtagttgtcgtcggtggcgtagcgcgggttgcggtccgagccacggccacggccgccacggaaaccgccacggcggtcatcacgatcgccacggtcatcgcgatcggaagagcgacggcgacgcggacgatcatcatctcgggagtcgcgagcatcacggtcatcgcgatcgtcgaagtcacggtcggcagaacgacggcgacgcggacgatcatcatcgcgatcatcgcgatcgaagtcacggtcatcggagcgacggcgacgcggacggtcgtcgtaatcatcctcgaagtcatcggagcgacggcgacgcggacggtcgtcacgatcgtcgaagtcacggtcatcgcgatcggagcgacggccacggctgccacggcgatcgtcacggtcaccacggccacggccgccacggcggtcatcgcgatcgccacggctcggtcgggcgttgttctcctgatcctcgaaaccagggatggccagggagatcttgccgcgatcatcgacaccctgaacgatcacctcaacggtgtcgccttccttgagcacgtcttcgacggcgtcaatacgctcgccgttggccaggttgcggatctgggagatgtgcagcaggccgtcggtgccgggggtgaggttcacgaaagcgccgaacgacgtggtcttgacgaccttgccgttgtaggtttcgccggcctcgggcacgtgcgggttggcgatggaatcgatgatggacttggccttcttagcggcctcgccaccctcggaggagatgaagacggtaccgtcatcctcgatggcaatttcagcgccggtatcttcctgaatctggttgatcatcttgcccttcgggccgatgacctcgccgatcttctcgaccggaacggtggtggtgatgatgcgcggagcaaactcgctcatctcagccgggccgtcgatgcactcgttaatgacctcgagaatcgtggcgcgggcttccttggcctgctgcaaagcggcggccaggatgtcggcggggatgccgtcgagcttggtgtcgagctgcagggcagtgatgaactcggaagtaccggccaccttgaagtccatgtcgccgaaggcatcctcggcacccaggatatcggtgagggtcttgaagatgtgcttgccatcaacgtcgccggacacgaggcccatggcgatgccggcaaccggggccttcagcggcacgccggcagccaaaaggctcagcgtggaggcgcacacggaacccatcgaagtggaaccgttggaaccgatggcctcggagacctggcggatggcgtaggggaactcttcacggctcggcagcaccggcacgagagccttctcagcgagggcgccgtggccgatttcgcggcgcttcggggagccgacgcggccggtctcaccagtggagtacggcggcatctcgtagttgtgcatgtagcgcttggactgcggaccggacagcgcgtcgatctgctgctccatcttgagcatgttcagggtggtgacgcccagaatctgggtctcgccacgctggaacagggcggaaccgtgcacgcgaggcacaatgtccacctcggcggacagggtgcggatgtcgcgcaggccacggccgtcgatgcggtagtcctcggtcaggatgcggcgacgcacgatctggcgctgcagttccttgaaggcgttgccgagttccttgtccttctcggcgtcgtccatgtcggtgaactcgtccgcgagcacctcgcgcacgtgctccttgatctcgtggatgcggtcctggcgcggcagcttctcggcgatggagagcgcctcgtccagatcctgatgggcgatctcgtcgatgcgggcgtacagttcgtcggtgtactccgggaagagctggaactccttggtctccttggcggcgatcttcttgagctcgtcctgagcctcgcagatcaccttgatgaacggcttggcggcttcaagacccccggccacgacctcctcatcgggcttggtctgaccctcgtcatagatgaggtgccaggcgttcttgccggcaccggcctcgatcatggcgatggcaacatcaccgttctcgatcacgcggccggcgaccacgatctcgaacacggcgcgctcacgctcactccaacgcgggaaggcgacccactggccgtcgatcagcgccagacgcacaccggagaccgggccttcgaacggcaggccggagatcatggtggaggcggaagcggcgttcagggcgatgacatcgtaagcgtcatcagggttcacggcgagcacggtctcgacgacctgcacttcgttgcgcagggtgtgcgggaacagcgggcgcagcgggcggtcgatgatgcggcaggcgaggatggcctcggagctcggacggccttcacggcggaagaacgagcccgggatcttgccggcggcgtacatcttctcttcaacgtcgacggtcagcgggaagaagtcgtagttctccttcgggctggagccggcggtggtggtggacagaatcatggaatcgtcgtcgaggtaggcggccacggcgccatcggcctgctgggcgaggcggccggtctcgaagcgcagcgtgcgcttgccaaacgatccattgtcgattacggcctcaacggccttgatttcgggaccctccatagggttcctccttctttaattttctaattattcctacatactgtgctgcggtttggcgactcgcttgaaccgcaactgtcctcttcagcggacgtcacataccttgtttcgactggccccttggccgccgttcctcgtgtcaaccccttcattcgggttctcttgtcggccttacctgctggcctatcctctaaccctcttgccgttgttgccgttggctggcgatatgtaaaacgcccgagcaccatcctaggtactcgggcggaagtcttcaattatcgacgcagacccagacgctcgatgagggaacggtaacgctcgatgtcgacgcgcttgaggtagtcaagcaggcgacgacggtcaccgatcatcagctgcataccacgacgggagtggtggtcgtgcttgtgctccttgaggtgctcggtcaggtcggcgatacgcttggacagcagagccacctggacctcgggggaaccggtgtcaccttcgtgcgtcgcgtactcgttgataatctgggtcttctcgtcagccgtcagtgccacggcgtcctccttattgtgtcgttgcgcggtgtttcgtgcaggttcgctcgaaacgctctctatccgcgggcgaaattacgccaaatgaaaactatacggcaggggccggactggggcacacgcgctcacacagtggtgagcaatccgccaaacaacaccacgagcagagcgatggtttcaatcacgaagtacagaatgaaacttgcccagcttttggtcagtacgttcagcggcgaggtcttccggataatcaccagcagacccacgaacatcagggcatatacggcgatgccgatcgccgcacccataatgcccagattcgcggcattcgccaggccggcctgcttaccgtagaccacgtacgtggaataccagaaattgagattgagcatactgagtcccgcgatgaactgctcgccggccaacccgatcacgaacacgatcaaccacggccaggacggcgagacgaccaccgccatcgccaatccgacgtacgcaatcaccacggtcacccaaccgaccagtgcgatgccttgcggagacactcccccgagcacggccacaatggagtcagtattatttaccgccaacgaacggccgaaccagtacggcgcaacgatggcgcacagtacggcaagaataatcagcgcccaacgcaacggatgcgaacgacggcgctcgatatccgccagagacaaatcggtctcgggtatggaagcctcggggtgcttggaaacctcgacggtctctactttgccgcctacgatttccgtcgcctcgttaggttcttgctcgttggattcctgctccatgcaccgcctcgccgattacctgctcattgccgattattgcgatgcccatcttagcgtgcgtgttgggcaagtctccggtacgatcgattactcgccatggccctcaccatgatcctcgctacgattctccttatccgaatccgcgggagcaacgtcattattgcccgcagacaagccgcaccattcgaggaattccgggagtactgcgtcgagcgttggcgcatttctgcagcatgtcgtcggttatgccggtgagcgacgtgatgaatgggtcgagatgttgtttcgggttgatgagtttttggtattttgcaatgggtttgcgccccacgaccttgactgcaccgatttcgatgatttcgtcatctgcgtatcgcttaccggtggtttcgaggtcgaggacaacgtaatcatcaggcaagaggccctgctttgtctgcctcgcggggatctcaggcgatgcatgaggcttgggttccgcgtatccggggtttgcgcggccgtcccagtgaccattggccgctcgttttcgctcgcgttcgctatcctcgtccagcacgatactgggatctttcgcggccctggtggcacactgttcggcccgaatcttttcggggtcgtgaatcatgtcaccgatgacccacagcatccatccgatgaatgagatgattagcgcgattatcgtgcatgtcaggaaatcggtgctcaatccgccgacgaaaatcagcagggcgaatatacacgctccgattgccaaaatccggaatatgaccatgccgacggttctgggcatcgacgcctttcgcttggcctgacgttttccgggcatcatgcctccaacctcgttgttcgttcggtcgactcgatgcggcttgtttagatcctaccgccgtatatacggaatcgccccaatcgctctctgcgagcgtcggggctttttttgcttgtgccgacacaccttcatacgctttgcctcgggcggattcggcttattttgtctttttctgagttagactatagatggacttggggctgtcgcgcgtggtctgggtccggtgagggtggcgcccccgctgattcgtcgggcttcttctcttcggagctaggggctgatggcgatgactgcgggggtgcgcttttctttttgtggtagttgatgccgaatttgaggaaatcgagtattcggatgtctttgcgcatgtctgaacccagtgtttgtttttcctcgatgagttgttttgcctttgctttcagtaggtcttcgagttcgtcggtatcgatttcggactgattcagcaggtagaggtgtttgtacgcgtcttctccgaattgttggcgcagcccggcgacgctccttattgtcagttttccggcttctttccactggtcgcggcgttttctttgcgtgggactgaggtatgcgttgacgctgtcttttctgtttacctcgtcacgggtttttgcactaagcggcccatcgtaattatcgaggtagtagtacatcgggcttccgccctgtggaatgtatttgtcgatgtaggtgttcacgatgagtgatgcgggaaggtttttgttgtggaagaggaagtcggcatgtagctcttcggatgacactggtatgccgtacccctttttcccgatgccgatgactatatccatgtcctgcgggagttcgtctatgtttccgatctcctcgaatatgactttttcggcgcttcctccggtgtatgacgcctcaaatagttgtttggtgatctggttgaggagtttgggagcgtatcgcatgttcgtggatgctatggcttcgtagatcggtgtgaagtcctgtgtgcttatcgccgtcatttcgacgatttgtccatcgttgacggcgtagttggtggtcttaatcgatttgtcggctgaatattgcacgaagatgaatcgttcggccatttcgcgggcgcgttgttcacccgcacacagggcgattgatgagataatgtcccgaatgtcctggtccttcagcgagtatcccaagaagatgattgggtattcgccgaagatggtgaggatctttgacagcaggtagctttgcctttctgccagccgacggtagtcgcgttcgtcgataatcatggaatcggggggaatcggacgagccgtgaatcttgtatatctcgccgatgccagccagcggggagaagagaaggtcgctttggttggcgaatgtgtcgtatttcgggaaaaccgattccatgaggccgtcgtagttcgtcgtgattaccccggccacgtgccgcgcagctccgcgtagcacatccagttcatcaagattcatcgagggtcggaattcggccagatgttcggctatgtatattttcatggccggcgttccagtctccatctcggcacggtgtgcctccgcccaatcggcgagaggaccgtccagcgccccgatgaagtcggcttccatcagcgtcgccattcgtggatataggatgttctttcctgtatcttcactacctgcggctaactgcttgtacagatagaagggtttcatcggctttccgacggattcgcatacccatttgagcaggccttcccagtcttcggcacccatgtaccttcgggagatgccggagcccacgaacaagaacggcaccctattggcggccttcagaagggaagccaccgcgtttctcacatcgtcgttaaaattttcgccgtcgatcatcaccgtttcccgtctatattgtgactacataataccgctggcagtcatcgccataccgtcgatcaccgcaccaagtaaaaggcagctgatgtattcgagccgccccagcgcactagggcctctatacctgcgtcacatgattgccgaatatgccggattcaacgaatatgcgcgatattagattcaagtgtcttcggcctatctgtggcgtgttgcattcccggaattcgcataacttacttagtcgagctataattattgtgtaggcaaaacagaatagcgaaaggaggtgatgcggttgagatgggatatggtctcggtcatcctcacggcggcgatgctcctgctccagctgatcgatttcatcatcgacaagctcgacaggcggcgtaaaccgaagcatcggcgctccaagaagtagagtccgggggattccagatatcggtagtatccagaatccccctctatcccaatcttcccgcaatcatcatgaaaaacaaaatcaatgcgatatccagcatgctgctgggagcggccacggcgtgcggcgcgttcgccggcttcgacccgtgggtgcttgccgttatggccgtcgccaccggcttcctcggcctcatggccggctctacaggaggggacaggaaagatgactgaacgttatctgagcctcaaggaggtcggcgagcgcatcggttcgagcaatccggcggcgaggggctatcatctgccggaaccggacgctctcatcggttcgactcgcggctggctgccggagacgatcgatgcttggaacgccgcccgtcccggtcgtgggtcgggcggcggacggccacgcaagcgtcgtgaggatcaggccggttcggagaccgcctgacgagccttgtcggcgagcgccgcaaggctcgcggcggaccagtgggtgtatccggccgtcgtgctgatttttgcgtggcccatcatcgcttttctcgcgtcttctggggctctggcttcggcgaggtgcgtggagaagaagtggcgggcgcttcggatggtgatgtagggcagtccggcgtcttcgagagagcgtttccagcggcggcgttccacggtgttggtgagcgggtgtccctcgcgcgtgaatatgagctggccgggctggcattgcctgcggccgacgagcgcccagagtccgagccacgtctggttgctgacgggcacgaaccggttgccctgcttgcttttcggttcgacgagccagaagcatccctcgtaatggcaggggcggagccagttgggcacttctgcatcggatctgaagcgttggagctcccacatgatctggattccgtgcacaccgtcgacggtggcgagctcttcgggcaggatggcgaatctttcggcctctctcatgccggtctcgaacatgatgttccacatgaggctccacatttcgcggtcgtcgtcggtatctgccaggtggctgtatttgcgacgcttggggtcgagtgcggcctgcgctgcccgggccggctgtccgggttcgaggatctgggtggcctgcgactcgtagcgcggcggcgttgcggcgagcgccgggttcgatgggatgaggcgttcgcggaccgctgcgtcgagcacctgcttgagtctgagatagtggttgtggacggttttgcttcggtgttccttggcgagtttggcgcacattccgtcgatggtggcgggggttattctgtcgagtcgcattccgccgatgacgctgcggatggtgttgcagtcggatcggtaggtttcgagggtgcggggtttgacgttgggcgcgatggtgttgagccatcggtctatccacacgtcgagggttgggacgtctgcgaggggcaggtcgccttctcgttgaagtttgtcgagcttggtctggagtttttgtcgggcggcggtcttggtctgcgcctgcgcctcgatccagcggcgtcgtccggttcgtggattgacgccggcgctcttcttcgcgtgccagactccgttgtcgtcgcgccattcgcttccgcttccgttgggtcggcgggtgttcttctgctgtgtcatgggcttcaggcctcttccttttcgtgcggtcgaggtcaaacattaggtcaaacatttcgggcggaaattggtggacttgggcggaaaacttgcatcggcatgttttccgcaccgaaaacaccgaaggccgcaaccccaagcaattccaagggtttgcggcctctctcagtggagcggatgacgggaatcgaacccgcgtaatcagtttggaagactgaggctctaccattgagctacatccgcgttaagcgtcgcttttggcgacttgagttattatacatatttcttcggggatggcaaacgcgtgtggttgcagcaggaccagccaatctagttgatggattgtggctttgccgaggactcccctcagccgcctacggcgacagctcccttcagagaggggagctggaaaccgtcgaaatcacaaatgggtgagctgagactcgtatggttggaggtcggcgtccattgcgtccagaatcacgaaccagcagttttcgggcagcgagtcgagcttgtcgatttggttcttgagcagacgcacgtcgcggctggcgagcgcgctccacaggttgaccatgatggagacgttgtatagcatgtggcactcgggggcctcgggcgtgccgaagtaggcggcgaggtcttcgttggtgccgagcttcgggtccacggtgtcgaagtcctggaccgcatagccaccgtcgttgttcgggtgcggcatgtcaatcaacggcatcaagtgcaggtaagtgagcttctgctccttcaagtacggaatcttgtcggcaagtttcttgaggtcgccggcgaacaggtcggtgtacatggtcatgccgaacatatcgccgcgcttgcaccagtccggatcctgcctgtgccgactggttgctttgagccaccggaaactcctttgtctctatccgttgcctacatcaatcgtttgacgtattgtattacaatgaatcaaaccggttcgataatcacaacccaagactcgccgagccaccggcgctattccacagaaatcgtcaccaccgcggaggcaatcggaccatcgtggctcagggaaatatggatatgcggcatcgaccccgcaccgagagtcgagcgctgcgccgaacgcgcattccgccgctcctgcatcactgcataaggcccgttatcggaagcaggggaataagcagaggaatagcgagcgccggcagccgaattcgcgtaatcagtttggaagactgacgccgcccccttacccagagacacatgcggcacaccacgggaatcgtccaagatctcgatttcaggccacgggaaattatcaagcgtgaacggatagggggcatcgccaagataatcgcaccaggctttgaggaacgcctccttgcccgcccatttggcggccagatggacggcttccccgtcattcttctggcgcgcgcggtcggatgcctgccgcatctcacgcacggagaacagcgcacgcatgcgagaccccggctccgccaactgttcggcgaatgcggccacatccaccacgtcatgccccaaaccacaagtattcatgcttcccattgtgtaccgcttcgcgcgtaatctctacacctcatcagaattggggcctgatttccatttcagggggaaaagattcactatgctggatgacctcgcgcaataccgcaaacatcttgggctggctgcctagccgtccaaaaaaacatccgcgccccgccccggaggtctatctccgtttcgaggggcggattttgaccgttccggaggtctacttccgtttcaaggggctggtcatcctccataccacgggtatccgcagcataacgccaacgccattccgccgtttttacgccttgtctacttgggcaacagccccttgaaacggaagtagccctccggcgaatgccaaatcagccccttgaaacgcagaaagctcactccgagggaggggctttcgtatgttctgcatatttctctcactgagtttgtgccagcgagaaagctccaggggaaactcccctcacccgcttcgcgggagctcccctcaaagaggggagccgagatccggtgcgctactggctcccatcaaccgaggggagccagaggaatcaggcctcgtagtagccgtcggcaccgaggcgggcgtccgggttgaggagcatcgccttttcgacctcgtggtggtcgtagccacggtgatcctcgcggaagcgacggttgtcgatcggctcgtagagcgcggcgcgacccatcatgccttcctcgaggtgacgctggccggcggccaggcgggcgttggcacgctcacgccaggcttccagcgcggcctcgccatcggccttggccacggccgcttcgaaggcacccggatgaaccagggccacgaagccggaaacatgtccgaagccgagcgaggtggccagaccggccttgaccgggcgaccagcggtctcgcgaccgaactcgtcctcgccaccgccgatgcgcaggggcttcctaacccagaccatgtggtcgtcgcgctggagcttcggatccacgcaatcgagcgccgcgttcgccggaatcacgccggacttgaacagctgcgtcagaccgttgacctggaagatgcaggcaccacccttggcgtggccggtaagcgtcttctgcgagatcacgaacagcgggttgccgtcggtgcggccgatggcgtgggccagcgtgttgtgcagctcggattcgttcgggtcgttggcgttggtggacgtgtcgtgcttggagaccacggcgatgtcgtcggctgagacgccgagcttagccaggtcgtgcacgagcttggagtccttgccaccgaggccggcagccagggcaccgaggcccggagccgggatcgaggtgtgggcaccatccgcgtaggagtggatgaagccgaccacggccgcaaccggcaggccgagcttttcggcgatgtcaccgcgggtcacaaggatcgtgccgccgccctgggattccaggaagccgccacggcgacgatcgttcgcgcggctgaagaagcgcgcgtcgatgcccttgccgtacatttcctccgagttggcggtggcgttcatgttgccgaagccgatcacggattccacgccgatgtcgtcgatcgcgccggtgaccacgaaatcggccttgccgagggcgatcttgtcgacgccctcttcaagggagacggccgcggtggcgcaggcggagacgggctggatcatgttgccgtaaccgccgatgtaggactgcatcacgtgagccgcgaccacgttcggcagggcttcctgcaggatgtcggtcgggatctcgtggttgaggaagcggtcgaggtacagcttgcgcatcgacatcatgccgccgaagccggtgccctgggtcgaagccaccagcgaggggtggatggactcgaggatttcggccggggtgaatccggcgcccaggtaggcgtccacagtggtgacgatgttccacagggcgatcttgtcgacatcgccgaccatcgaggcgggaatgccccatcgggtcgggtcgaagcccttcgggaactggccgccgactgtgcgggtcatggtggcgcggcgcggcacgcggatcatcgagccggcgtggcgggtcacgttccattcgccggattcctcatccggggcgatggtggtgtgagcctcgtccaacttgacgtattcggcggcgacttcgcgggtgggcacagagaaggtgacgtcgtggtcgaggaagacctcggcttcttcttcgtcagcaccgtccttgtagtcgttgcccatgccttcctcgaacgggcggatgccggagcgggccacgacctcgtcgtggtagcgctcggcgatgtcctcttcgggcacgaggttgccgtcggtgtcgtaccagccgggcttcgggctgtcggcccaagtcagcagacccatgttccacgcaagttcgagcactgcgccggcgctcaggtcgacagtgccgtccgagtggatgccgagctcggcctgggtgcgcgtacgaccggagccccacgggcccagctcaccgacggaaacgatgacgatttcgtcttccggcttggcggtgacgttggtccagtcgttgaggtcgaccgaagcctgcttggtgatgatcggggtgggcagcgccttgatttgctgcccacgcgaggagtcggacagtccagtggactgtccggcgacggagccatccgtttcctgagacgaggccgcagcagcttccttctccgcatcggccatggcctccgcgcgcaacgccttgatgtcgatgggctcggagccgaggccaccggtcaggtccacatcgagcggggccttgagggcctgctcgcgcgattcggcagtgcacaggtcgagcagcttggccgcaatctgcgcggtggagtaggtgtggatgccgtgacgctcaacgacggtgaccagcgggtcgttaccgcccatcaggccggtgccacgcacccagccgatcttcgggtgagcgaaggtgacgcggctcgaccacaccttttcagcgcgggcacggttgacgatggcgtcaaaggcgctcttgacttcgccgtaggcaccgtcgccgccgaatacgccgcggttcggggagccgggcagcaccacgtggagcttgtgctgcacgttggtgtcggcaccgatgtggctgaagccggcgatggcgcgttccacgccccacagcatcagtcgcgcctgtgattcgaacaggtcgccggagtcggcgagcgtgccatggaccggcggagcggcgaacgggaagaacagggtcggctcccacgcgggcttcagaatcgtggtggtggcaccggaggtcttcttctgctcgtggcccacccagtcgaccagagcgtcgacgtcgcggtagctggagaggttggccggaaccagccacagcttggcgttgccggtggcgtgctcgcggtaggcctgcttggcccaagccttgatggacggcttgaagctgtgcgaggtggccaccacagtggcaccgcctgcgagcaggccttcgaccacctgagcggcaatcgagttcgggctcacgccggtgacgatggcgatatcattcgcgtaacgggaggcgttcttgttggaagcgacctgttcgagggcctcggagccggccttctggaaggcggccttgagctcatcgttgttcgacttgtcggcgaaccactgggcttcggcggcgatggtcttgccaaggccgatgaagctgccgttcaaggcggcggggtcgttgccgtagtaggcgcgggcgaggtcttcacgggcggaggcccaccggtcatcgaagaggatggccttgttggcgtcgaagcgcggagcgacctgcttgggccagtcggagccaagttcggcttcgaccgcggccacgacggcggcgttctcgtcctcggattcttccggagccggagcggccacgccgagctcgttcagcacgaagcgggcggtggcggcgagcacgccgttggaaccggtgactttctcggcgaaggcgtcgagcgcggcggaatcgaccacagcgccaccagcggcaccaccggcggacggcagggccacggcaacacccttgagctgggcgacgacctcaacggccgcatcgatcagcttgtcggcttccggcttgttctgcacggcggcggtgggcagcttggccaggtcgccgccacgggagctggcaccctcgcgggtgtcgagcagcagtgcggcgagcacgctggccacccagccttcgccgagctgccatacgttggtcacgcggtcgcggatgtgctgctgtttgacgccggcggcaccgaacagcgagcgcaggcggtcgcgcagcgcctcggagagcacggcaccgaacggcttgtagttcggggcggccttgttgacgatttgggcgagcttgtcgagcgtcgcttcagcagcaccgtccacgctggcgactcccagctcggagctgatgtccatgagcagctggttgcggcgagaagagacaccgttggtcagggtgtcggtggtgtcgttgctgccgatctggtcgaggcgcaccttggcggagtaggccatgagtacgccgatggcatcggaagccttgaagggcaggtcggcgacgacggaaccagacggtgcgccgactgcggcctgccctgattgcaggccgcgcgaggagtcggacagtccagtggactgtccggcgacagagccatccgttgtctgagcagcctcagtcgcggcatttgccggagcagcacccgatccgagcttggcgacggcggaaccaccggcaggagcggtttcgaccggggccgaggccgcagcctcttccggctcgtcgtcgggaaccagcgaatcggtgtcggtcatgtagacgcggccttcatcgcgaccgacgttgtagacgaccgtatcgttgccggcgaactcgggcagacgcagggtcttggtaccgaggttggccagggtcggggcgttgccgaggccgacttcgacgtattcttccacgccgaggccgccctgttcgcgctgaccgaagagcagcgcctgggtttcaatccaacgcaccggggaggcgaactgccaggagagcagttcggtcaagagcagacggccgagcttctggtcgtcggcggcgtaggaatcccacacggccgggtcgtcgagcgcggccttgatgcgctcggacggcacgacttcgaggatcttggcggcgaattccttggtcatctcgaacggggtggccaccaggttcgggatgtagcggtccaccagacggccacggtagtcgatgtaagcgggaagcagcgcgtcgagcttgtcgcggaattccggcacgcccttgcgcagtagcgtggagtggaacggcacatcgatgccgggcaccagcatgaacgcgggcttgccaccgaatgcggccacgcggcgggcggaatcggccttcagggccttgagtccggcgatcgtaccggcgatggcgtactgctggccggcgaggttgtagttcacaatctccaggaattcgccggacgccttggccacggattccacatattccttgacgtgcgcgtcgtccacaccgaactggttcggacgaagggcacccatgcggtagttggagcgaccctgtgcgtcacgctcgatgaggtggtgcatggtggaaccacggtggaacacgagctccagcacggtttccagcggaatcacgtcggcgaacgcggacaacgcgttgtattcgccgagcgagtggccggcgaagtaggcgggccagatgtcggcgccggcttcgcgcagacgggcggtctgggcaaaagcaaccgtcgcgagcgccacctgcgtgaactgcgtcaggttgagcaggccttcggggtgacggtaggtcacgccgttggcggtgagttccttcgggttgtcacgcacgaggcccaggatcgagaagccgagcttggagcgggtgagcttgtcggcgcgctcccacacgtcgcgggcggcggcggacttggcgcgctcgtccagaaccatgccctgcttctggatgccctggccggggtagacgaaggcggcgcgcggcgcacggaccagtgcggtgccgcgggagacgagctggccgtcgatacggcaggtgacttcgagggtcatgccgccgtggcgcactttgccgacgcgctcgacggagatttcgacggtgtcgtcaagctggaccatgccgtacatgttgtaggtccagccggcgatctcgtagtgggtgcccttctcatcggtcgcctgcacggcgtgctgggcggtggcggacagccacatgccgtgcacgagcggggcggccaggccggagatgcgagcgccacgagtggaggtgtggatcgggttgaagtcgccggaagtgcgggcgaaggcggtcatgtcgtgtggggcgacgaccttcacgcggcgcagcagacggcgcggagtggcctgcactacttgcaggccgcgcgaggaggcggacagtccagtggactgtccggcgacggagccatccgcttccttattcaggagggcaccaccatactcgggggcgtctgcaggcaaagcatcggagtagacgcggccgcggatcgcgaaacgctcggtttcgcgggcaagcggcgtgccgtcggcggcggtgtgggtcacgtggatggtgaccacgcggccggaggcggactcgaagtaatcctcggcccaagacttcagggtgatggtttcgccggtgtgcttgagcaggtcctcctcgttcacctcaagttcgatgaggtggtcgaggtggacggcgttgagcaggccttcaatcaccgggtagcccttgacgtacacggagccgagcgccgtgtagattgccggccaggcagggccgaccagcgcatcgggggcgatgcggctgggctgcagggtggtcggcagagcggcgccagtggccgcttcgtggtcgaagccgaggttggcggatagggtgtaggttgcggttgcggtaccgaacggacgctcgtcagaggtcttgtcgtcaagcttcggcatctcggtgagcttgtcgccggtgatggcggtgttgccgatgcctgcggtggcggcgagcatcgcgtagacgtccggaatcaggcgttcgcggtccacgaccggcacacggccgggctcggtgccttccacgatgagcgggatgacgatatcgcgcacggcgtgcttggaggtgccgccgtccgggtcgttgtcccagtaggtgtcgaggtggatgtccagatcgtacttgccggccgcggcgtcaaacgcgcggatttcgtagtactggtcgcccagggcggtgccgtaggccgggttgtcggtgatgtggccgacccaggagatgttcggggacttgcggatgaagtcttcggcgctggtggcctcgccaagtgcggcgaaatcgtcgttctcagcggcatcggcggcttgctgttcgtcctgcacgcgcttgatggcggcggtttcgaagcggccgaggatgtcggcgatcggctcgtcgatggtggtgatgccggcaacggagatcgggccggggatggcacgcacggaatcggcggagtagcgctggtcttcggactgccagagctggtcctgaccccaccaacgcagcaggtcgttgtcgatgacgggtacgaacggcatgggcttggggtattcgcgcacgagcaccgggaaccaagccacgtcggttgggaccaccttgagttcggcggtctgcgggtaggccagtgcgagcttttcgagcgcgggggccgggtcggcgagaatgtcgtcgtgggtcagcaggccagcggcagctgcctcttcagcagaaacgccatcagcggcgaacagcttggaggtgaattcgccggagtccgtgtcgttcacacgggcttcgatgcgctgcagcaggtgctggaagcggtcggcgtaagtcgggtcgacccacgggaaggcgagttcggcgaagcgctgcgcccactcaaggtaggtcatggaggccagatcgccgaagtaaggcttggcggtcttgttcagggcttcgatgatttccttgcggcgggagtcgagctcttcggggtgcttcatgacgcgcacgagcagacggccgcattcggcggagtcgttctcgagctcgtaaatgtcggcgtgcaggtggctcaggccggaggacatgccaccgacggacttgccggacggcacccagtgggcggcctgcggggcgaacacgtcgtcggacttggcgtcggccggaataccgggcgtcttgacgagcagctgcttgacttcggggctggtgtgagcctccttggcggtcatcgcggcggtaccgataagcacgccgtcgaccggcatgtcgggcaggccgtaggcgtgggcccactggccggaaatgtagtcggccgcgcgttcgggggtgccgatgccgccgccggcgaccagcacgaggttgtcgcaggcgcgcacttcggcgtaggtggcggcaagcaggtcgtccagcgcttcccagctgtggtggccgccggcttcaccgccctcgacctgaaccatgatggtggtgggggacacggccttggcgatgcgcacgacctgacgaatctggtccacggtgccgggcttgaaactcacgtacggcagaccgtccgcctgcagcgactcgatcagggccacggcttcgtccagctcggggatgccggcggagacgaccacgccgtcgatcggcgcgccggatgcgcgcttcttgggcacgatgcgggaggagccgaactgcaggttccacaggtaacggtccatgaacatcgcgttgaattcgaccgtgcggccttcctccagctcgtcttcgagggcggcgatgtggcggtcgaacacttcggcggtcacctggccgccgccggcgagctcggcccagtagccggcgttggcggctgcggccacgatttccggctccacggtggtgggggtcatgccgggcagcagtaccggcggcttgccggtgagcttggagaacttggtgaccagcttggcgccggccggggtgttgatgacgcgcggggcgaatgccttccagttctgggtgcgctcaggctcgctttccagcgtggagagcgtggagcgttcggacagcgtggtggcttcgaccacgccgatgccggtgccctgcaccacgttgccgatcagcttgccaagcgtgttgccgggaccaaggtccacaatccacagcttggccgggtcggcggcgttgaacagcgccttgacgcgggcattccagtccacatggttgagcagcacttccgcagcgagtgcgcgggtgcgatcctggtcaaagccgcaggcgccggcccaagacacggtccgctcaacagcttcggccatgagcggagagtggaagggcagggtgacttcgaggtattcgagggtcgggttgaacacggtgccgccgcggagcttctgttcacgcagcttggcctggtgcttgtgctcgcgctcggcttcgagggcgaaggctgccaggtcttccgggtagccggaaagcacgtggtggttgtcggagttggtgacggcgatggagatcgggcctcgggcgttgttcacgcgcttgaccagagcctcaacctgttcgcgggtggcgcccttgacggagagcatcggactggcttcgccatacttggggttcaggcccagttcgcgcacgcggcgagtgccggctgcaccgatcagggcggcgacggccagaatctcgtcgagggtcttgccggcggcctcgatggagccggcggcctcgatggcgcgggccatgtgcacggcgagcacgccctgggagtggccgagcacggcgagcggcttggcctgggccacgctgtagccgaggtgttcgaggtcgagcagggcgccgagctgggtcagtgccacgccttccacggacgcggtggcgtcggctgcggcgccgaggcgggccgggttcggagtgaagccgaacaggtcgaccggacggccggtggtggccagcaggtcggcggcgaccggggtgagcagtcggccggctgcggcgatgtggccgcgcagggcctcgtcaaggctgggatcggtggtctggtctgccagggctaccggccacggggtggactggccggcgaaggcgagcgcatggggctcggtggccaggcgattgaggaagaaggtggtcattgctttccttacttgtgtttggttgatgtcttcagaaatcagaggggctggttgccgtggtgtttggtggtgcgcttgacgcgccgcttggtggcgagcgtggccagcgattcgacgatcacctcacgggtctgttcggggtcgatcatgccgtcgatctgcccgatttccagcgacaggttcgcgttgacggtgctggtctcgtactccttgatgtacttggcccgcagcgcatcgacgtcctgcccggaggctttggccttggccaggtcgtggcggtggatgatgttcaccgcgccggccgcgccgagcaccgcgatctgggaggagggccacgcgaagttcaggtccgcgccgatggctttggagcccatcacgatgtacgcgccgccgaacgccttgcgcaacaccacggtcaccatcggcacttgcgcgttggcgtaggcgtagatcaccttggcgccgcggcggatgatgccggcgtgttcctggtcggagccgggcttgtagccgggcacatccacgagggtgaccacgggcaggttgaacgcgtcgcacaggcgtacgaatcgggcgaccttctcggacgagtcgacgtccagaatgccggcgagcacgttcggctggttcgccacgatgccgaccggcttgccgtcgatgcaggcgaagccgacgagcgcggaggcgccgaacagttcctgcacctgcacgaattcgccgtaatcgacgatgcaacgaatcacttcgagcatgtcgtagggctgacgttcgttggcgggcacgatggtggcgagtcgcttggctgtctcgcgttcggcgcgggtgacggcgtaggcgtagaccggcggcttgctttcactgttggacggcaggtaggcgagcacggtgcgcgcatagtcgatggcgtcggattcgtcctcgccgaggtagtgggccacgccggacacccggttatgcacttcgccgccgccaaggtcggccatggagatggtctcgccggtcgaggccttgaccacgtccggcccggtgacgaacatgttcgagttctcacgggtcatgatgatgaggtccgtcagagccgggcagtagacggcaccgccggcgcaggggccgagaatcaggctcagctggggcacgaagccgctggcctcgcaagtcttgcggaagatgcggccgtactgggtcagagcggccacgccctcctgtatgcgggcgccgccggagtccacgatggccacgatcggcactttgaggtcgatagccatgtccatcagtcggcagatcttctcgccttcggcggtgccgagggtgccgcccttgacggagaagtcctgggcgtagacggccactttgcggccgtagacctggccgaagccggtgatgacagctgcaccggcgttgccgccggcgatgttgccgccctggaagcggccgatctcctcgaacgtgccggtgtcgaagagcaggtcgaggcgttcgcgcgcggttttcttgcctttagcgtgctgcttgtcgcgggcgcgctcttcggcggcgcgggccagttcggcggccttgaccacggcggtgcgcagcggctggtgggccgagggctgggcggcgttggcggccgaggccgcagccgcggccttcacggccggcgaatccatgatgtcagtcattgccgccctccttcttggcgtcggcggccttggccttgccggcgttcacgtccagcgtgaccagcgtgtcgccggcctccacgccatcggccgggccaacgaaaatcttcttcacttcgccggcggccggcgcgtacacgtagttctccatcttcatggattcgagcaccaccagaaggtcgcccttggccacttgctggccttcggacacgttgatgcgcgtgaccacggcctgcatcggggaggcgatgacgccggatttggcaccgtcgttggccgtggcggcaccggaggccacgttgtgcaagcctgcgccgcgcaacggctgggtggggcgcttggcaccgcgggcgcgggccgagccggtgatgttctccacgatgtcgagtggcacggtgagcttgacgcggcggttgttcatctcgatgacgaacgtctccgacttggacttgtcgggcgcggccggggcagcggcacccggggcggtggccaaggaggccggctggccggaggcggcggaagccggtgtgcggttcaggtacgtgcgctccagccacttggtggacacggcgaacggatggccatgctcggcggtgaagtcgtcgttgcggaagatctccttgaacagcggaatcggcgtgggcacgccttcgatcacgagctcgtcgagcacgcggcgcacacgggccacggcatcgagacggttctgggcagtgacgatgaccttgcccatcatcgaatcgaacttcggggagatggtgtcgccctgttccacaccggtatcgatgcgcacgccggggccggccggccactggatcttctccaaggtgccggagccgggggtcaggttggtggccgggtcttcgctggtgatgcgcagttcgaagctgtggccgcgcggttcgggggcgcgggtgagctcgccaccggcggcgatattgagctgttcgcgcaccaggtcgaggccgctgacctcttcggagacggtgtgctccacctgcagacgcgggttgacttccaggaagtacactttgccgttcggggtcaccatgaattcgcaggtccccaggcccacgtagccgaccgtggtgaacaggcggcgggagtattcctccagcgtgctgacgatttcctcggacaggaagggcgcgggcgcctcttccacgagtttctggttgcggcgctgcagcgagcagtcacgggtggagtacacggtgaagttgccgtgcgagtcgcgcccggactgggtctcgacgtggcgtgccttgtccacgaacttctcgatgaagtattccttcagatcgccgccttgcagcgcgtcgtggttcatgtagaagcggcgcagctcctcgtcgtcatgcaccacggtgatgccgtggccgccaccgccatcagtgcgcttcatcatgatcgggtagccgtgggtgtgtgcgaagtcgagcagcgttcgcacgtcggtcaccggttcggacaggccaggcaccggcggcactttggcgcgcaaggccactcggcgggcggtgatcttgtcgcccaaatccaccagcgcggtgtggtgcggacccacccagatggcaccggcatcctcgaccttctgcgcgaagctcggcacttcggaaaggaatccgtagccggggtgcacggcgtccgcaccggttttgtgcaggatgtcgatcagcagatcctcgttgaggtacgtgtccttgtaggtgtcgccggagagcaggtatgcctcgtcggccatgtccacatagcggctattgcggtcttgttcggagtagacggccacggtggagatacccatctccttggccgtgcgcaccacgcgcagagcgatctcacctcggttcgcaatcagcagttttttgacagtatgagccatagtgtcaaattgtgctctccatatagaggagagggcaagccgcgttcgcacaaaagctttcacgcccttttgtaggctacgaacaaacgcgcgcgtaggttccggcaacgtaaccgttggcgccggctatcaaaaacgttgcaaatccgccgattgcacatccttgcacgccggttcaagaagttgacgttacggttgcgttcgtcaacttatgacaaatcgaaatcgacaattttgtaagttggtacgaaaccgcacgaaatcgaacacctctacgatggcaaccgtaagttcgggggaaggctcatctgcgggcgaacggaaggcgaccggaccggcatcggtccatcgccgcacgattcgcccgcacagggccggattcatttgggaccgtccaccatatggacggttcggactgtcggggataccgcacggcccgccggaacctcccctcatccatcgcataccgcccgccgttcacggcgatatcacacaacataggggttattgatatgcagacttcacacaccaccgcatccgcagcggccaccacgccgctcgcccgtcgtatcgtcgccgcatcctggaagccggtgctgttcgccgtgctgatgtggctgtccgcggccgccggcgagattccgattccgggcacgccggtgccgatcacgctgcagacgttcgtggtgatgctcgccggtctcatgctgccgtggcgtcaggccggtgccgccgtcgccacctatctggcggccggtgcggtcggcctgccggtgttcgccggcggcacctccacgctggccctggtcggcccgagcgccggc

SEQ ID NO: 3685 - DNA, 44326 bp, Unknown
  R150_10m  MAG No. k141_1224
aatagcacctcgccgcggcggtcgcgcagcttgtggccggccttttcgctggctcccttgttcatgttcagaatccaaagcgtcaccgagatatcggtggtgtagaacatgtcgcggggcaatacgatgatggcctcgaccttatcgttctcgaggattttctggcgtatagcgccctcgtcgccgtcggcgttgagggcgccgttggcaagcagaaagcccgcaacgccgtggctcatatcgagcttcgagagcatatgcaggatccatgcgtagttcgcgttggacgcgggcggtatgggatagcctttccagcgcggatcgttaagaagctcatcggtgccgcgccagttcttaaggttgaagggcgggttggccatgatgtagtcgaccttcttgtccttatgctggtctttctcgaaggtcgagacggcttcctcgccaaggttgttcgatatgccgcggatggcaaggttcatcttgcataagcgccacgtgtcggggttcgactcctgcccgaccaccgagacgcgctgctgttgccgtggtggcgttcaacgaatttgtgagactgcacgaacatgccgccagagccgcagcacgggtcgtagacgatcccctcgtagggctcgatgagctcggcgataagctgaacgacgcaggcgggcgtgtagaactcgccatcctccttcgagctgccgacggcgaacgtctgcaagaagtactcatacacgcgtccgataaggtcttcctcgtggtagcgtctctcgctgatcttggcgatctcgtctatgagcgacttaatggagctcttggttgcgccgagagtggcgaacaggcccagcggcaaagcgcccctgagcgaggggttcgccttctccgcctcgctcatggcgttgtcgacaatggtggcgatcgcgttgtcgcctgcgtggtcgacaaggtaggtccaccgtgcgggttcgggcaaatagaacacgttgaccgcgttgtagaaagaaggcttctcaaggaacgccgggatgtcgccgtactgctcgacgagctccttgcggcgattgttgaacttgtcaccggcaaacttcaggaatacgaggctgatgacagcgtcgcggttcttctccatgctgccgacgccgcgaagcgcgacgcggcagttccacaacacttgctcgagcgtaagctcgacctcttgcttcttggtgcttttgcgtgccataaggctcctaagggctagaaaaacggcaagaatatcgttgcagataagtaaccgctcgtgatgttcagtccgtgacagtttagcactcgatagatcataaaacccgtgctaggcgtgctcatacgcgacggagacgctgcgaacgggataatgaattcttttattgtcctgtcacctgggcacaaacagccggtaacgtctgctcgtccgaaggcgatcgaaccggtatcgggcggcatgctgcagaagcaagccgcccggcagctcggcgtgagcgtgggcgccgtggcccattgggccaatggcgtatcgcgaggacggcaccgcccaggaacaggaacgccgcgcaggacggcgtggcatcgtcgaagccgcggcgtgacgactccccggcgatgacggtgacgcggaggcgccgggcccagcgcagaggtggccgccgcgtccgccgcgtccaagggccgttacgggtaccgcaggatcaaggccgcgcccggaaccggcgtctcggagaaggcgatcagacggatcatggccggggacgggctcgcggcgcatgttccggacgtcgcaggtacggttcccacgagggcgagacgactcccgctctcgtgggaacctgatcgctccgggacttcaccgccgaacgtcccaacgagaagcggctgacggacatcaccgagaccaagacggcggacggcaaggcgcatccctcgccggtgatcgaccgccacgttgcccgaggacgcgcgtcctccggcgcattccgaccgcggccgtcgccataggcggccgggatggctggaacccatggagcggttcgggccgaccggatcgacgggcgcgaagggccgttcgctggacgacgcggccgcggagggtttcctcggcgggacgaaggtcgagtccgtccaccccgagcggcgggaggaacacacccgtggggaggtgctcgcgttgatcgacgaatacatccactggcacaaccacgatcgcatcaagcaatcgctcggttggatgatcccggtacaataccggctgagccatggattgactgcgtgattaactccaagaaaacgtccgtagccccataccccgttccgccctcggggacaaaaactgcgcgtccactcacttgggatgactccttactcccgttcctccgaataccgccccgtactttgctgttttgaaacacggggagtaaatggcggaatcgcaggtgaaagggagtaaaacggcaaagaaaaagcctccgtcccaacgtgggaacgaaggctcgattgccgtatgtattcatcgccgtcgctggcggctttgccgcgagtcgcatacgaaacgaaactcagcggcacagcggcactcgaaagcgcaggtaagccctatcggctcactcccactcgatcgttgccggcggcttggacgtgcagtcgagaacgacgcggttgatctgtcggcactcgttggtgatgcgcgtggagatcgtggcgagcacatcgtagggcacgcgagaccagtcggcggtcatggcgtcctccgagctcaccggacgcagcacgatgggggagccgtaggtgcgctcgtcgccttggacgcccaccgagtgaacgtcggcgagcagcacgaccgggcactgccagatgtcacggtcgagaccggccttggagagctcctcgcgggcgatggcgtcggcctcgcgcagcaggtcgagacgttccttggtgatttcgccgatgatgcggatgcccagacccgggcccgggaaaggctgacgccagacgatttcgtcgggcagaccgagctcggtgccgatggcgcgcacctcatccttgaacagagtgcgcagcggttcgatgagctggaacttgatgtccttgggcaggccgccgacgttgtggtgggacttgatgttggccgcgccgtcgccgccgccggattcgacgacgtcggggtagagggtgccctgcacgaggaacttgacttccttgccgcgcgcgccggcctcttcaagcacttggcgctgggccttctcgaacgtgcggatgaacttctcaccgatgatcttgcgcttgcgctccggctcggagactcccttcagggcctcaaggaagtcgtcggccgcgtccacggtgatgagcttgatgccggtggcggcaacgaagtcgtgcttgacctgctcgacctcgcccttgcgcagcaggccgtggtccacgaacacgcaggtgagctggtcgccgatggccttgtgcaccagagcggcggccacggcggagtccacgccgccggacaggccgcagatcacctcggcgtcgccgaccttctcgcggatcttcttgacttgatcctcgataatcgaggaggcgtcccagtcgttgggcagcgcggcgcaacggtgcaggaagttttcgataagcttctggccaagcggggagtgcttgacttccgggtgccactgcacaccgtagagcttgcgggattcgtccgccatggcggccacgggcgcgccttcggtgtgggccagcacttcgaagccggccggggcctgttcgaccgccacaccgtggctcatccacgtggtctgctcggcgggggagtcggcgaggatgccgtcggcgtcgtcgatggtggctgaggtcttgccgtattcgccgagagcggccttatccaccttgccgccgagctcataggccatgacctggaagccgtagcagataccaagcaccggaacaccggattcgaataccttggtatctatggtcggcgcgccgggctcgaacacggaggccgggccgccggacagaataatcgccttcggatccttggccaggatctcgtcgaccggcatggaatgagggaccagctcggagtacacgcctgcctcgcgcacgcggcgggcgatgagctgggcgtactgggcgccgaagtcgacgacaagcacaggaccgtttgccattgatattcccctaacgttcattggaattttacgtgggctgaacacccctgattatcactggtcaaggcgacaaggccgacacgcagggactatgtgcgcaaatcgaacaaactacatgcctgtagtcggacaacacgccgatttcgaacatgggaaatcgaacgtgcgctgttctagccagatgctagatttccgcatgcttccgccgttctgaaaaagtatgttgaaaaaactaatgttgacaaacggtcagttgaaccgcacaaatactgaaatttccgcaacaatttcgaacacacccgcaagaaatcgttcaaaagtcgcgttgtcctcgtaccatgacgattgattgggaacggaaaaccttggcaccgcaagggtcaggaaccgtgaccgaacagaaataatcaatcgcacgatcacgtgcaggagtacaggagtacacatgacgagtcctgttattggcaccccttggaagaagctcaacgctccggtttccgaggaagccctcgaaggcgttgacaagtactggcgcgttgccaactacctttccatcggccagatttatctgcgttccaacccgctgatgaaggagcccttcacccgcgaagatgtgaagcaccgtctgctggtccactgggggactacccctggcctgaacttcctcctcggccacatcaaccgtttcattgctgaccacggccagaacaccgtgatcatcatgggcccgggccacggtggcccggccggtacctcccagtcctacctggacggcacctacaccgagaccttcccgaagatcaccaaggacgaagctggtctgcagaagttcttccgtcagttctcttacccgggcggtattccgtcccacttcgctccggagaccccgggctccatccacgagggtggtgagctgggttacgctctgtcccacgcttacggtgccatcatggacaacccgagcctgttcgtcccggccatcgtcggcgacggcgaggccgagaccggcccgctggctaccggttggcagtccaacaagctcgtgaacccgcgcaccgacggtatcgtgctgccgatcctgcacctcaacggctacaagatcgccaacccgaccatcctgtcccgcatctccgacgaagagctccacgagttcttccacggcatgggttacgagccctacgagttcgtcgctggcttcgatgatgaggaccacatgtccatccaccgtcgcttcgccgagctgtgggagaccatctgggacgagatctgcgacatcaaggccgccgctcagaccgacaacgtgcaccgtccgttctacccgatgctgatcttccgcaccccgaagggctggacctgcccgaagtacatcgacggcaagaagaccgagggctcctggcgcgctcaccaggtgccgctggcttccgcccgcgacaccgaggcccacttcgaggtcctcaagaactggctcgagtcctacaagccggaagagctgttcgacgccaacggcgctgtcaaggacgacgtccttgccttcatgccgaagggcgagctgcgtatcggtgccaacccgaacgccaacggtggtgtgatccgcgacgacctgaagctgccgaaccttgaagactacgaggtcaaggaagtggctgagtacggccacggctggggccagctcgaggccacccgtcgtctgggtgtctacactcgcgacatcatcaagaacaacccgcgcgacttccgcatcttcggaccggatgagaccgcttccaaccgtctgcaggcttcctacgaagtcaccaacaagcagtgggatgccggctacatctccgacgaggtcgacgagcacatgcacgtctccggccaggtcgttgagcagctgtccgagcaccagatggaaggcttcctcgaggcctacctgctgaccggtcgtcacggcatctggagctcctacgagtccttcgtccacgtgatcgactccatgctcaaccagcacgccaagtggcttgaggctaccgtccgcgagattccgtggcgcaagccgatcgcctccatgaacctgctggtctcctcccacgtttggcgtcaggaccacaacggcttctcccaccaggacccgggtgtcacctccgtcctgctgaacaagtgcttccacaatgaccacgtcatcggcatctacttcgccaccgatgcgaacatgctgctggccatcgccgagaagtgctacaagtccaccaacaagatcaacgccatcatcgccggcaagcagcctgctgccacctggctgaccctggacgaggctcgtgccgagctcgagaagggtgccgccgcttgggattgggcttccaccgccaagaacaacgatgaggccgaggtcgtgcttgccgccgccggcgatgtcccgactcaggagatcatggctgcttccgacaagctgaaggaactgggcgtcaagttcaaggttgtgaacgttgccgacctgctctccctgcagtccgccaaggagaacgacgaggctctgaccgacgaggagttcgccgacatcttcaccgccgacaagccggtgctgttcgcgtaccactcctacgctcacgacgtgcgcggcctgatctacgaccgtccgaaccacgacaacttcaacgtccacggctacgaggaggagggctccaccaccaccccgtacgacatggttcgtgtcaaccgcatcgaccgctacgagctgaccgctgaggccctgcgcatgatcgacgccgacaagtacgccgacaagatcgacgagctcgagaagttccgtgatgaggccttccagttcgccgtcgacaagggctacgaccacccggactacaccgactgggtgtactccggcgtgaacaccgacaagaagggtgccgtcaccgctaccgccgctaccgctggcgacaacgagtgataacacctccacggtgttgttagttcgctaacgccaaagggctcgggattcgtcccgagccctttgcttattcataagccccctctgacgaggaggctgtcatgcgaagcatgactgggggagagaaaagcggaagcgaaggcgagagccaagactgaaaacagcccataaattccccaccccaactaatccttaaggatgacaactccccatcaattcaatcctgcgcatgatggaaaccacgccattcctccataggcttggaaccagtatccgggcgcgaggctcggagccagccatgggggagagcacatgcagaaggatcagcagcagaccgcaatcatacaaccgttggacgctaccgacaccgtggaatcaagtgtcgacgcccttgcccaaggcgaggcggagaacgcggaagtcgccgaattcaaccgattaatgcgcgaacgtgagacgcgcaagaaaaagcgcgtggtgcatcgcatcatcgccgtcgccgtcgtggcggtactgattatcggctttatggtggtgcacgcgattattaccccgtcagatgggggcgtgtctccggtatccacggcaacggtggaacgtggccatttcgtcgaccaagtcagctccaccggttccatagaacccatcaactccaccgtcgtcgccccgcagatcgacggcaccatcggcgaagtcaaggtgcaggaaggcgcaaccgtcaacgccggcgacgtactgtttaccatcaacaacgacaagctcgatagcgacgtgaatcaggccgatctggctctgcgagcagcgaactcaaaccttaatgccgcccagcagcaggtgaaccaaatcaatgcgaccataggtcaggcacgtaatcaggatggtgaggaaggccaagccgctgccgatgatgcggccggacagctgcccgctgcacaaagcggcgtggagagcgcgcaggtcgccgttcagcaagcacaagccacctatgacgaggcggtcgcccaagccaacaagcgtacggtcactgctccggtctcgggcacggtgctgaccatgagcgcggtgcccggtgccgccatcggagcttcctccgatggctcatccacttccgccggcgcagacggtaaaccattgtgtcagatcgccgacctgagtcagatgaaggtcaatgtcaacatcaatgagctggatatcactaaagtggccaaggaccagagcgccaaagtcacgttctccgcggtgccgggactgacgctcgatgccaaggtggataccatcgccagcaccacgtcgcagttggctgattcctcggcaagcgggcagagtggcaacggcggcgtgggatacgccgtgcgtctcatcattcccgcccctgatccgaaactgaagccgggcatgacggccagtgtgaaaatcaccatgcagagcattgacaacgctttgatggtgccgctcgccgccatcgtggatgagggtaaggagagcagcgcggtcatgctcgagaccaacgccgaaacccatgagttcaagcgggtgcgagtcacggtcaaagccaagaacaacaccaaagccgttgtggaaggcaatgtgagcaagggcgatgtcatcatgcttgatggcgcttcggctgccgacaatactggcgatgctgcttcttccacctcgcaaaccgcggcttcggacgaaagggcacgctgatatgttcccgtttcgttccgacgcgagccgggcaaatcgcggcaaacggcgtaatgagaccattgccgtgcccaccgccacagccaacgtcatcgaggttgaaaacatcaaccgcatcttcgagacaggcgacacctacacccatgtgctcaaaggcatcaccatgaacgtgcgccaaggcgagttcctcgccatcatgggaccatccggttccggcaaatccacgctgatgaacacgctgggcctgctcgaccgcccatcatccggcacctaccgcctgtgcggcatggacgtgcagaatctgagtgatgacgaacgctccgaactgcgcgggtggctcatcggcttcgtgttccaatccttcaatctgctgccgcgcaccagcgtgctgcgcaacgtgatgctgcccctggcctattccgactgcccggtgcgtgaacgggaagggcgtgccatcaaagcactccaatcagtggcgttgagtccggaactgttcgaccgcaaaaccaatgaactctccggtggtcagatgcagcgcgtggccatcgccagagcgttgatacaggacccgccgctgattctcggcgacgagccgaccggcaacctggactccaaaaccggcgatgcggtgatgcacacgttcgaacagctcaagcagcaaggcaaaaccatcgtgctcatcacccacagccccgaagtggccgaacgcgccgaccgatgcctgcacatgcgtgacggcgtactgcgtgaagggatgtaccgatgagaacacgggatctgctggcggaaaccggctccgcactgagggcgaacaaaggcaaaagcgcactgaccattctcggcatcgtcatcggcattgccgcggtgattaccatgacctcactgatcggtggcattcgagactctctggtcggcgaactgggtatgaacgcggcgcgcacgatttcgatttacacggacgtcggcacccttgacgacgaacagatcactgcgatgcgcgaggaactgaccgactacgagtacttctcgccgacgaactatggtgccgcctcgtcaatcgccgcgcccggtaccaccgacaaggtgtcggcgagcatcaccggtgtcgacgagcatttcttcgatgtatccggagtgacgattggtcgtggacgggccttcacatcgagtgaagcaacgagtggtgcaatggtggtgattctcgacgggcagggcgtgcagaagctgttcggcagcgcggacattgacgccatcggcagaaccgtcacgcttgacggcaatgaagcaaccgttgtgggtgtggtcgagtcgtctggattgatgggcggcatgggcggcgacagcgtgaatatctatatgcctgccaccactgtggcgctgcggtttgcgtcctcgaacatgggatacatgcagatctacggactggccaaggacggggttgatatcgaccagctcacggaacagacgaagaccgttgtcgctcgcatcatgcgtatcccaaccgaacagatcgaccagaatctgtcggtcgtaagcgcccaatcctccatcgaccagctttccagcttcatgagcgcattccaggtgctggcgggttcggtggccggggtctcgttgctggtgggcggcatcggcattatgaacatgatgctcaccaacgttaccgaacgcatccgcgaaattggcctgcgccgggcattgggtgccactcggcgtgacgtgaccgcgcagttcctcgccgaatccattgcaatcacagtgcttggaggtcttatcggcacgttgatcggctacttgctgtcgttgggcgccgctggattggtgtccggcatcgccggtggcatgagtatcgcgccagcagtttccgtgcagtccatcggactggcagtgggcatctgcatcgctgtcggcgtgattttcggctactatccagctaggcgcgcggcaaagctcgacccggtcgaggcgctacggcatcaataatcgcgtagcaccccgaaatgcagtagggcattgcgcacaccgtcgtggtccacgtcgtcggtgatgtaatcggcggcggcctttggctcggcggtcgcattgcccatcgcgaccccgatgccggcgtaggcgagcatatccgtgtcattgccgccatcgccgaaggccatggtctgcccgcgcgtgatgccgtaatgcgccatgaaccgctggatgccgcgcggcttgccgccatcggccggaatcagatccgtgaaatccggatgccaacgcaccccgcgcacattgctgcacagtcccaccagttcggcctccaactcgggtccgacaaagggactgatctggaaagtctcatgatccagcgcgcgggtgcgcgggtcctcaaaataccgggtcggtgcggttttgcccagtttgctccacgtggcgcgaagcagatcattggactggttgaagtacacgtaatccttctcgccgaaattgcacaccacatcggggtgacggtccagccagtcgagaatcacctcaatatcagcagtatccaaggcctgcgaggcaaagaagccggtgtcatcaaagcaatactgcccattgaacgccaccacgccatcgaacgtcaccggcatggtatccagcaccacgtgcatctgtgaaggcgcgcggcctgtgcaaatcagcaccttgacgcctgcggcctgcagccggtgaatcgcctcgattgtggaatccggcaccgtatgggtcgtgaaactggtgagcgtgccatcgatatcgaagaatacggctcggatatcggcattggcagtatcggtagtcatagcttccattgtcaaagcccctctcgacgtgctttccggcgtgttcggcacgcctatagcgggttatcaaacgcacgaatcccggccattgcatgcgcgccataaaagacacctatacggcaatcggccattttccgtcactttcgcggttcaagcgcgttatggtgttacccgacatcaattttggagagaggaaatccaatgacagcagcaacccagtcggcaactccggccgctcctaacaataacgagccggtgcgtgtgaaccacaccgtccgcaacgtcatcatcaccatcgtggtcgtggcgattatcgccgtggccgcgttcttcggctaccgcgcgtttgccggtgccaacgagtcgtccgccaagggcagcaagggcaacccggtcaagatcggcgtggtcggcgctaccaaccccgaatgggtcaagttcaagcaggacgccgagaaggccggcatctacgtcgacatcgtcgacttccaggactacacctccgaaaacccggcccttgactccggcgagctggacctcaacgaattccagcacctgctctacttggccaactacaacgtgagcaacaagaaggacctgcagcccatcggcggcaccgccatctacccgctcggcgtgtactccaccaaggtcaaggacatcaaggacctgaagcagggcgacaccgtcaccattccgaacgacgaaaccaaccaggcccgcgctatcggcgtgctcaaggccgccggtctcgtgacgctcaagggcgactggaccgccttctccactccggccgacatcgacgaagccaagagcaaggtcaaggtcaccccgctcaaggccgaacaggtggccaccaccctgaaggacccgaccatcgccgctggtgtgatcaacaacgactacgtggccgacgccggtctcaacccgaaggacgccatctaccaggatgacgccgaatccgaagaagctcgcccctacatcaacgtgtgggtggcccgcaaggcggacgtgaacaacgagacctacaagaagctcgtttccatctaccagcagaaggatgtgctcgacgccctgcaggagaactccggcggtaccgcggtgttcgccgacaagttcagcgccagcgagctgcaaggcttcctgtccgacattgagaaggacgccaaagcccagcagtgagccgtggctgatacgagtgcacgactaacctgtccatagccattaccaccaagcggagcgagtacccgagccaacaatcgggattcgctccgcttccgtgaccggacatcaacaaccagcatcagggagcactatgagcgaccccatcatcaccttcgaccatgtcgtgaaggaattcaaaacacgcggacgcggcgcgaacatcgcacgagccgtggatgacgtcagcctgaccatcgatcgcggcgacatcttcggcatcatcggctattccggtgcaggcaaatccacactggtccggcttatcaacgcgctcgaacgacccacctccggcaccgtgaccgtgctcggcaccgatatcacctctttgagtgagaccaagctgcggcccatccgccagaaaatcggcatgattttccagcagttcaacctgttctccaccaaaaccgtggcgcagaacatcgcctacccgctgcaactcgatcactggcgcaaggactatcaggatcgtcgcgtcaacgaacttctcgaattcgtgggccttagtgagcacgcaaacaaatacccctcgcagctgtccggcggccagaagcagcgcgtcggcatcgcccgcgcactggccactaatccggagattctgctcgccgacgaagccaccagcgcgctcgacccggaaaccaccaccgaagtgctggccttgctcaagcgtgtgaacgaggaattcggcatcaccattgtgcttatcacccatcagatgaacgtggtccagcagattgccggccgcgtggccgtaatgagcgccggacgcgtggtcgaatccggcgacgtatacgacgtgttcgccgcgcctcagcagccggtgaccaagcgattcatcgccaccgccctgtccggcctgcccgaggaagaccgggtcgagcgattgcaccacgaatggtcgggccgcatcgtcaccgtgctcatccgccaaaaggacgtttccggcagccatggccacgaactcaaggcatccggacagaacatctccgaactcatcgccaaatacggcgtcgaatccagtctgctctacggcggcatcgacacggtcaaggggaccgccatcggtgccatcacctacgaattcaacgggcccggctggcacgtggacgaattcctgcgcgagctcgcagccaatagcgacgtcattgacttcggcaccgccgcaaagcccgtggcttacgccgacgcagttgccggacatgcctcctacgccgaagaccgcgcccatgacccactggcggccgatactgccaccgcgcccgctgtatccgccgccgcacatgaaggagacaacgcatgatcatcctcgccaactcgcgtagcgactggaacgtgctgcgcccactattgttcgaatccatcggccagaccctgaccatggtgctcgtcacccttgtcatcggcggattcctcggcctgatcctcggcgtggtgctctatggcacccgccccggcaacctgttcgagaacgcggtcgtctaccgcatccttgacatcatcgtcaacatcgtgcgcccgattccgttcatcattttcctggcagccatgcagccgctcaccatcgtcgtggtcggcacgtccatcggcaccgtggccgccatcttcccgatggtggtcatgtgcaccttcgccacttctcgtctggtcgaacagaatctcgtgccggtcgacccgggagtaatcgaggccgcgcgttcgatgggtgccggcaagctcaccatcatccgcaccgtactcatccccgaagccctggcaccgctgatcctggcctacgccttcctgttcatcggcgtgcttgacatgtctgccatggccggctacatcggcggtggcggtctcggtaacttcgccatcgcctacggctaccagaagttcgaccagaccgtcacctggacggccgtgatcatcatgatcgtactggtccaggtggtgcagggcatcgccaacgccatcgccaaacgactgctcaaacgccagcaataacaaggcatactgaccccatagatcgcggccctcgccaatatgaagcgagggccgcaatatattcttcgcgctactagaatcgggaaccatgagtgaacatatcgacatcgaccacgaactcatcaccatccgccactacctgcacgcccatccggagcgtagtttccgtgaattcgacaccagcatctatctgaccgaccagctcaaggcgcacggcatcgagatcctgcacaacccgctggagactggtgttgtggggctcattcagggcgaggccggtcccgggccgcgtatcgggctgcgcgccgacatcgacggcctgcccatcgtggaagactccggactggagttcagctccgtcaatgaaggcgtgatgcacggctgcggccacgacctgcacatgaccggtctgctcggtgccgccttctggctcgccgagcaccgtgacaagttcgccggctcaatcaagattctgttccagccgagtgaggagaccggccaaggcgctcgcgccatgatcgacgccggactcgtggatgacgtcgaagccattatcggcacgcacaacaaccccaactatgcgtccggccagctggccatcggcgtcgagccgatgatggccggctgcgtgaaattccgcgtgaccctccacgcccaaggcacccacgccggctacccgtacaagggcaccgggcccatcgaagcgctcgccagtattattctgagcctgcagaccatcgtgagccgcaacgtcacgcccttccacccgctggtgctgtccgttaccgaagtgcacggcggccatgtgtggaacgtggtgcccgccgaagccggattccaagggactgtgcgctatttccacaagtcggatggcaatctggtcggccgccgattcaaggaagtggtggaacacaccgccgaggcatacggtatcagcgccgatgtggtctgggatgatttccaagacccgctggtctccgatccaggtcttgccaaggccgtggcggcggatgtcaacgactacgcgcagctcgaaccgatacgtcagtcgatggcgggggaggacttctgcgaattcgccaaggtgacgttgccggtgttcgcgttcgtcgggtcaaacggccaggaaggttgcgccgactggcatagcccgcatttcgtgggtctcgacgaatccattcccaccttcgtcaacttctacgtcaacgccgccctgcgcgtgctcaacgagctgaggtaaatccttttttggctcccctctggaggctgaggcgttaggcagacagcccaatgggctgtctgcagccgaaggtgaggcgacagccgaaccagatatgcgcgggcctcgcccgtccataagtgcaggacgagctatcagcgaagctgactgaggggagtggcattcgttcattaggtcgattcatcgtccattaggtcggtgaacggcgatactggttgttggaatcgcgccattgcaacgactgatatcgcattgcagtgacctaatgaacgcaaaaacgacctaatgaatgacgccaagccggaagaacaggcaatccgacgccatacgcggctacactaagaagctatgacacagcttcgcttcgcactcgcccagatcgacacctgcgtcggcgcgctcgatgccaacgccgccaaagtgctcgactactcccgtaaagccgccgcagggaatgcccaagtggttgttttcccggaaatgaccctcaccggataccccatcgaagatctggccctgcgccgcaccttccgccaagccgcatgggacaaggccaacgaactcgccgcccagctcaacgacgacggcctcggcaatctgttcgtggtggttggcaccgtgggcactgatcgtaagacctccaagccgcgcaaccgactggtggtattgcatcagggcgtggtctgggccggctacgacaagcacttcctgcccaactacggcgtgttcgacgaattccgtatcttctccgccggcgaccgttccgtgaccctcgacgtggatggtgccaccatcggcgtggccatctgcgaggacatctggcaggatggtggcccggtggccgacctggccaccaagaacatcgacctgctgctcaccatcaacggctcgccgtatgaggaaggcaagaccaacacccgtttcgagctcgcccagcgtcgtgccgccgaagtcaacgccccggtcatctacctgaatcaggtcggcggtcaggacgacctggtcttcgacggtggcagcttcgtggtcgatgccgacggcacgcttatcgaacgcggcccgatgttcatggaaaacctgacgttctgggacttcgattccaccgccgaacatcaggtcaaggccgagatcgttccggaactcgacccggacgaagaggtatacactgcctgcgtgctcggcctcaaggactacatggccaagaaccacttcaccggcgtgacgctgggcctctcaggaggcatcgactccgcactggtagccgccatggcggccgacgcatgcggcggcgagaacgtctggggcatctccatgccctccatgtactcctccgatggttccaaagacgacgccgctgacctggcctccaacatcggtgcccattacgaggtccagcctattgagccattgttcaacgcctaccaacagcaacttgaccttgatggcgtctccgccgagaacctgcaggcccgcatccgcggtgtgatcgtgatggccagttccaattctcgcggcctgctcgccgtggccaccggcaacaagtcagagctcgcctgcggctactcaaccatctacggcgatgcggtcggcggctacgcacccatcaaggacctgctcaagacccgtgtctgggagatcagccgttggcgtaacaaggccgcggccgcaggcgtcggtatcggcgggctcaagatcgtgggcaacgaggacggcaacgccggcatcccgttgaaggacggcgtgatgattccggtctcatccatcgagaaggctccctcggccgagttgcgccccgggcagaaggactccgactccctgcccgaatacgcgctgctcgacaaggtgctcgctgcatacatcgagcacgcgcacggccgcgccgacctgttggccgacggcttcgaccaggccaccgtggacactgtgatgcgattggtggaccgcgccgaatggaagcgccgccaatacccgttgggaccgaaggtcacggccctcgcgttcggccgcgaccgccgactgcccgtcaccaacgcgttcagggaataaacatatattgctcccgccagcgggagcaagtaataccgttgaggaggtaccaatgacagacgataacaagaagcagtggtatttcaacaccgtcaagaagcaggccgagctgggcatggcctcaccgattgaacagcgcatgggcccgtacaagaccaaggaagatgccgaacacgcctgggacatcgtggtggaccgcaacgccagatgggaggaggagaactggcgctggaagaactacggtgtgaaatccgcgcaagcgaacgatgaagactgacggccaaaacagacggatacggttctgctgtcaatctcaagaccgaaccgctcaccaagccgctcatacgaacatcacagtatgagcggtttcccatatctggagacgtgcaatagccccatcaatacctagaaaccattggaatggtagcgttcacaaaaaacaatgtgagatagctcactcccaatttcggcttttcccaagcaagtgccaactacactgttgaaccaagggttccgtgaagatgcgaaacctacaaccccatttaaggagtgacatgaccgcagtagaaaatgcagctgtctcccaagaggagctcgacgccaaggcgtgggccggcttcaccgagggcaactggcagaaggatattgacgtccgcgacttcatccagaagaactacaccccgtacgagggcgacgagacattcctggctcctgccaccgagaagaccaagcacctgtggaagtacctcgacgacaactacctggccgtggagcgcaagcagcgcgtctacgacgtggacacccacaccccggctggcatcgatgccttcccggccggctacatcgactccccggaagtcgacaacgtgatcgtcggcttgcagaccgacgtgccctgcaagcgcgccatgatgccgaacggcggctggcgtatggtcgagcaggccatcaaggaagccggcaaggagccggatccggagatcaagaagatcttcaccaagtaccgcaagacccacaatgacggcgtgttcggcgtctacaccaagaacatcaaggtcgcccgccacaacaagatcctcaccggtctgccggatgcctacggccgtggccgcatcatcggcgactaccgtcgtgttgccctgtacggtgtcaacaagctgatcgccttcaagaagcgcgacaaggactccatcccgtaccgcaacgacttcaccgagccggagatcgagcactggatccgcttccgcgaggagcacgacgagcagatcaaggctctgaagcagctcatcaacctcggcaacgagtacggcctggacctgtcccgccctgctcagaccgcccaggaagccgtgcagtggacctacatgggctacctggcctccatcaagtcccaggacggcgccgccatgtccttcggccgtaactccgccttcctcgactgcttcatcgagcgcgacctcgaggccggcaagatcaccgagaccgacgcccaggagctcatcgacaacatcgtcatgaagctgcgtatcgtccgcttcctgcgcaccaaggactacgacaacatcttctccggcgacccgtactgggcgacctggtccgacgccggcttcggcgacgatggccgtccgatggtcaccaagacctccttccgtctgctcaacaccctgacccttgagcacctcggacctggccctgagccgaacatcaccatcttctgggatccgaagctgccggaaggctacaagcgcttctgcgccaagatctccatcgacacctcggccatccagtacgagtccgacaaggaaatccgttcccactggggcgacgacgccgccatcgcatgctgcgtctccccgatgcgcgtgggcaagcagatgcagttcttcgccgcccgagtgaactccgccaaggccctgctgtacgccatcaacggcggccgcgatgagatgaccggcatgcaggtcatcgacaagggcatcatcgacccggtcaccccggaagccgacggcactctggactacgaaaaggtcaagaacaactacgagaaggctctcgagtggctgtccgagacttacgtcgaagccctgaacatcatccactacatgcacgataagtacgcctacgagtccatcgagatggccctacacgacaaggaggtgtaccgcaccctcggttgcggcatgtccggtctgtcgatcgccgccgactccctggccgccatcaagtacgccaaggtgtacccgatcaccaacaaggaagccaagaacctcgaaggccacgagtacgagtacgtcgaaggcgccgacgacgatctggtcgtcggctaccgcaccgagggcgagttcccggtctacggcaacgatgacgatcgcgccgacgacatcgccaagtgggttgtctccactgtgatgggccaggtcaagcgtctgcccgtctaccgtggcgccgtcccgacccagtccatcctgaccatcacctccaacgtggagtacggcaagaacaccggttccttcccgtcccgccacaagaagggcaccccgtacgctccgggcgccaacccggagaacggcatggactcccacggcatgctgccgtccatgttctccgtcggcaagatcgactacaacgacgccctcgacggcatctcgctgaccaacaccatcacccctgatggtctgggccgtgacgaggacgagcgcatcggcaacctggtcggcatcctggacgccggcaacggccacggcctctaccacgcgaacatcaacgttctgcgcaaggagaccatggaggacgccgtcgagcaccccgaaaagtacccgcacctgaccgtgcgtgtctccggctacgcggtgaacttcgtcaagctcaccaaggagcagcagctcgacgtcatctcccgtaccttccaccaaggtgccgtcgtcgactgatgaccaaccccgcgaaccgcggcaatgactaactgaaggggtggggcacggctccaccccttccttatttcccacagaccttcgcatcatttggaacaggaggacaacgatgcccgcaacacccacgttccgcaccacgaccaggcatatgctcaaggaatcgaagacctatgcctcgcagactttgatgggcggcctttccggctttgaatccccaatcggactcgaccgacgtgaccgcctttccgccctgaaatccggcgatatcggcttcgtccactcttgggacatcaacacctccgtggacggaccgggcacccgcatgaccgtgttcatgtccggctgcccgctgcgctgccagtactgccagaacccggacacttggaagatgcgcgacggcaagcccgtctaccttgacgccatgatcaagaaggtcgatcgttacaaggacctgttcaaggccacgcatggcggtatcaccttctccggcggcgaatccatgatgcagcccgccttcgtctcgcgtgtgttccatgccgccaaggagatgggcgtgcacacctgcctcgacacgtccggcttcctcaacacgagctacaccgacgagatgctcgaggacatcgacctgtgtctgctcgacgtcaaatccggcgacgaggagacctatcacaaggtcaccggcggcaccttgcagcccaccatcgattttggccagcgactggccaaggccggcaagaagatctgggtacgatttgtgctcgtgccgggcctgaccgactccgaagagaacgtcgaaaacgtggcgaagatctgcgagtccttcggtgatgccgtcgaacacatcgacgtgctgggattccaccagcttggccgcccgaagtggcacgaactgcgcatcccatacccgctggagaaccagaagggacccaacgccgccacccgttcgcgggtggccaaccagttcaaggaccacggcttcaccgtgttttaaattgcagggccgaaccgcgcgtaaataccacgattcggcccgttcgcccataccctagagatatggccgacatctacgcatttcctatgggagcgtccaacgacggacgccccgtacgccctcagggtgtgccggatgaagtatgggcagctgtcgaatccgtcagcaccatgaagcgcatccatgacgtgcgctatcgggagattcccgtgccttccaccttggccgattatggtatcggcgtggaattcgaagcgggagagcgtgccctcggcgatgccttttccgccggtcttggcaacgatgccgaatcacgaatcgccacaggctggatcatgatgctttatgctcatgagctgcgcattgaccgggattccaactggcgttgcgtggcgttcgcgcggctgccgctggaaaccgccgaaaacgattctctgacccccggcatgtactgggatgacatgtgcgactatttcgacggcatcgagccggattcggtatccggcacagtcaccgtgacccaaaacacggcttttggttcgatggccggctccaccagcgccgggtgtgagattcgcgtctcatggaccccgcttgacgggaccggaccggacggtactatggacgccggcgcacaaatccgctcgtgggccgcattcatcagatccaccatccgttttgaggaggatgacgccagttgagtgacgtccgtgacaccgaaccccgactgctgaaagagcctcgcgggggagtgcccgatgtcacttcgtcgctggatggctatcatcgtgcctgcgatgcgctggccgaggcgacgggctcgctggccgccgacgccgaacgggcgtccggattccgctatggacatgaggattggctgattcagttcaaacgtgaaggtgcgggcatcgccttgcttgatcccgtagccctgacacgggccggagctgactggaatgaattcaatgacgccgtgggcgatgctacatggattctgcatgattctctgatggacttgcccggattcgccgaaatcggactcaaacccaaggccttgttcgacacggaaatagcggcgcgattgctcggcctgcaccgcttcggtctggccgccgtcaccgaacactacctcggcatcacgctggccaaagagcattccgccgccgattggtcctaccgtccgctgccgcgcgactggcgcaactatgcggcgctcgacgtggaggtgcttatcgaactcgaaaccttgatgcgtcgtgacctgaaagccgcaggcaaggacgagtgggccgctgaagagttttctcacgctttggttgcgggccttgccccgcgcaaacctcatccgattccttggctgcgtatctcgcgcatcacccagctgagtcgtgatccgaggggcttggccatcgccaaatccctatgggaggagcgcgaccggctcgcccggcgatacgacatcgctcccagcctgttattgaccgattcgtcaatcatcgaggccgcgaccaacaagccgcacaatgccgcccaattccgcgcactccgatccctgaacgagcgtgtgcgcatccataccggtaccgagcaggacaaaatgttcgagcggtacgcgccgattcagcgtacggtcaagccgaaggtctggaagcaggccatcgaccgagccatggccctgaagcccacccaatggcctaccatgcctgcccccgaacagggcgaaaacggtgtggtgaacgcgccccgatccatgcggctgtggcaacagcgccatccggagcgttatgaccgtctgcagcgggtacggcgtgtgatcaaccgcatcgccgaagacacccgcacgccggccgagatgatcatcaagccacagatcctacgcaacctgtgctgggtggaagacccggtggaagtggacgtcgagacgttcctgatcgagcagggcgcaagaaactggcaggtgaaactcattgcaccgtccgtaagtggcgttatcatgtagaggttgccttacggcagaactgtaagaaataacgacttttgaggagtcattagcgtgaagatcagcgttcgtaacctcgagcccaccaaggtgaagctcaccgtcactgttgaaccggaagagctcaacccgtatctggatgcggcccgtaaggaaatcgccaagcaggtgaacgttcccggcttccgtaagggccacgttcccggcaagatcatcgaccagcgcatcggtttcgccgccgtcgccggtgaggccgtgaacgacgcggtcccggagttgtactccaaggccctggatgagaagaagattcgtccgatggctcagccggagttcgacgtgcaggatgttccgcagtccgccaacgacgagaccaagctgaagttcaccgccaccgtcgagcgtcgtcctgacatcgaactgccggaaatcgacggtcttgagatcgccatctccaagccggaagtcaaggatgaggacgtcgacaagcgcctcgagaccctgcgtcagcgcttcggcaccttggtcggcgtggaccgcccggccgccaagggcgacttcgccaacatcgacctgactgctgagattgacggcgagaccgtcgactcccaggacggcgtgagctacgagctcggctccaacaccatgctcgacggtctggacgaggctcttgacggcctgtccgccggcgaggagaccaccttcgaaggcacgctggaagccggcgagcacgagggccagaaggccaccgtgaaggtcaaggtcaactccgtcaaggctgaggaactgccggagctgaacgatgagttcgcttccgaagcttccgagttcgacactctggacgagctcaaggctgacatccgcaaggctgccgctcaggacgccgaaggtcgtcaggccaccgaggctcgcgatgccttcatcgccaagctgcaggaaggcctcgagatcccggtgccgaagggtgtcaaggccaacatggtcgaagagcagctcaagggcatgaccccggacccggagaaggccaccaaggagcagaaggctcaggccgaggagaccgtggagaaggatctgcgcgatcagatggtgctcgacgctctggccgagaagctggacgttcaggtgtcccagtccgacgtgttcaacttcctcgcttccatcgcccagcagtacggcatggacccgaacaacttcatccaggccatcatcaagaatggccagcttggctccgctgtgcaggaagtcggccgttccaagggtctgctcgccggcatgcgcgccgtcaagttcaccgctgatggcgaggttgtggacctctccggcttcctgggcgaggccgctgaggacgaagagtccgagtccgtcgaggccgcttccgctgctgccgccgtggccgacgaactgtccgccaaggatgacgccaaggatgctgagtgagcatagcctcatcgcgttagcgtgattgtttgagcccggaatcgtgtttcacggttccgggctcttcctattctggtaaaaggactatttctttggctcccctttggggggagctgtcgggcgtagcgagactgagggggttcccaaggcatactcgttgcatagcgtgcggaggttgacatgcagccaacggttactatcaaacgccttggttggctcgctgcggcgaccattgtgctcggcgtgctcatcggtgtgggagcaggtctgctgaccctgttgctctacggcgttgaacatgtgctgctcggctacatcgaaggcccagaattgtctggtccattcggcgtgcccgctgcacgccgtgtgatatcggtgaccgtgggactcggcatcgcgggcattatctggtatctgctacgacacaaaacgactgtggtgccctcagtcaagaaggccgtggcgggaaagcgaatgcctttctggcaaaccattgtgcatgtggtgttgcagattttcatcgtcggctccggtgcctcgatcggccgagaagtcgccccacgcgaactcggcgccatgatcgcgcaacgtttttgcgacctgttccatatcgagggcgttgatggtatcgaccggcgcatggtggtggcagtggctgccggtgccggtctaggaggcgtctatgacgcgccgctggccggcatgttcttcgccgtcgaaatcctgttggtggatgtgacgatcgaaaaggttgcgtttggactgggcgtgtctgccattgccgcattcgtggcggttgcgatcaaagggcattgcctgttctacgacatcaccgccatgcaaccggaatccacgccaacgttaatgctgttcgctctgatctgcggtgcggcatgtggagtgggcggcgcattgttccgaaaaggttcgcaatgggcggaagcgcacaagccgaccggcaaggccattcggtggcggatgccgctggctggtctcatcaccggtttggtggcgattgttgtgccgcaggtgatgggcaacggccgtgccgcagcgcaacttggattcagcacgttcattcctgaaaccgccggcactgctggtgccatgcagtcggcatcttcagcggccgcctctccatggaacttgctgacgggcggcggtaatgtatccgattcggcctctggcgggggagcgggctctggaatggcctcgttttgggccatgcttcagggtgggagcggctcttctggatccgtgatgaacgccggtttcccgctgtcccagtccaatatctggatgttgctgggtgtgttggcactcacctttgtcgccaaggcgctggtgacgctgatgaccattcgctccggtgcatcgggcggtgtgctgcagcccggcatcgcattaggttccacgctgggtgcgatgctcggcctcgtatggatactgatgtttccgactgattcggtaaccgcgtgtgccttgatcggtgcggcttcgttgctttcggcctcacagcaggcaccgcttatggccatgtgcttggtgatggagctgaccgaagcgccgattaccttcttcgtgccagtcggcatggccgtggccacgtcgtcgttgatatcaaagtggttgctgagtcgtaagtaagtagatgcatatattctggctcccctctctgaggggagctgtcgaacacagtgagactgaggggagccgaggtaaagaaagctatgtcagaaaacaccgaagtccgtgcggcacttgaatcgcttgccgctgagccgctcactgagcagatcgactactatcgaaagccattcatggtgttgtgggccgccattcaggaggccgccagcgatgtggccgaagactacgacttgcctgcggatatggcccaattatgggtgaccgaacagatgcgccaagtcgccgattcactggtcgatcggctcgcggaaaaagccgtggcccatggtgccagcaagtccaacgtggcgcgagccgccggtgccagccccgccaatgccgcccgtcgcttcccgcgtctgggcgacgatgccgcctcccagacccgcctcctcattgacgacgtcctcgacaccttggaataacccgaaatccctacgctacccgccaaaaagcacgcgaaaagccgccttcagtcgcttcaaggcggtagtctgaacaatgttcgagtaattagaaggagaatcaaggtgagcaatacctttgcgaccttgccggtcatggcgggcgatgacgtcccggccggccccgtcgacccgattttcaaccgtctgctcaaagaccgcatcatctggatgggtgaagaggtcaaggacgatatggccaaccgcatctgcgctcagctgctgatgctggccgccgaggacccgaagaaggacatctggctgtacatcaactcgccgggcggctccatcaccgcaggcatggccatctacgacaccatgcagctcatcgagcctgacgtggcgaccgtgggcctgggcatgtgcgcttccatgggccagttcctgctgagctccggcaccaagggtaagcgttacctgacctcgcacgcccgtgtgctcatgcaccagccttccggcggcatcggcggcaccgccactgacgtgcgcatcaacgccgagctcatcatggacatgaagaaaaccatgagcgagctgaccgctgagcagaccggccacaccctcgaggagatctaccgcgacaacgaatacgaccactggttcaccgcccaggaagccctcgactatggcttcgtggacaagctcgtgaccacgccggacaccatcggcaacaaccagcagggggagtgagactcatggcaagtgaagaagcaaagttcgccgcccgtgccgaccgcttggccggccgtcatggcgtagccggtttcatgccggccgccgcccgcgcagcccagcccgcgccgaccaaccgttacatcatgccgcagttcgtggagaagaccccgtatggcatgaagacccaggacgcctactcccgcctgttcgaggatcgcatcatcttcctcggcgtgcaggtggacgacgcctccgccgacgacgtgatggcccagctgctggtccttgaatcccaggatccgaaccgtgacgtgatgatgtacatcaactcacccggcggttcgatgacggccatgaccgccatctacgacaccatgcagtacatcaagcccgacgtgcagaccgtgtgtctcggccaggccgcctccgccgccgccattctgctggcctccggcaccaagggcaagcgcctgatgctgccgaacgcccgtgtgctcatccaccagccggccatcgaccaaggattcggcaaggccacggagatcgagattcaggccaaggaaatgctgcgtatgcgcgaatggctggaggagaccctcgccaagcacaccggccaggatgtcgagaagattcgccgcgacatcgaagtggacactttcctgaccgctcctgaagccaaggaatacggcatcgtggacgaggtgctggaacaccgccagtaaaacttccgaacattgcaataccctcggtcggcaacgaccgggggtattgtatttcaaggatgacaatgataatgcgcagcgtggcggttcgacggtgcggcgcggtcggcaaaggagaatcatgggacgtgtggtgagctacaacgaggacgtaccccgttgcacgttctgcggcaaaaccgaacgtcaggtcagaaaactggtggccggtcccaacgcctccatctgcgatgaatgcatcgccctgtgcgtggacatcatctccgaggagcgtgtcaaagatgccgaggtcaattcgctgagcctgcccaagcccgctcagatcttcgattatctcaaccgctacgtcatcggtcaggagaacgccaagcgcgcattgtccgtggccgtatacaatcattacaaacgcgtcaatatggagcttcaggagtccgctgagcagcttgacgggaataacgggcacggtggccagaccggcaaacaagccaagcaatccgctcccgcccagacgcgtgctacccgccgcaacagtgaccctttggctgacgttgaggtcgccaaatcaaacattctgttgctcggccccaccggtgtgggcaaaacctatcttgcacaggcgttggcccgcgtaatgaacgtgccattcgtcatcaccgacgccaccaccctgaccgaggccggctatgtaggcgacgatgtggaaaccgtgctccaacgtcttctccaagccgcggatggcgacgtaagccgagcccagcacggcatcatctacattgacgaaatcgataagatcgcgcgcaaatcaggtgagaacacctccatcacccgtgacgtgtccggtgagggcgttcagcaggcgttgctgaagattttggaaggcaccatcgcctccgtgccgttggagggcacgcgcaagcataaggagcaggacactgcgcagatggacacacgcggcatcctattcatctgcggcggtgcgttcgtgggactgacggatattgttcgcaagcgattgggccgtcgagagaccggcttcggcgcgaattggcacgacgccgacatgaaagacgaggaattgctcgaacaggtcaatgccgatgatctggccgagttcgggctgttgcctgagttcatcggacgtttgccggtcaccagtgtgctgaaggaacttaccgtagacgatctgacggcgattctcacccagccagccaacgcgctgatcaagcagtaccgtaagctgttcgccgtcgacggcgtcgacctgcagttcaccgaacaggccattcgggcgattgctgatatcgccatcaagcaggggaccggtgcacgcgggttgcgttcgattatcgaacgtacgttgcaggacacgatgttccagttgccgagtttggatgatgtgaagcaggtgattgtggacaaggcgtccgtagagggttccagtacgcccaaactcttgcgcgaagccgtggatgtgccgcagggacgcctcaaagttgcgtagtcggttttgcttgaccgagtccgtacacatgcggcgtgaggccagtaaatacgccgttgcggtggcgattaggatggtgcgactcgccgcaacacgccgagttgcattcatctgaacggcgtgtattatatatcgagttgtctgaaaagacaacatgcgccagtagcccagcggattagagcagctgactacggatcagcaggtcgcaggttcgaatcctgtctggcgcactcccgaaccacggggacaacagtggtatgcgccagtagcccagcggattagagcagctgactacggatcagcaggtcgcaggttcgaatcctgtctggcgcacagtaagcctcgaaagcgaaatgcttccgaggcttttccaattgtattggcccgttcgagtcggccacacaggggtggggtaaggttgccctttgcgactcagcccggagcggaacgtcctgagatattccgtactattacatacggttcatccaagagagtacagcaaggagacgcgatggccacgaccgccggcgcgaagaagggactttggtccaccatcaggcgaatcgccgcctcagaccgtatttccggactcatcatgctcggcttcgcgctcaccggcctggtgctcgcgaacctgcccgccaccgcgcatgcgttcgagaccgtagcggaaacgcatctgttcatcccctacaccaatctcgacctgccgattggccattgggcccaggatggtctgcttaccatcttcttcctgaccgtgggcctcgaactgaagcaggaactcaccaccggctcgctcgccaatccgaaagcggccgccgtgccgatgctgtgcgcggtgggcggcatgatcgccccgcccatcctgtttctggccgtcacggcattgttctctcagatcgggcctggtgaacccggcacgctgattctgaccaccaccggcagcagcattccgttctcggagatgtcgcacggctgggcagtgcccaccgccacggatatcgcgttctcactggccgtgctcgccctgtttgccaaggccctgcccggttcgatccgcgcgttcctgatgacgcttgccaccgtcgatgacctgctggccattattctgatcgccgtattcttctcctcgatcaacgcctggtattggttcatcggcatcgtcgtgtgcgccgtcatctgggcatacctcgtacgactgaaaaaagtgccgtggattgcggtcggcatcgtcggcgtcctcgcttggatcatgatgttcgaggcaggcgtgcatcccacactggccggcgtgctggttggcctgctgactccctcccgtgaaatgcacggcgaactttcaccgcgtgccgaacgctatgccaacaagcttcagccattctccgcactgctggccctgcccatcttcgccctgttcgccaccggcgtgcacttcgagtcggtgagcccgctgttgctggcttcgccgttggttatcgcactgattgtggctttggtggtcggcaaacctttgggcatcatcaccaccgcatggctggccacgcatgtgggcgggctcaagatggccaaggggctgcgcgtgcgcgacatgattcccgctgccgtcgcctgcggcattggcttcactgtgtccttcctcatcgcctcgctggcgtacaagaatgcggaactttccgctgaggcgcgcttcggcgtgctggtggcctccctgatcgccgccgcgatttccggtgtgctgctgagccgtcagtccaagagattcgagaaggccgcagccgcagcagcggccgatgcggaggatgacgaatcgattgatggcgatggcgctggtcagaccggtcgcaccacaaagtccaccacgcccacggaacaccccggcaccctcgccgacggcaccgccagtgtggagattgacttccgccactgatggcttagacgatccctactccattgttggccttgtttcgtgaaaaccgtacgctgaggcgcgctcaccgtacgttcttcacgagatgaggccttatttcgtgaaaaccgtacgctgagtgtcactcaccgtacgttcttcacgaagtcaaggatgatttcgcggaaaacgtatgcagagcttcaggcgctagaatgcgaagagtcgatagcaccgtacaggaggatattggatggcaaagaagcagaagaaatccaagaagaacgacggcaaaaaggccgctgaagcaaagaatccagctgaggccgcatccaagtccacagtcgtggacgatatggaaccattggaagccacagccgcgaatgatgcggcaacgttggaggccgagacggcaaccgaggctgccgcaacgccggtgaacccggtcgacttggagggcgtctcgccgctgggcgacacctatcatcgcggcccggtgattctacgcggccagatgattccctcggacaataccaccgccaatctgctgaaacccgaccaggacaccgactggctgcacatggacccatggcgtgtgctgcgcatccaatcggaattcgtggacggtttcggggcgctcgccgagctcggacctgcggtctctattttcggctccgcacgcacccagcgcaccgaatcgatctacaaggcggcccggcgcatgggtagccagatagccaagcgcaacatcgccgtcatcaccggcggtggtcccggcatcatggaagccgcgaataggggagcggcactggctggcggcaaatccgtgggactcggcatcgaattgccgcacgagcaggggttgaaccagtgggtgaacctcggcatgagcttccggtacttctttgtgcggaaaaccatgttcgtcaagtattcctccggcgtgatcgtgtgcccgggcggcttcggcacactggatgagatgttcgagctgctgaccttggtccagacccacaaggtggcgaatattccggtggtgctctacggcaaggaatactggcaggggctctttgactggctcaacggtccggtggccgagcacggcatgatttcggcaatcgacccgaaactggtcaccgtgaccgatgacgccgacgaagccgtggaggtggccgtcagtgcaattgtgaggtaagcgagatagagtggctcccctctccgaggggagccaagggcagagttactttttgtaggcgatgagcaggcctgtgccgtcaggggtaagcgtggactcgaaaccttcgtcatcttcgacggtggtgagcagctcacgcatggcgatggccttgtcgctgcggtcggccggattaatcatgccgccctgaccgtcctccaacgccagcacatcggtgaacacgatcacgccgtgcgcgcgcagcagacgggaggcctgggcgaacgtggcggcatagttctcggcgtcgcccgccaccacgatcagatcgtaatcattggcgttgaggcgcggcagaaacacgctggccggggcgttcaccgcacgcaacgtggtgtcggtctcatcctgcagttcggcgaacgccttgcgaatcagcgcgatgccctgagcggtggaatcgaccgcagtcagcaggcccttgttatccagcgcatgggcgagctgcaaggtctccaccagcgagccggtgcctacggcgatgaccgaagcggcaccggtgatgcgcaccagcatgcccagcagacgggcctgcgcggccgaaccctgcaactggccggacttgtcggcggccgtacgggcgtcggtcaacgcattggattcacgttcgcgcgcgtgttcctcggtgaattcccatgccttggcgaggttggtgtactgcgttctgtccataattcgttcctttatgtcttctctcgtgcgggcacccggtggatgtatcgactacgtgttgcagcgattgccgtagctggtcgtggcgcggcttagcgctcgcggaccttggccacgatctgccacatctcctcgcccacatcgatgccgcgcgggcagtggcgggagcaggcgcgcacggactggcaggcggccacgccgtcggcggtgtcgatggcgtccatacgctccatggccttggtgtcgcgcgaatcgttgacgaaacgggaggcccaaatcagcgaggccgggccgatgaaagcgtcgccgccggcgtacaccgggcaggcaccttcgcacacgccgcaggcgatgcagttgctcagcagctcgtatttggcgagttgttcggggttctgcaggtattcgaacacgtccaccttgccttcggcggtggtggcgagcacgccgtccgcctgaagatatggggtgagcttccttatttggttgagcatcgggtcgatgtcggcgatgaggtcgcgctgcggcgggaagccgggcagggatgccagttcgatgactcccagcgagccgtttgcggccgagtcctggtcggctgccgcgtttgcgtcgttttccgcggaatcgtcggattcttcggactcggtgccggtgtgccggaacccttcgtcatcgacttcggggatggcgccgggctgcttggcccaatcgcggatggtggccgtgcacagcagggtgggggtgccgttgatggccacggcgtccgaaccgcacatgccgtgaccgcacgaatagcggaaggccagcgtcgggtcgacggtgcgtttgatggtcagcaggcagtcgagcacggtgtccgaggggcgcgcgggaatcgtgtattcctgcacccactgcttgccgcgcggacgacggcgtgccgccgaatccgagccgccgccgaatggggagcttttcttggcgaacgggctgccgccgcgtgcacgttcggcgcgctcgggtcgcggcatgaaacgatgcacttgcagggtaaccgtcgtgttgctcgcctcagccatgttctgcctccatgaaacagtgggatgtcaagtccaatatcagccaacctattgtgccacaagccctaggcggcttggtattaccaccagcggatcagtactcgcgcttcttgggtggatagtcggtgatgtgcactggcttgaaacttgccggaccatcatcggcgaccatcgagtgagcaaggaaatgctcatcgtcgcgttcggggaaatcaagtcgttgcatggatccgcgggattcctgacgggattcggaagcgtgcagcatggcctcggccagttcgattagatgacggacttcccagatggcggtgacctcctgattgaaagcggcggtcttgtcatgggcccgcaaggtatcggcaaccggtgtgatgtcgttgttgatctgagtcaacgccgtatcgatggtctgagcggtgcaacgtacggccagagcctgctccatcactgatccgagttgggccatgagctgataaggattggcggtgggcccgccatcgtctgaatcgtccatcggtccggcgagcagttcgtcaagctctgccttgcgggaatcggcagcctgatcggcggcatcggtcagcatgtcatcggtcgaatcatcggccatggaggagtcaaccgggttctcgacgatgcgtgcggccatcgtctgaccagcacgtgtaccgaacaggcaggcgtcgagcagagaattgccgcccagacgattcgcaccatgtacggagacacaagagcattcgccagcggagaacagtccatcgactacctgcacggcaccgtcggtccaacggtacacctcgccattggtggtgatggggatgccgcccatcgtgtaatgcgcagtgggcttgataggcaccaggtccttggccggatcgaggttcgcgtactgctcgatggtttcgaccacctgcggtagcacttccttcatacgttcggggtcgatgccggtcatgtccagccagacgcagtccttcggaccatccgggtccttcgggtcggcgacgccgcggccggcgtcgatctccgccatgatggagcgggagaccacgtctcgcgcggccagatccctatgctccggggcgtagcgttccataaacggctcaccgtcggcgttcctcaggatgccgccctcggcgcgggccgcctcggacagcaggatgccggtgtgcgcgagcccggtggggtggaactgcacaaattcgatgtcctccagctgcaggccggcggccaaggccaatgccatgccgtcgccggtcaggtcccaggaattcgatgtggtatggaacagtcggcccgcgccaccggtggcaagaagcacgttgcgcgcgtggatggcctgaatcttgcccgaatgcgtgtcaaatgccacgatgccggccgcctgcttgccgtcgtcggcgagcaccaggtcggtcacataccattcctcggcgaactcgacgccggcggccacgcactgctgccacaaggtgtgcagaatctggtggccgatgcggtcggccgcataggcggcgcgcttgaccggggcaccgccgaactcgcgcgtgtggccgccgaaccggcgctgggcgatatgcccgtcatcggtacgggagaaggccacgccctgacgctccaggttgatcacggtctgcggcgcgtattcggcgagcagtttggccgcgtcctggtcgacgagccagtcgccgcccttgatggtgtcgtagtaatgccagtgccagtcatcggactccacattgcccaggctcgcggcgatgccgccctcggccgaaccggtgtgcgaacgcagcggctgcagtttggagaccacgaggatcttcgggtccacgccttgttccttgagctcggtgattttgggggagcgcagcagtcccaacgccgccgacaggccggccgctccggcgccgacgatcaccgcatcatacatatcttccaaacgtttcggactcatgggttcgattctcgcacacccgccgaacagtcttcgagccgtgtcatgaaagccgattagccgacacggctgctcagcttgagtatgccggcatcccgctcgatcactcccttcagctccaatgcgccgagtagctcaagtatggtgccgatattgggaatctcgtcgggtaccgtctctcgcgccacacgcaatagtgcgtccggggtgacgatgagatgtcgtttacggcattcacgaatcaatgccactaatgtgcgttccatttccggcagcttggcgataatgatacgttgttgggcttccttctcgggatcgagcttcggcttgacacgaagatccggcatctgatgcgacgagggcggctcttcacccttgctcttgttggcaccggcctcggcagttgcgctcgccggcccatccttggattgaacgagtgtaggctgagtatgcttggtcctaagacgtttcgaatgacctgaatcttgtgacgactcctgtgacgccgatgattccgaggatgctggcgataacggagtcgttgccggcacttccatggcctcctcgttttcggacgagtcctgacctgtggatttcggtatgcctgggcatgccgccataacgggcttatgccgttcatggcatatatcctcagtggatgtggcggcacacagaatcatcgcccggtggtcgccgatcatcttattgcacccggcgttgcaaggctgattgatgtcaccgggaaccgcatacacttcgcgcagcaattcgcatgcccatcccgcggtgttgagcgctccggaacgcaaccgggcttgcgtcacaatcaatgtggaagacatggccgcgataatgcggttgcggagtagaaaacgacgggcttcgggaatcgtccctgggcacagttcactgatcagtgcaccaccctgcgcctcgatacgttcgaacagcgtgcggttacgcatcggtccgatatggttgagcccgccggcgaatacggcaacggttctgcccacattggcgggcattctgccgtgcagcgcattcaacgctccccaatgtgccgccgcatccgtgcccattgcgcctccggacacgaccagatgcccggcaacgactgcctgttcggctacggtgtgtgccacataccggccgtattcggtcacgtcccgtgaaccgacgatgccgaccggtttggcgcaactggtcaatgcgcgtggatcgcctttgatccacaaacacagcggtggcgcccaatcggagcgaatggacaggtcggccaactgcgagggccaacatggatggccggggccgataatccattgcgtgccatccatagtgaaccagtcggccagttggatgatgtcttgcgagggcaggtccatcatgcggttatgccagccggccagtgcattgcggaaggagcgcatcgcgttcgccgacgccttgcggccccatcgggtgaggccatccacgaacatgcggtcaatgcgtgacagcgccgggccgcagattccagatggctggcttggatgggattgcgccaacgcgtgccagagggattcggcgctttccgcgcctttgagcgtggcgtacatcatcacatccgccccatcaagacagaacgtgagcgcggcgcggtacaacgtatccgtgggaggcatgggaatggtgcgcgaaacagcgaggcccgtatcggtgtgatccacactgcctgcggtgccgccagattgtcggatatcagtagcgttactcatgtcatcctcgttctcatttcgatgccctgatggacgtcctgctcggtgggggacacgcggccggccagatcggcgagcgtccaagacagacgcatggcgcgatcggccccgcgcaatgtgagttgatgattggacagggcccgattgaccaattccatcgctttcagcgacgtattggcgtgcagccattttcccgaagcttgcgcgttgcacacccatccgtactgtctgaaccggtccttggccacttgacgggcgcgaatcacacgagcttgtattccggcactggactcgccgattggctcgctttgcacggcaatgcgcgagaccggtggcaccgccatctgaatatccacacgatccaatatcggtccggacaatcgcgagaaataacgtatacggtctttttcccggcaagcgcaacgttcgccggtgccgtaatagtatccgcacgggcaggggttggccgccatgatgagttggaatgaggccgggtaataggtgctgccttttgaacgggaaagcgccacatacccggattccaatggttcgcgcaacgtctgcagggcgcgtgcgctgaattccggtgcctcgtccaggaacagaatgcctcgatgcgcgcgcgtgatcgcgccgggaacggcgatgccgttgccaccacccaccaaggccgccgtgctggcggtgtggtgcggtgcctcgaacggcggcatgtcggtgatgccgtactgaggcagtatgccgcacagcgaccgtatcgacgccacctccagttgttccgcctcgttcaacgggcacatgataccgggcatacgtgaggccagcatggttttgccgctgcctggcgggccggtcatgatgagattatgtccgcctgccgccgccacttgcagcgcccatttggcatgttcctgacccagaacctcgttcatatcgccacaatcgttgggatggcttgtgggtgattgatccatggtggtctcgtcggcaaccggtgtatcagtaatcgtataggtggcatcgccgcccatcagttcgatgagctcacccacatgcctcacacccactacatccagtccatccaccatcgaagcctcgtcaagattgcgatggggaacaatcattttgcgcacgccacgttcctcggcatgcagcatgatcgggagcagcccatgaatcggcagcaccgagccgtcaagattcacttcgccgagcacaatggtatcttccaagcaatcatgccctatggcacccgccgcgcataggacgctggccgcgatggccagatcatgcgacgaaccacgtttgggcatggccgcagggctcatgttcacggtcacgcgggtttgcggccaaccgaatccagtggcttgacacgccgatttcacgcgctcgcgggcttcggacaacgatgcatccggcaatccgatgatgctgaagtatggcaagccagggctgatgaaagcctgcacttggacgatgaaggccttaaggccgatcagtccgactgagagagtgctgccgatagccatgtctactcctttcgcaatgtgtttcgcaacgtggctgttttttgggggacgaattcagaaggcgttttcgatgtgatgcacgagcggtctgcccacccgaagcacgatggtgacgacatcgaaacggactgccgtatgcggcacacgattacgccggtcaagcagccaatcgcaggcggctttcctgagattgtgctgtttcgccggcgtgatggcctcttgcggatatccgtaatgcatggaccggcgtgatttcacttcgacgaacaccaccgtgtactcgggattgagcagtacgatgtccaattcgccgtaacgggtatgccaattgcggctcaaggtcgtccaaccgtgttcctccagccacgcggcggcatactgctcgccgagcgcaccgaactgtttgggcgtcagattgcggtcgcccatcgtggccgcaatccgttccgaaggcagcgttgcctgcggatcaggtgaagccagcatgggctggtgaaaggcaagaccggcgtcgatgccggacttcgtcgtcggctgggtaggtggtaaagcgttcatgattccactgtgcgggttacttatgtaagagcacaagcgcaaccggcaaatgtggatactatgacgcggtttggcgtgttgtggataacgtgtggatgaaaacccggttatccaccattagttcagaaggtttaccaaggctccccagccgacttacctgtgacgacagacaacccgccgagttgttcgctgaatacgtcagactcagtgagcggagaggggagccaaggtgcggtcacttcaccaaatcggtgagttcgccaaggttcagttcgaagctgacgccacgatcctcgaaatgcggctggttacgggtgctgaccatggcgtggcgcacgaactcgccggcgatttcggccgactcggccaggccgcggccggccatcaccgcgccgcacagggcagatgcgaaggcgtcacctgtgccatgaatcatgtatggcagcttttcatgagccagctcgatcttgccggcaacaccggtggaagcgctggccacatagttgacgattttgccatcgccatggtcgatgcccttcaacaccacgttcttggcacccaacttcagcagagcaccaagcagctcgttaaccgtggcctcatcaatattctggccaggatagtcacgcttggtgagaatactcgcttcggtgaggttcggcatcaacacgtcggcaccatcggccagagcgcccattgcctcgcacagctccggtgtatacgtggggtacatttcgccggcgtctcccatcaccgggtcaaccagacgcagcgcattcggatattcacggtagagacgctgaatgatcgccacctgatcgggggagccgaggaagcctgaatacacgccatccagttccacgtcttccttctgccaggcatccaagtaaccggagagaatatccgtggtgtcgtggaacgtgaacactgcatagcgcgtgtgcgccgagaacagggcggtcggcaccgggcacacatcgcagccggcggccgagagaatcggaatcgcggcggtcagcgagcacttgccgtagccgcacatgtcgtgcacggcggccacgcgcggaatatagttcggatcacggtcatacagtgttacatcggtcatgtctgttcgaaccccttcaccatgttggcggaataattcattggcgatgtttgactgtagtcgttcgtcatgtaaaccatgtaaccgggcggcggaaaaaaggaacagacgtcatcaccgagcgggcaaaccgtcttggtgacgggtggaacaagcaatcatcacggacacttgagccatgcgcgaaaggcatggtagcgatatcaccgtgaccgcagtcgaacgtgaaagcgcatgcgcgcggcccggcgtgtcgcgataatttcaacgactttttcgtgacttctgacagtctctcacgtcaatgatcccaaggctttataagcccttataggcaagcccgataacgttcggcttgcgccgcgcggcccaagcgtcgtaacttcataaccaacacctcgccaaccgcccgaacacggcaggcgggtggcaaggaaaaatcctcgcgacctagcacaaccaaggagaaagacccatggccgagaacaacaagaagtaccgttttgaaaccctgcagctgcatgtgggccaggagcaggccgacccggccaccgactcccgtgcagtcccgatctacgccaccaccagctacgtcttccacaacttcgaccacgccgaggctcgcttcggtctcgctgacccgggcaacatctacggccgtctgaccaacaccacccagggtgtcttcgaggaccgcatcgccgcccttgaaggtggtaccgccggtctggccgtcgcttccggcgccgccgccgtcgaatacgccgtgcgcaacatcacccagtccggtgaccacatcgtcgccgccaagaacatctacggcggtaccttcaacctgctacgccacaccctgccgcgcgacggcatcaccaccaccttcgtttccgccgagaacccgcaggagttcgaggacgccatccaggagaacaccaagctcgtctacttcgagaccttcggcaacccgaacgccgacctgccggacttcgaggccatctccgaaatcgcccacaagcatcacctgccggtgatcgtggacaacaccttcgccactccgtacctgttccgcccgctggagcacggcgccgacgtggtggtcgagtccgccaccaagttcatcggcggccacggcaccaccctcggcggtgtgatcgtcgaaggcggcaagttcaactgggccgaggtgccgggcaagttcccgaccctgaccgagccggacccctcctaccacggcctgaacttctacgaggctctcggcggcaccgccttcgtgacccgcgtccgcgccatcctgctgcgcgacaccggcgccaccctgtctccattcgccgccttcctgctgctgcagggcaccgaaaccctgtccctgcgtgtcgagcgccacgtccagaacgcgctgaaggtcgtcgagtacctgcagaccgtgccggaagtcgagtccgtctcccacccgtccatcccgggccgtccggatcacgacctgtacgagaagtacttcccgaacggagcaggctccatcttcaccttcgatatcaagggcggaaaggatgcggctcgcgtcttcatcgacaatctgcacctgttctctctgcttgccaatgtggccgacgcaaagtccctcgtcatccacccggcttccaccacgcactcccaggagaccttggaagagctcgaggaccagggcattcaccagggcaccatccgcctgtccatcggcaccgagaacatcgaggatatcctcgatgacctgaagggcggcttcgaagcccttcgcgcttccggcttggccaagtgaggtcgacaggagggttgacggcccgatgagaaggggcgcgatgctaatggggtgcatcgcgaatcatcgagccgcatggggtgccttccgcctgatcgcttgacccaaggagtagaaagctcgcactgacgtcatgcagtgcgggctttcttgcgtctgtatgcctcacactgtttgcgcagaggcatgaatagtgtgagacctgagacgacataatcctcaaggatgagggccggcgcgtggcccctagcccaattcag

SEQ ID NO: 3686 - DNA, 60325 bp, Unknown
  R150_10m  MAG No. k141_1399
caaatccgggaagaggaaggtggatacggtttcagccgcgcgggcagcaaggtggacaaatcgttgccgggatggaatcgcggcaagtatgcaaaagcctcccattcgcgcgcgacgcataagcgcgcaaacgggaggcttcccaaccgcagcatcatatgcagaaataaggagagtaaggcatatgctgccgcggtcacaccccgccgggaacctgccgcaggccgcgtccggcatcgaaagccctgcagtcgatgcgtgcggccggccgttcccggcgcggtggccatgtcagacgtcagtcagacgtcatcacttctgccagccgatgtcctgcggcaggttgccggcgaagccggacgggccgtagttggccagacccttcttcgcaccgaggtacgaagccgggttggagaccgggatggtgccgtacagcttgagggcttccttctcggcggcgttgacggccttggtctgctcgtcatagtcggagaggctgccagccttcttgacgagctcgtcgatcttcttgctgcccacgtaggagaagttggacgggccgtcggaggtgtacagctgcggggcggacaccacgaaggtcatggcgctcggagcctgccaagccatcggcagcacctggtagttgccggaagacacggtgtcggagaacttggactcggccacgttcacgaccttgaccttgatgccggccttcttcatcatcgcctggtaggcgttggcgagggcctgctgggtggcgttgtcaccgaagaaagtgaaggagatctcaagggtcttgccgcccttggcgtagtagccgtccttgcccatcttgtagccgtcggcctcaagggttttcttggcgttgtccacgttgtacttggcctcggcgggcaggttgttctcgtagcccttctggaacggcagcagcagctcggagcccggctgctcggccttccagttcaggccctggaactgcacgttgttgtaggtgttcacgtcgaaggcctgagtgatggccttacgcacctgcaggtcgtcaagcggcttggacttgctgttgtactccagcacgcgggtcttggtgctgtagccgatgcgcagctgggcgtccttgacggaacggatggccttgatgtcgtccttggtgttggcctccacggcgtcgatctcgccgttctggaaggcgttgagggaggcggtgtcggccatctgcttgtagacgatcttgtccagcttcggcttgttgccccaccacttctcgttcggcacgaaggtgacctgggagtcggagaaggagtcgaccttgtacggaccggcggcccactcgttgtgcgggttcttcacccagccctgggtgaaggtcttcgggtcggcggccttcgggttcaccagagcgccgaagacttcctgccacgggtagtacggggtcttgtaggtcaccttgacctgcttcgggctgtcgccctgctcaacgctagcgatacggtcgaagccgtcggtgctcggcgggttgtagtccgggttggagccgttgttggcttcccacgtggccttgaaggcggtccagtcgatgtcggagccgtcgttccacttggccttcgggttgatgtcgtactgcacgaccatcgggtccttgctcacgagcttcatgtcggtcaggaagtccgggttcaccttaatcggggagccattgacctggtcggtcatgagcaggctgggctggtaccagctccacagctcggacatgtagccggtgttgccgtcggaagacaggtagttccagttcgggccgatttcgacgatggacagggtcagcgtgccgccgtccttgacgttgtcacggctctggtggttgtcgtaacgctcggtgaccttcggcatgggcaggtcgccggtgtacgacgaatcgatgccggccggcggttcggtggcgctcgaggcattgctggaaccgttgccattgcccgcgccgcagccggcaagcagcatggcaagcgccgcagtggccgcggcgagcgcggtcagcttacgtgtcttgttcattgttatttcctcctctatatggttccgaccgtcatgcgaaatggcatgcaacctgatggccgctcggtcgggaagtgtcatacggccgcagcgccgggcgttcgccgcggcagcgggcctgttgttcggcgctcagcttgggcatgagcgggcagcggcccatgaacgggcagccttcgaacgtctcggtggggctgggcacctcgccctgcagcacgatgcgctggcgggtgcgttccgccttcgggtccggcaccggcacggcgctgatgagcgcctgggtgtacgggtgcaacgggtgctcgaacacgtcttcggtgtcgccggattccacgatgcggcccaggtacatcaccgccacgcggctggagatatggcgcaccaccgacaggttatgggccacgaacaggtaggccacgcccagcttgttctgcaggtcctcaagcaggttgatcacgccggcctggatggacacgtccagtgcggagaccggctcgtcgagcagcacgagcttcgggttgaccgacagcgcacgcgcgatggcgatgcgctggcgctgaccgccggagaactgcgtggggaagcggtccacctggtcggggttcagctccaccagacgcatgagttcaccgatgcgttcgcggatctgctctttggagtagtgctggaccttcatcggctcggccaggatgtcgtagatcggcaggcgcgggtcgagcgaactcatcgggtcctggaagacatactgcacggccgaacgcagctcgcggcgcttctcgcgcggaatcttgtgttcgagcttggtgccgaacatctcgatctcgccgtcctgcggctgcttgaactccatgatctccatgagcgtggtggacttgcccgagccggactcgcccacgagcgccacggtctcgccttcgcgcacgtccagcgtcacgtcgtccacggccttgacctcgccgatcttacggcgcaggaatccgccggcggtcagcgggaaggtcttgcgcatgtgcttgacgtcgagcaccatcttgcgttcgtcgcgcgggatgccggcgaacttcgacttggcggcctcggccaccgtgtacacgtcgtggaaggtcaggcccttgtccacgatctcctgggtgcggtggcaggccacgaactggcccgggcggcccggcaccggctccatggccggctcggtggtgtggcatatgtcggtggccagcgggcagcgcggcgcgaacgggcagcccttgggcatgttgaccaggttcatcggggagccaggaatcggcaccaggcggctgttgcgttcgcggtcggaacgcggcacggcacccagcaggcccatggtgtacggcatggccgggtggtcgaagatggagtcgacgtccgccttctcgaccgggcggccggcgtacatgacgacgatgtcgtcggccacgccggcgatcacgcccagatcgtgggtgatgaagatgacggccgcgccggtttcacgctgggccttgcgcagcacttcgagcacctgggcctggatcgtcacgtccagtgcggtggtcggttcgtcggcgatgatcacgtccgggtcgttggcaatggccatggcgatcatcacgcgctggcgcatgccgccggagaactcgtgcgggaaggacttcaggcggtcctccgggtccgggatgccgaccaggttcatgagctcgatggagcggtcgtgaatctgctgttcggtcatcttcggattgtgggtgaccagcgcttccttgatctggtcgccgatggagaacaccggggtcagagcggagagcgggtcctggaagaccatggcgatgcccttgccacggatctcgctcatctcaagatcggacttgctgagcaattcctcgccgtggtaggtgatggagcccttgacgctggcgttcttgtccagcaggcccatgatggccatggaggtcacggacttgccggagccggactcgcccacgatgccgagggtcttgccggggtacaggtcgaagttcatgccgcgcaccgcgtgcacggtgccggcttcggaggcgaagctgacggtgaggtcgcgtactgaaatcaccggttcggatgccatgccttgcgctcctgtggtgttggggttggtgttggttgttacgttgcttgcgttgcgttcgtcgctcatgatgcccgtctcccctctcactcggccttgccgccagaacgggagtacgggtcgatggcgtcacgcagtccgtcgccgatcagctgcacggagaaggtcaggacgaccagcaccacggacgggaagatcagcacccatggcgaggtctgcaccacggactggccggcgttgagcagcgtaccgagcgaggtgtcgggcgccttgatgcccaggcccaggaagctcagcgaggtttcgctgttgaccgcaccgatcacgccgagcacggtgttgatgaccagcaccgaacccaggttcggcaccagatgacgcacgatgatggtgaaggacggcacacccatgaacttcgccgcgcggatgtattcgcgatcgcgcaggctcagggtcagcgtgcgcagcgtacgggcgtagccgatccaaccgaatgcggtcaggccgatggccagccacagccagtcgctgccgccggccgccatgccgacgatcagggcgatgagcaggaaggacggcacgacgagcagcatatccagcagccacatgcccacgcgctcgaaccagccttcgaagaacgccacggccgtgcccaccagggcggcgatgatcgtggtgccgaacgagctgaagataccgatggtcaacgaacggccgaggccgcggatgatcatcgcgtacatatccgagccaccgaccgtggtgcccagccagtgctgggcggacggcggcgaggcgagggcggcgaaatcgggctcatcgtagctccactgggagaatttcgagccgaaaatcgccaaaagaatcagcagaatcagcaccaccagacccaccacggccgaggggcggcgcatgaagcggcgcacgtacagctgcatgcggccggtgcggtggaagtcgtcggcgctggaagcctcctgggcgttcctggcgtcggcggactgcggttcgctgccctgcggatcggtgagttccatatcctgggcggcggcgtcggagaccatgttttcgttgtcgttcatcatgttagatcgtcctttgcgcggggctcagctcagtcggatacgcgggtcaagccaggcggagaagatatccgccagcagcgcgccggacagcgtgcacacgccaccgaacgcggccacggccacggcaccgttgatgtcgttgttggcgatggtctgggtgaagtacatgcccaggccgttgatggcgaacacgttttcggtgatcaccgcgccggtgaacacgccggcgatggagaaggccacatccacggcggtcggaatcagcgaggtgcgcagtgcgtggcggcgaatggccgcgttgagcgtcaggcccttggcgcgggcggtgcgtacgtagtcggcgttcatggtgtcgagcagatacgtacgctgggtgaggtggtagcccaccatgcccggaatcgtcatcacgatggtgggcaggatcaggtgctgcagatagtcaaacacccaaagcaccgggttggagccttggtaggagtgcaggccggtcacgtagaacgcgcggctgcccacgatgttgttgaagttgatggccagcagcaccaccatcaggcccatgacggcggccgggaccaccaggaagaacgttgcggtggtgttgagcacgcggtcctgccacttgtactggcggatggccgtgtacacgccgatgctcacgccgaagaggatggagagcacggtggcgagcgtcaccagctgcagcgaagcggagatacgggaggcgatggccggcgccaccggcgactggtccgggctcaggccccagttccactgggtgaggatgcccttgagccagcggaaatagcggatgacgaccggcgtctggtcgttgatgttggccagatcgagcgaccggttaatcgacgcgatcggcggatgcggattgcgcgacatgtagttcgaacgcggatccatgaatgcgctggccaggaaatacgtcatcgatactgccacgaacagcatgatcacgtagttcacaatgcgcttgatgatgtacttgaacacccaaccacctcccagataactgggacagtgatacccccccccgcacaaaaccacaaattgagtccaatatatggaatatgggtattgacttttccgactttttcctgtacagaaaactgcgaaaacacttactgtgtattgggcaaacatccgtttgttaattttgtatttcctgagcctttgctggacatgccttatactttcgtgtcagcagtccgccggcccggatggtgacagtccccgccgccggcaacggattatccatcagcatcatcagcatcagacaggggcatcatgacgacagacgccagcgcacgggccatcaaacccgaacttctacgtacgtacaccgaggatttcaacaaggaccgcgccaacctgatcgcggcggacgcggcggtttcggccggcgtactcaaggcggccaccgactatcgcggcgtgcgtgcgctgccgcgcgacttctccatcgaactcaagcagggttcgatcaccaatcaggagcgttccggccgctgctggatgttcgcctccctgaacacgctgcgctacgagcttatgcatcgctggaaccttgaggacttcgagttctccgagacctacctcttcttctgggatgcgatggaaaagtcgaacacctacctggagaatgtgctgcgcacgctcgacgagcccaccgactcgcgcctgttcgaggccatcaactggggcccgtccgatgacggcggctggtggcagatgttcgccgcgctggtgaacaagtacggtctggtgcccaagagcgcctacccggagtccgagaactcccgtaattccgatgatttcaagcagtacctcaactccaagctgcgcgagttcgcggccgagctgcgccgccgttcggctgcgggcgctggcgaggacgagctgcgcgcgctgaaggacgagtacatgggcaccgtgtaccgcatctgcgccgtgtcgcttggcgagccgccggagaagttcgacttcttcgcgcgcaccaaggatgatgatgaggataagaagggcgaggcttgcaagtgcaaggccgaggccgacgcagacggcaaggccgaatcctgcaagtgcgagggcaaatccgacgccaaggcctgcaagtgcgataaggacaagtccgacaagccgaaaaccggcaaggacgagcgcccgcagattcgcgagatcggtatcaccccgctcgagttctacaagaagtacgtgccggtggacgtcaacgatttcgtgacgctggccaatgccccgctcaagaaccgcccgttcaaccagcgctaccgcatccgcttcagcgcgaacgtggccgaggctggcgacatggagttcatcaacgtgccgctggacgtgttcaagaaggccgcgcttgaccagctcaccgccggccacccgatctggttcgcctgcgactgcacgcagttcgccctgcgcaaggacggtttcttcgaccagtccgtggtgcgcgtcgaccagctgttcggcaccgaattcaccggcgacaaggcccacggcctcgaatacggcgacagcccgagcaaccacgcgatgaccttcaccggcgtgaacctcggcgaggacggcaagccgaaccgctggaaggtggagaacagctggggcaaggacgccggcaaggacggctactacgtcatgtccgacgcctggttcgaccgctacgttaccgagctcatcatccgcaaggaatacctcgacgacgccacccgcgccctgctcgccgccgaaccggtcgagctcgacccctggcagcccctcacccgccgctgccgctgacgttccgctggcgggagcatatattcgaatgccccttctctctgaacagggagaaggggcattacgttatgcgagtacgcccggccgcacctattcgagactatcgcggctgagctgagcaaaagtgccgtcatcatcggccaattgccggtaggttccggcctcgctaattgttccgaactagttatccacagagttatccacatctcccgcaagctagagccacataccccggttttcatagcgagcacgtgaccgctgcgctacggtggcgtcatgaacgacatattgcccactccaccgcccggcgtattcgacgacgaaccgtccggctggacccggccccacacaccgggcgttgcgtctgcgcgcaccatcaatcctgagctacgttcatcaccacgtatggcgagttccgcgccaactgtgattacaggccctgtgtcgccagcaatgagcgaaaccctcacccaacgtaagcgggaaatgcttaaacgatgcacggacgccgcgcaacagctcgggcaaccggtgctcttcggcatggccacatcgctgatactgcaatccgtgccgcttcccaaggattgcgatatcgaccccgccgagctccataccgtctccgactcacaccgcacacgaatacgtgccatcgtgccgccaacgacaccacacatctggaagccgctgagtgatgcgcacaatgtgcgtatcaacaaacatgtgtacgcactggatctgatacacacttgggcacaactcgccgctcatatatcgctcgaatcgctggtcatacttggcgacgcaatccttacggcaatcgcccgcaagccgggtctggcgaacggccgcactgctgacggcatttatcaggacttcgtgcggcaagtcaccgaactcccgaaattcaacgcaaaatccaagtgcatgatcgctcttgcattcattacgccccgcgtggactctccgatggaatcaaagacccgcatcgcgacgacgaaatacgggcttccgccagccgtgacaaattacacggtgcccggcgcgacattcagcaacggtgcgccgataacgctcgatctcgcttggcccgaatttcgcgtcgccatcgaatatgacggcgatcatcatcgcaccgacaaaaaccagtggcggcgggacaacgacaagcgcgaactgctgcgacatcatcattggatcgtcatcatcgccactgccgcgaacatggccgatgagccatcccaagccgaactcgcctaccgggtcgggcggcagttggcattgcgaggtgccgtattcgatttcactttgacggcaacgccactcgatgagatcgcccggcggaggcgacgaagaatataacgtttatcgcgaaagtcgtacagtatccatgttgcgccgacgctgcgcgactcggtgtccgtgtccgatgtcccggtagcgatgtcaatcgatttatgtgtggaccgggccagatttcgctgtcccggttctccatttcgcccctttttgagcaaccaagacaaaatttcattcacctatcaccccaccgtgcaatattcgccatcgtacatcggcggaattccggggttttgggattacggataatgggcgtttacaaggggggctgtcccggttcccaaaaagaagccgaaatcacgaaccgggacagcgaaatctgtcccggtaatcgcgtcaatcggttgccgtcatcaccggaacatcaactgcgcataggtcgaacgcttcaatgcgcaacaggcatgcgaccatatcgcgatagcgatattccgacggaagtatgggactcaccacgcgaccaatattatttgccgagctttggagcctcgtgcttggcgtggcggatcacggcatcggggaaaccggcgtggatgtagtcggacagcatccgcaatagcctctcgtcaaaggtgtgccgctcatcgctgctggcatcgaccaggatgaaatcccatgagtattcggtgtcaccgtcgttgatgatgagtccgcggccagtgatttttgcggccagcaacgcggcgatctgtatggcgcctcgcttgaccaaggccgattccgcttgagtcaggttgcccgaaaatgtgacggtatacatcatcagtccccccttctttgttattttctagaacagcaatgccttattgtaaacagacagcactctgccataatccttttttcaatatgcggcccatggcattcccagcattaaaaaaagaaacccggcggagggggccgccgggtgagagagaagagagaagaagggttcagttatggggttcgaagaacctcgccaccggtatgaacttcattccgttgacatcttctatataaccgccccatgcttggcgaattgatgtgcttgtctgggaaaagtcttggcggagtgtgacgaatttgtgacgcccgccgacaaccggcctcgcattgtcggggcttgaccgcacatacggcaacgggccacctcgcaacacttcatgtgcgaggtggcccgtcagctacgagctagcaatgccgaatcactcggcggcgagcttggccttctcggcggccagacgctcggcttcggcggcacggcgagcagccagcgcttcatcgaagcgagccagctcctcttccacggcctcggtcgggatcttggcgaagatcggtgcgggcttgggcaccacggcgccgacctcgatcgcctcgctcttccacgggtgcacgttcacaccgagctcgtaatcgccggtgataatcggatacgtgaagccgggcttgtcgagatcctcgacttccttgagctcaggcagcggcgagaaggtaccggtgccgccgagcgcctcccacaccttctgtgcggagtgcggcaggaacggcgcgagcaggtggttcgcgtcagacacggcctgagcggccacgtgcagcacggtgccgagacgagcctggtcgtccttaatcttccatggttcggtggcggaaatgtacttgttgatgtcaccgaccacacgcatcgcctcagacagggcgtgcttctggtggtgggtttcgatggaggagccgaccacgtcgaacgcggcggaagcctcttccagaaggccacggtcttcgttggtcatcgaatcctcgtccagcggcggaatctcgccgaagttcttgttgatgaggttggccacgcggttcaccaggttgccccacgaggaggcgagctcctcgttgttgtggcgcacgaactcggcccacgtgaagtcggaatccgaggattcggggccggccacggaaatgtagtagcgcacggcgtccacggggtagcgggcgaggatgtccttgacgtagatcacgatgccgcgggaggagctgaacttcttgccttccatggtcatgaactcgctggccaccacctgctcaggcaggttgagcggacccatcgggccggtttcgccgcccttggagcccttgccgttgtacgccagcatttcggacggccagatctgggagtggaaggtgatgttgtccttgcccatgaagtagtaggccgggcagctcggatcgttccaccattcacgccacttctccgggtcgccctggcggcgggcccattcgatggaggccgacaggtagccgatcacggcgtcgaaccacacgtacagcttcttgttcgggttgtcgatccagcccttcaccggcaccgggataccccagtcgatgtcacgggtgatggcgcgcggcttgacctccttgaacaggccgagcgagaagttgatgacgttggtgcgccagcccttgcgggtctccagccatgccttgttggcttcggcgagcgccggcaggtcgaggaagtagtgctcggtctgctcgaagcgcggggtttcgccgttaatcttggagacggggttgatgagctcgtccgggtcgagctcgttgccgcaggcgtcgcactggtcgccacgcgcaccttcggcgtggcaaatcgggcactcgccctcgatgtagcggtcgggcagggtacggccggtggacgggctaatcgccacctgctgggtgcccttgtagatgtagccgttctccaagcactgcttgaacatctcctgcaccacgtgctcgtggttaccggtggtggtgcgggtgaacaggtcgtagctcaggccgaggtcgcacagatccttggcgatcacgcggttgtaacggttggccagttcctgggcagtgaggccttccttctccgcctcgacgagaatcggggtgccgtgctcgtcggtgccggacaccatgagcacgtcattgcccttcatgcgctcgtagcgcgcgtagacgtcggagggcacaccaaatcctgcaacgtgaccgatatgacgggggccgtttgcatacggccaagcaacattcaccaaaacatgactcataaggcttgattatccggcgcggcggggacacgcccggatagctgccgcgccgccatcctcatcccactcacctatccgcccgtaacttcccccacatacttatccgtacaccgcttgcgcgcttatccgcatacgcattcgcacacgtatccgtacatgcatccgtacacacgtccacgcacccatccgtacgcacgtccacgcacatccgcacacacttccgcctgtcgatatccaccgagttatccacatcattcgcgcacctagtgaagttatgcacttatccaccgttttcgcttatccggtggcgcgcaagccgcatttctgcatattgttcggtcatggatatcacagcaggtccgatgacggacatcacaacagtcgcctcgccggcaaccgcgcagcctgcggtgccgccgatactgtttaccaaggatctgccgggaccgctcagccttaaccgtctggccgccttcggcgcgttacgtaagctcgacgattccgccggctactggatcgagcattcgggcacactgtatggtcgcgcaaaaatcgtcgcggaggtcgccccgtttggcactgtggtgtgttcgatgaccgccgcttgggtatggctgggaggccccgactttccgagcaccatagacgtgatctccacatcgcacttccgctcggcatccgtcagccgccgcatccgcgtattcaaaagattgacgttgccggagcaaatcatcaagctcggcgggctgcctgtcaccacgccagcccgtacggcttgcgacctggtgatgagtcctgaagacatccccgatccttccaccgtcaacgcactggtgtgtcagctgatgtccgcgtaccagtttcggccaaacgactgtctgcaaatcgtcaaggagcatcggcatcacaagtatgccggacgcgcacgcatgttttttgaatcggtgcagaaggagattgacgaaccggctttggagcaatgcgcatgacgaggggattcatcgccaaaggacatcgcagaggccgccatgccgctcaccgtttacggcatttgcggcaggcgcaacggttgcctcgccacgcggcggcggcacactcatccgaatccgcatcgcgcgcaatctcggatatgaccgcgccgcctgaaccacccatcagacttacgcccgcggtggcatgttcgcccgatacggatgttgccgtgctctggcacatcgcatatcacgtgcccgaactgcgtaaatggctggttgccaatcccaaagccgacgcgcctttgctggaattggtctcgcagcgtggtgggcccggggtccggcaggcgttggaaatattgttcgagtcgatggaagcgtaacggggagataatcgccggctgctgcgctatcccttgattttcagcacagccgcatacacctgcttgcgattggccaacgatccgtcagccagtggatgctcctgcaccacttgcgcgatggcgtccttgatacgcaggccgtcctccaaagcacggtcgatggccagcacggccatgtcatccacgctcaacgtactgggcgcggccgcttcggcctcctcgttggacgcgccgccgacgaccagcaccatctcgccacggggcggatcatcaatcacactttggcgaatctcgccaatcgggccgcgacgaatctgctcataatccttggtgagttcgcggcacagggccatcgggcgattcgggccgaacgcgtccagcagatcgtccatcgaatcggcaatgcgatgaggcgtctcgtagaacacgatggtgcggcgttcgggcaacagcgtgcgcagatactgcacgcgctcggaatgctttcgcggtaggaagccctcgtagcagaagcggtcggtgggcaggccggagagggcgagcgcgtcgagcacagcggaggggccgggcgcgcaggtgacgggcaggccgcgttcgatggcacggcgcacgatggccaagccggggtcgttgatggtgggcatgccggcatcggacacgacgagcacggtggcgccggtttcgacctggtcgagcaggccgtcggccttgtcgcgctcgttgtggtcgtgataggcgatgacgcgaccgttcacatagacgccgaggcgacgggcgagatcgtagaggcggcgcgtgtcttcggcggccacgatatcggcccgctccaagagggccaccagacgggcggaggcgtcgccaacgttgccgatcggggttgcggcgagcaccacggtgccggcggggacggtcacggccgattcgcgggattgggtggcggcggattcgccggcatgaacttcatcattgcgttcaggcacttgcgtcacgctaccgtcagcgtcatactgctcattcaactcatctgcgcttgtcatactcccagtattgcccataccacagagcaatccacgacaatccatggcggaatcgaggcattctccctttgcaggggctgatttcacatgttccggaagtctacttccgtttcaaggggctcctcatccggtgaagcaccagtacaaacagctttgacgcaacgctattccgccattttggcggcgtatctacttgaccatcagcccctcgaaacgcaagtagacctccggcaaaccccaaatcagccccttgaaacgcgagatggcacaataccaacgaagacaaatgaaaagaccctctgcggtggaatgaatgcagagggtctcgtggagctgacggtagtcgaaaccgcgacctcttcgatgcgaacgaagcgctctaccaactgagctacagccccttggatgttactttgctccgcaaagcaactcgcaacaatatagtacggagtgcggtcaaacgcaatttgacgccgaagtgtcgcagacggggtaaatcacccacaccgctccgcatggataccgcggtggcacccggcaacgtcatcatgcttccagcacatgcagcactttcttttcgttgtagaacgcgaatacgatgccgcccaagccgcacagcacggccgcgcacacggcggcgatgcgatagcccgcgccggacgccatgccgatggtggagacgccggtgaacagcagcatggccacggactgccccatcttcatcgcaaaggtgcgggccgcgtagaacatgccctgacggtcctggccggtggtcttggagctggcgtcggcgatattcgccacgatggcttgcggcagaatgccgaacgcggccatcggaatcgcgccgaccaccgagagcgccaaaccctgggccatcgccggaatgaagccgagcgcggccgaaccaagggcgccggcaaatgcgaacgcacaggtgaagatcacgaaggcaaccagcagcaggcgcttcttgccgaccttattggccaagatattgaccggcagatagaacagcacggagacgccggtcatgagcacgaagtagatggtcgtggtggtttccggcagcttgagcaggctggtcacgaagaacggcagaccggtctggaaggtggtgatggccacccagtagaccacgtcggaacacacgaacttgcggaattcgccgtcgccgaacgtctgcttcagggattcgatggccgattcggaggtgggctgggagttgacgtagtccttctcgcggatggccagcggcggcaccagcatgcacacgaacgccacggcggccatgatggtgaaggtcacgcggatggcggtgatacggcccatcatcggcacgaacgcgccccaaatcaccggcgccacgtacgcgatggccgtgccggccacccaagtgaaggagatggcggtggagatggtgagttgctgcttggagtcgtggccgagttcggcgatgagcgcgttgtacggcgtgcagtagaacgtgaggacgatgtagtagccgatcacggtgacgaacaggaacgccgcgttcacccagccggtgccgttgatcggactccagaacacgagtacggtgaccaccgcgagcggcagggcggcgaatttcaggaacggcatacggcggccggatttggcgtcgcaacggtcggagagggacgccacggccgggtccacgaacgcgtcgaagaatcgggcgaaggcggtgatgccgcccaccacggtcacgatgccgagaacgaccaggccctgcggcacgaatacggtctgaccttgggagatggtctcctggtcaggttggtagaaatacacgagccagttggagatgatgccggaaagcagcgcccacccgaactggccgaccgcaaacgcccacactttggcgatggggagatctttgatggctgatttcgccggtgcaacttgcgcgcccgttacacttgctgtagtcgtattgcccattccccataacctccgaatcaacattgacacagtgtcaaaaaccagtatacaccggggttttacactcaattccctgcagggcaaaaccgcacaccacaatccacaccccgagccgccttcccctcagccatccgcaggctctacgatgagagccatgactggtctggccgaacgactaccgcacgtcgccgctttccccgaagcgctgggcaccgggttgctgctgcataccgatgtcgcgctggacgacgggctcagtaactgcatcgatatgttcatcagcacctatgaagccgcattgtcccggttcaaggatgattcgacggtcggccggatgcgcacggccacgcatggcggcacgttcgattttcctgattgggcattgggtttatttggcctgtacgaccagctgtttgcgtcgaccaatgggaccatcgacccatgcgtgggcgaggatttgattcggcttggctatgacgagtcgtattcgtttacgcctgcgccagatgccgctgaacatgcaggcgcgatccacggacgggccatttggtcagccgacgttgagcggcatggcacaacactggtgacgcgcggaccggtcgcgctcgatttcggcgcgtgcggtaaggggtatttggtggatttgcttgcggggatgttgggtgatggcgcgggtcaccctcaacccattcaatacgtcatcgacgccgggggtgatttgctagtgcacacggacgaaccaatcaccatcgcccttgaagatcctgccgatccggccaacgccgtaggtacggtcgaaatcagccacggcgcattctgcgcgagctcccccagccgccgccactggtctgacgccgcaggtcaccaacttcaccatctgctcaacgccatcgacggactaccggttgacgatgtagccgccacatgggtggccgtcacgccgccatcgagcgccataaccacgaagacatcgacgcatggcagcaatgcctcgacaacggcaaaccgcgataccgacgattcgtcgaacaccgttgcggcacacgtccctgtcacactggccgacggcctcgccaccgccctgttcaccaccccggccacccagctgcgcgctcacttccccttcgaatgcgccattctcaacgccaaccgcaccgccgcccaatcccccaattttcccggcggctttttcacacactaatgcacgaaatcatcagtatcacatccctcgggtggaccgatgggttgctcccctcagtcagctacgctgacagctcccctcggagaggggagccgagtatagctaatccgctaatccgctaacgcaggaaacaatccgtcagtcagcgagtgcgaactggctgttgtagaggtcggcgtaaaaaccgcccgccgccagcagctcgtcgtgcgcgccgcgctcgatcacgtcgccgtggttcatgacgagaatcatgtcggcgtcgcgaatcgtggagaggcggtgcgcgatcacaaagctcgtacgccccacggtcagcgcgtccatggccttctggatcagctcttcggtgcgggtatcgaccgaggaggtggcctcgtcgagaatcagaatcggcgcgtcctgcaccatcgcacgggcgatggtcagcagctgcttctggccctgggagagcgacgacttgtcgtcgagcacggtgtcatagccgtccggcagcgagcggatgaagtggtcgaggcccacggccttgcacgcatcctcgatctgcttgttggtcacgccgggcttggagtaggcgatgttctcgcgcacagtgccgcggaacacccacgtatcctgcagcaccatggagaactggtcgtgcacgttccagcgcggcacggacttggtgtccacgccgtcaatcgcaatcgagccgccggaaatctcatagaagcgcatgagcaggttgaccatggtggtcttgccggcaccggtcgggccgacgatggcgaccttctgcccggccttgacggaggcggagaagtcgtggatgatcggcttgcccggttcgtaaccgaactgtacgtggctgaattccacgtcgcccttcacttcgtggccgttggtcccaagcagagcggacttgccggattcgtcctccatctccggctcctcaaggaagccgaacacgcgttcggcggccgccgcgcaacgctgcaggttctggaaggcctgggcgaactgcgccaacggctgggtgaacagacggacatacatcatgaacgccacgatcacgccgaactcgatctgcccgtcgagcgcgagcgccgcgcccaccacgcacaccaccacgtagccgaagttgcccacgaaattcatgagcggcatcatcaggccggagaggaactgcgacttccagccggactcgtagaggtccgagttgtacttctcgaagcgacgaatcgaatcggcctcgccgttgtatgccttgacgatgaggtgaccggcgtacatctcctccacgtggccgttgacgtcacccagcgccatctgctgccgggcgaagtacttctgggaggacttcatgatggccatcatgatgatcaggccgatgaggctggcaccgatggcgcacagggtcatgatcacgttgttgtagaacatcatcaccagcgcgcccacgaacagcgtcaccgaggtaatcagcgagccgagcgactggcccagcgtctggccgatggcgtccacatcgttggtgatgcgcgacagcacgtcgccgtagctaaccttgtcgaagtatttgagcggcagtttgttgattttgaccgagatggactcgcgcagtcgctgggcggtgcgctgggtgacgttggccatcatccagctttgcacgtagccgagcacggcgtagcccacgtacagggccaccaaggtccaggcgatgtggcccaccgtgccgaaatctaccgagttcatcaccggtctgccgttaacgatggcgggcagacctttgacgatctcgttggtcatgtccttgagcttgtccgggccgacgatctggcagacggtgccggccgcgcccaggatgagcgcgatgatgatgacgggaagatagttgcggcagtagttcacgagtttgcccatgactttgccgaaatcatggggcttttcgacggcacgcctgccgcccattggtcctcttggcatttgttttactccttaaaagtccgtattgacctccctctgatgagggaggtggcgcgaagcgccggagggagagaagccgtacgcgactacccctcagtcagctgtgctgttttattcgctcgcttatcagctcgtcttcgcctgggaacagcccactgggctgttccctttacggctcagcccctgacatggggagctaccgctgccgcccccctacgccgtaagctccgactggctgagctgggattcggcgatctggcggtatacgtcgcagttgtcgagcagttccttgtgcgtgccctgacccacgaccttgccgtcgtcgagcacgacgatgcggtcggcgttcatgatggtgccgatgcgctgggccacgatgagcttggtggaatccttggcctcgcgggcgagcgcgtcgcgcacttcgcggtcggtcttgaagtcgagcgcggagaacgagtcgtcgaaaatcaggatttccgggtgacggtacaccgcgcgcgcaatcgacaggcgctgcttctggccgccggacacgttcgatccgccttgggcgatcgcggcggaatacccgccgtccatgcgcgccacgaactcgctggcctgcgccacgtcggcggcggccttgacgcgattcagctgctcggccggtatatcggcaccttccgcggcctcgccagcggcgatcaacgcggcctcgcgcttgcgcccggccggggtggaggtatcggccatctcgacctccgccgggtcgcccggctgatcgccgtagctcacgttggaggccacggtgcccttgaacagcacggactgctgcggcacgtagccgatcttgtcgcgcagggccttcaggtcgtagtcgcgcacgtccacgccgtcgaccaacacctggccttggctggtgtcatagaagcgcggcacgagattgataagagacgacttgccggagccggtggagccgatgaacgccaccgtctggccctgctcggcggtgaagttgatgccttccagcatcgcctcgcgcgaatccgggtaggtgaagctgacgttgcggaattccacggtgcccctctggccggttttggccacgtcggcggcggttttggtgccgttctcgacgattggctcagtgtcgagcacctccatgatgcgctgcgcggacacgtcggcgcgcggccagagcacgaacaccatgctcatgagcaggaagctcatgatgacctgcacggagtagttggagaacacgaccatgttggagaacacggtgagcttgtccttgagcccggcggcgtcgatgaggtaagcgccgatccagtagacggcgagcatcaggccgttcaggacggtgttcatcaacggcatcatgaacgccatgacgcggttggtgaacagctgggtctcggtgaggtccttgttggccttggtgaatttggcttcctggtagtcctcggcattgtaggcgcgcaccacgcgcaggccggtgaggttctcgcgggccacgaggttgatgttgtcggtcagggtctgcatgaccttgaacttcggcatgaccatggccatcatgacggtgatggacaccagcaggaccgccacggcgatgccggtggcgagcgtccattcgaagccttcgccggcgatcttgcacacggcccatacggccatgatcggcgacttgacgatgagctgcaggcccatggtgatgaacatctgcacctgcgtgacgtcgttggtggaacgggtgatgaggctggcggtggagaacttgctcatctcggccgggccgaaggactcgaccttgcggaattcgagcgagcgcagacgctgggtgaacgaggcggccacgcgcgcagcgatgtagccggtgatgatggcacacgccacggatccgagcgagatgagcagcatcttgccgcccgcgatccagatgtccttcatgtcgctgcccggcgtctcgaccagcgtggtgatgtctgacatatagtcgggcagtttcaggtcgaagtagacctgcccgacgatggtcaccagggcgatgagcatctgaccgatctccgctttggagaggtatttcatgatgcgaaacattggtttccccttgtgttggttgggttggttattggttattggcgattggttcttaagttggctgggttatcggtgattatcggttcacgatgtcttaatagtttccattgtttgattacttacactgtgagatattatacgcacttctgtatgttcgctgtgagcgtcctcaattacctttacctccctctgacgagggaggtgtcaccgcgcaacagtgacggagggagagacccgccagcgggaggaagctagtctcgctcagcctccgcgcgcttagctgccatgtgttcagccacgcgcttgtcccgctccacgaatgcctcacgcacttgttcagccgtcggccgaggccgccccggatggcaaatcgacatatatgtggtgaactcagacaccaggtcaacgaattcgcgcgtgcgccgctcccccatttgcgagaaaatccagcaaattgcggaacgcatttcctctatcatccgatgagactgctcgcgcccggaatcagtgagattcacgcgaataatgcgccgatccttggaatcaatgtcacgcgtgacccagccttttttctccagagacgacagcacagtggagatgcggccggaactggcctgcagcgccgatgccaattgcgacggcgtttgcgtccccttcatggacagctcccggagcacgaactgctcaccatgggctccacgagtgaattccctctgcattgtcgaacgattgccccacacgctggcatacagttcactaactgcttcctgctcaaatcccataagagcaccatccattcccattcgccacacggcagagcgccgcaaacacccccaagaatatctcacaccgtaaacaattcattactagaaactatttttggaacgcataatgcacacactccacgctctttgatattctgaaagccgcatagatattcacttcggggcgtcgtctaagaatatttgctgggccaacggtagcgacgttggcattgtgctccatgaggtatctggtcgaaaaggcggacgaagacagaccagttgggcggagcgcgcccatacctcaaaaccattgcaattattggctttgaccattttcgtggagtcacgaaaatggtcatgaaaaacataaggacacacccatgaaccgcgacgaaatcacacgcaaaaccagcgaactcagcactatcgcacacaccaccgaggactccaaagttgagtattggtatgcacgcgagctaatgacctatatggggtacgacagatgggaaaacttcagcaaagctattacacgagccaagcaagcttgcgacaattccggcgtatccgttgaatcccatttccgtgacactacgcgagacgtgactctcggcagcggtgccacccgctccatcgcggacgtcaagctcacccgatacgcctgctatctcattgctcaaaacggtgatccaaagaaagaagaagtggcacttctccagagctattttgccgttcagactcgcaaaacggaaatcattgagcaacgcatgggagaaatcagccggctcgccggccgagaggcccttgccactgcagagaagaaactctatccgtatacccaaatcacacacaacaaaaccacacaagagcacatgtacacgcccaaccacgccgcagaacgccggcaaggatgtgatacaggccacagaaagcgttgtaccgcctaggcaatgcaacaattgtccgctatgctctgaaggcagatggcggcacggatgccatcccaaagagggggtatgaccatgattcggggtatgaacctatgcagcatcgccggctgcacgcacgaagcagaagaagcgggcatgtgcaacatgcatttcacatcggcgctggttcacggagcgctgcactacactgcggacggacgtccgtcgcactgctgagcgcaacaacaaagcaaaacaaccagtaacgctcaacggcttccacatgttcatgctctaattgcatgtacttgcagacacaatggccggtctgagccagctgccctcgcatggagcagctggctcagaccggccattattgttgctttgtactgtttgcactgtattgcgcctgcattgcgcaagctcgggcgcactcgggtgcactcgctgagtggcgtgaatcgcagattgctcaatagcaacgcaatccacgccactcagcagttgccatggttatgcgcggcgtttgcggatgacgagcaaggcaccagccgcagctgtcagcaccacaaccacgaccgcaatggcagccacggcaacacccgtattcgaaaggggcgcagcgccattagcagccggcttattcgtggcagtgttaccgggcttagcagtgttgccaggattgttggtatcgccgggcttctgctctccagggccgggagtgacctccgtggccgtgaccgtgacttcgaacgtcgcgttcacgccacgataagagacggtgatggtcttcgtgcctgcggtggcagaatcaaagccagtgaacttcagatcaccatcagttggatcaatcagcttgcgcagcgtttcggtatcgccgactttgtaaatggcggataccttcacatcggcagcgttgaacttatcgcctacctgataggaatccttggtcacttccacagcaagctcggccaactgaggcagttcgccgaatgtcactgtgtaggtttccgccgtgccatcctcagcagttacagtcaccgtggccacgccgctgttctcggtcgaagcctgctccacctgcaccgtagccttcgcgtcagcagcagtcgcctccaccgtcgggtaagaagcagcgtctccggccagcgcaccggcatattcggtgatatccgcggagaatccgtcaaccgtcttgccatccacagtcagatcagcaagattggcgttactagacggctgcggctttggcgttgcttcaccttcggcgatgcgtacttcagcgatcttggcatagtcattgccatcggcgtaggtgaagttgaggcgaatgcccttggtggcgggcagagcgctcacatcggcttccgtcacggctccagcagcaccattcacagtgactgccggcagcgtggcatcagtccacgtggcgttgtcttcagctaggtacgatacagtgaagctcttcggagcggcctcgcccttggccttatccaccgcaacgctgagcttgcccagctgatatgccttatcgaaggtgtagctgagccacggcgaggtgtcgccggtgccccagttcgaccagttggtgctcagattgttgtcgcaagtcaggtcggccgtagaagcggaggcccagctgctggccggctcatacttcgaggctgcggcggacgagcagaacaaccgggcaaggttgctttccacagtcacggtgagcgtggcagttactgaagaatcagtgacaaggcgtaccgtcacggtttgctcgcccaatttggtggtgtcgaagccttccaacgtgtattcatctggctccagtacacgcgtcttgccattggtgagcgtagcggtaaccgtcacgtccttatgcgcgagcgtctgcctcttggcgatagtggcttcagggcccttggctgcgatggactccacagcagcagtctgcgaaccgaacgcagtgccgttgaaggccacggtgaatgcgccggcattgctgttcgacgtggcgaaagcaccggcatcgagcccggttacgtccgcaccggtcagcgttaccgtagcgacatcctgccattcatcgttcgcggaagcacgccagtagcctttcagagtatcggttgaggtgcgctccagcttgagctgcacttggtcgccgaagccggtaccaacatgcgatgtttccttatcgatgtagccatcggcattggaatcgtactgcatgtaaacgccgcttgggctggcaagtaacgtggcatatcccttgccgccgttagcgccagtaagaccgttacggaccaccagaccggcgcgcggatcgccattaccgcccaagtcgagcggcttgaccgtggtttccagcgtttcgttcacgtccagagcatcaggctggtacaccgcactgccctcgttgcgatccgtccagacgccacgattggcgttgtccgtaatcgtgaagtcataagcaccgccggacgcagaaacctggcacgcgctgccgcccttccaatgagcttccttccaacttccggaaatcgggttggagcaggaaacatcgatggttctacggaatgtacggcccggattgaagttactgctctcggcaagagtgcccgtaatggtgtaggttcccggcacattgaatgcgtaggtgttaccagcagccttggtcgacttgctgactgccgtaccgccttccacattccatgtcaccttggtagcaatggtatcgtcgccttccttgacgttgacggtgtccggcagagtaacggttccgcccgtgttcacggtcttcgggagatcatcgccggtttccacagtccagttgaccagcttgcccttggcgctaccatggttgccccaatagctcagatcccaaccgtcgggctcgccttcttgagcgggattgtgcatttcgatggtgccgttctcaccgatggtcagcggcagccaaacataggtggaatcggctttaccggaatcccaacggtcaccaaggtagatgaagtgacctttctcctggtctactgcgagcacactagccgactgcgaaccgaatgtggtgccgcgggtatcgcccacggacaacagaccatccgcgccttccggcatgttgttgtaccacgtgttctcgttgacatcgtccttttccacgccacgggtccagcttcccagcatggagtcggcggtgtagtaggtctgcttgttcggggcccagccggttgcaccagatgcgatgatgttgtaacgcccgtcatattggaatacggcaggagcttccagcgaaccattttgtttgacgatttggaaatcttcgccacgcaccggggcatccgtagtagcgtctgcaagaatgtatgggtactgcccgtcagcagagtactgcttttgtccctcggactggtccacattcgtggtcttgactacattggtgtaatcatcgttgagcttggcgatgtacagcgtggcattggcttcggaagaatacagtacataggcactgtcgtccttcgggtccacgaacacagtcatatcgcggctgtcaccgttctcaccccagctggggttacctgcggcttctttccaattgttctggttaggcaaacgataggcacccaccatagtgaacgggcccgccggattgtcggaaacagccacgcccgcaagtgcacgtgcatagttggaaccgcccggcgtggtgcttccatcggaatgccaccacagcacgtattgcttgttcttcttgttgtagatgatcttcggacgctcgaaaatgccctgtacggaatcaaccgcgccatcaccatcctgatcggggttggtgttgaggtacgggaagattgcgtcggccttggcagcgtccacactgccgtcggacttggtcaggttgtaggccttgtcgaaataggcgtaatcggcattgctcttatccgtcaactgagatttgctggtcaccgcacgcagcgccacaccaagatcggtccagttgtatagatctgtcgacatataagcatgaacaccggggctgttgtcgtaaccgttagaacggtcttcgccataccagtagtaggcgtcgccaaccttgaccacttggccaccgtgcgcttggatgtgtgtgccgccattatcattggcgttcttggcataccaatatggctggaagtaatcgctagcgttcttgcccggatcggctgtgggctggaacttggtgtatgtcggcacttggccgatggtaggcaggtaatccacacctgccgcactggcacttgcagcggccagcccgcatgacaatagcgttgccgcggcggtaattgccgcgataagagcgccctttcccttattgtttatcttcattgatttggttccttgattgatgataacggttttttgaacaaacagttatgtcgctatccgcgaagccagaaaaggttcgacaaatcaatataccgatactgaaaactcagtattcaacttgtcggaccaattatggtcaaagagcggaggaaccggccggcaatagtcaatattgccggcttgttccttcacccattactgcgcgagggtgctatgcacgcttgcgcagcatgaacagtgcacccgcggcagcggccagcagagcgacagcgccagcgatggcggcaacactggaaccggtgttggccaccgtgttcttgttgccgttgccggtggcaccgggcttgttggtgttgccgggcttctgttcttcagggccaggggcgactgcgttggccttgaccgtgacgttgaaggtcgcggtcacaccacggtaggagacggtaatcgccttcttgcctgcggtggtggagtcgaacgagccaatcgcaagctgcgggtcgtcaagagcgaccggcacttccttggtcttgtcgccactctggtagacggcagtcaccttcagaccggcggtatcgagcttgtcgccgatggcgtactcggtcttcgtgggtccgatcaccttgagcgaagccaaagtgaaggcgttgaaggtcaccgtgtaggtcttcgtctcagactcgtcggctgaggtcaccgtaatggcggccttgccgccaagcttgccgttctcaaccgcgtcgccagtcaccttgacggcggcggcattgtcggtggcgaaggcctgcagcaccgggtttgcctcggcgtcgaccggcagatcaaccgtgtagtcggtcttggccgggtcgaagccttcaacggtttcgccgtcaagacgcaggtcgcccagcgtggcatcggatgctggctgcggggtgagtaccgtgctgtcttgtgcgaacacctggatctcagccacgttgatgtacaccttggtgtcctgcaatgtgttagtcaggcggatggccttggcctttaccggggtgccgagcacgaagtcaacggtcggggtgtcggcggcggtgatgccgtcggagccagagccggcatcgccggcctgtatcttccagccatccttggtaccgactccatgccattcgccagcctcatcctggtattccagcgtctggctcttcggccaagacgcacgaccatcgtagtagaagaaggtcttcacttcggtgatggtctgagcttcgtcgaaggtgaacgtggcgaccgggtccaccgtcgaggcggtggaagcccaagtggaccaaccctttgacgtagtgtcaccatcgatggccttggaagcggaggcaccctcctggaagttcaccgagaagttcgtgccagaggccgcggcgatgttcttcgcagcaccctgaaccggcgtcacgaatgcctgaatttcggtggcgttcatgtagtcgttgttcacggtgttcacaatgcgcaccttcgtggcattcactgtgcccttatcggccttgaacgtcaccgtctggcctgcggcaggcttaacatcgctaccgaattgcatccacgtctcgccatcagtggtgtactcggccttggcggaagccggagccttgtcaccatacgtaatggtcacgctgctaagctcacactcagagccgaagtcaatcgtggcggtcgggctggcggaatagtcaccagcagagttccacgtcacccaggcttcagctgacgtgtcaccatcggtgagcttcttccactgatcgcccttgctgtattccgtctgctggttggtcacggtcaggctggaagcagtgtcggccacattctcaggcgtggcggcggtgacatagatcgcgcccttcagcgcaatcgtggtcgcgtcgtccagctggtaagtaccggtcacggcaatgttgtcgccagccttggcatcggcgagcttggtatcaagcccatcgaagttccacgtaaccttagccgcatcgccctcgaatgcaggcgatgccttgacgtgcagatacaccggcgcagcctcaagcgcggccttcgcctcgctcgcactggtgccggccagcactgtagccgataccggatcggaaacggtgagcgcgccaacgtagaccgtagcggcgacattgaactcgttgccgtacacatcggtggcggtagcggtggcttcgtaggtgccttccttggccacatcgaccttggaagtatcccagttggcaaccgtggccttgccttcgccccaggtgtagtagagcgtgacttcggtcggcagcgcggccttctcgttaacggcggtctgcacgttcacggtcttctggctggtcggcgttacattgcgtagagtccatgtctggttggcggacggcgaagtgccgctcggtgactgccacaagccaaccttcgtgccgactgtggtaccagagttatccacatcgaggttcgtcttagtcgcggcattgagcagctggtaggtcgaaccatcggaagtgttgagaatccacttggcagccgggtcggacttagcggcctcaaccgtttcgttggaaagcgcgttcgtgccatccttggacaccagcaccttgccttcggcgttagtaatcacataagccttgagatcagggcgctcggagtcggcgggctgctcgatctgggtaaaggtccaagtctgcttcttggcgttctcggcatcggaagcgacgttggccagggacagcgcggaatcaccagaagtggtatcagccacggccttgccggactgcttaccaacgagctggtaagtgtcgccggtctcgacggcagcatccttagcgtaaccggtcacgccagtgagctggatggaggcgatagaacgggcgggcacagtgaccgtagcggtcttggcagccttgtcaatcatcacagagccttcagcttgcttgacgttgctggtcttggcgaagacttccggagtggcggaatcgacacccgcgttcttgtcttcggcagaggtttcggtggtcaggtagagctcaccgtaagcgttgtcggcaatctcgccgtacttcgacaggtcgatgacgaaggtctggtcagaggtgccggagttgcggtggatgacggtctgtgtcttgccatcgtcggaggtggcagtcatgttgttgtcttcatcgttgttggcgatgaccttgtcgcccgcgtggatgaagtgggtgatggccgtgacgccgttgtacttggcgtttgcaataaccgtgcacggttcaagtccatcggtggtaccgccgttgttgttcacgcggcgctcggagtagagcttgccgtccatgccagccacggtgcagtcgaagtcgatgagcacggtgccccagttggtgttctcaccggccggattcacattcgagcccatctgcatgttgtagaggtcctcgaccacctgccagaaggtgaagtccttggactgcaggcgggtgacgttggagctgatcttgctcatcatgcccagcgcgttgtcgaaaccgtacggattgtaggagccagactgccaggagccgtccacctcgctcatcgacagcttcttgccgtctgcctgagcgatatcgcgcgactgcatctggttgctgtcggagtaggcgtgaacgttgtactggccgataaggtccttgatcgcctgcgggtactggttgtacgacttgacgaagtcggcggagttcgtggcatcggtggctgcgatgatggtgtcatcattgtccttgagcgcctcagcgagtgcggtaatcgtctgctgctgctgggcgttgctgacatgcataccctcctgcggcttcttcagcgcgttggagtatggggtgacggacttatctttgtcggagtagtacttatcccagtagttgttaatgagcttggtgttgtcatcgctctcatcggtgtacttcgaagccatgtcgcccggagtgccccagtaactggtctcggactcgttgaacggctcgaccgtgtcaacgtttgcgccaaggctttcgaggtgctcgacgttcttggccatgtactgagcgaatttctcagggtttgcaagattattgctaccggagttgcgtccaccagtggcgtaaccgctgttggtcaggaaccacggagcggagttggcgaaggcctctacgtcggtgatgtcagggttatcgccggtggcaccgcgctcaatccaccagtcttgggcggcggacttggagaagtcatactggttgtcgtcagtcgggtcgaatgccgcagccagcttgtctttgtcggcctgcttggtggttacgccattgccatacgtgccggagccggtggcgtcatctttccacgtgccaggcacggcagcgccttggcgcatgaatgggtagccgtaggcaacatcggaggcattgccgccgcccacgttgtagcgggccatgttcaggtccagtcctccatcaccgaagatggactggtagaactgttcgcgcagctgtttgccgtattccacagccttagccttggaagcgtcatcgccgagatttgtggtgatggccgattcctcgccgaggctgccggtggcgttggcgaaccaagccagcgaggtgccccagccatcgaaactgttggcataccacggattcggggtcacggtaatggcatcgttatcagccgcatacgcagtgccggcaaccgcaaacgcccctcctcccactagtgttgccgccgcaaccattgcagcaagcgatttgctcagtaccttcattggtctccttagtgttcctgctatccgccttataccggaaaaatcggcctttgcttcactgcgccggcctctttgcctgatacatgacctacgtcgactccttctttcggcgcagccaaaatgtttacgcaaacattttgatatgagcgattttatcacaaaaccgtcacccagcaaacaacttcagagaccacaaacgacgcacaaagtcatgagccattcgaattgcgctggcccaatcgctacgaatcatatttgccgtagcccttaagtgaatcccactgcatcgagatatcgcgcccgctatcccttccgataacgccgaccacgcgtgttgccttcagcaatcagctttccttgcgcaactaaaccgtttaggaatttgcggactgttctgttatcgagctctgttatcttggcgagttcaggtacagtcacatagtcaacctctgtcaagcgtcgattcatcgccgacagcatcgctgcccgcgaatcaatttcacccgatgcggttgcatctgctttcttaccatccacacgttccccgccaatgagcctcgcaccctcttcggcatctttctcaactacagatctcacgctagcaaaaccagaaccacccacggtcttcagcgcaggaacaataggaatcgtcgcctcgaatatgtcaccatcgcggaactcaggctctcgctcagtatattgccgggacgctcttatcagattccgcagtccgctacccagctgctcggctatgccggtctgcacaaacacattagcgataatcggattctttggcattggcgtgaactcgcccagcttcattcgaccttcaaagaatgagcgcgaagcattaaccgtccggatggattcattatcaatggtgacacgcgccaccaccggactggaatactcccgatgcatgaggctgtttgccaccaattcacgggcgatcatcgtacgcgggctcactcgcttatcgccctttaacacaaagcggtcaggcagattccgctcagtaaattcacggagttgctcgtacgaatcgaacaagttggtccgcaccataagtcggtcatcgtatcggtcaatattgtctcgccgaaccacggcatcagtaatatacgctgggcaaaccgaggaaatgacttcatccttgcccaagagcagcactgcagcaagattaaagccctcttcgccggtcgtgtaatcacgatcgtatagcttggcgctgcggaacagttcttcgtcagacatagttccccaagggtgcccagctcgctgagcgaccgccagctgccgcattcgcgcaatcagctcaggacgcaaatcaaacggagtcacgtaacggaaaattcgccgttcggaatagtagttctgcttgcgaatatacatttgactaatctggatatcgctttcgatgtgtgtatccacatcagcaatgcgatcaaacactgcgcccttgaaccgcacaaccgaagaactcggagctacccaaatacgaacaataatccgttcgtcgtactcgatatgttccgtttccaccattggagccggttcgaacatcttacgattagacactacgttgacaacgttgcgctctatctcactaacgcgcttagaatcgacgccgagcacttgaccgtcatcgtcaacgccaagataaatgctgccaccagaacgattggcgaatgagcatacagtctcaaaagtatccgtatgaggcaattcgctgcagcgcttgaactcgaccatagatgattcaccggcctgcagcacttgcataagttcatcctgcgtcatcgcattccgcccttcatagcgataattcatacattaggacatggcacttatcgtattttagcatctaattagtacattaggacattgttttatgtcctaatgtactaattaggcggctaattgtactaataattgcacactgatgtactaatccgatgatcgaatgcactaattgtccgcgcaaatgcactaatcggatgaccgaatgtatcaatgagacctataggcagccgattggctgacgatcagcccagtcattggctatcggccgctaaccagtcagccgccaacagccaacagccacccaactaatagccgccagccaatcagcccgtccaatcactccttgtgttccagtgcggccttcaaatcgcggctacggtagcgttcgcgcagcatagagaatccaccgaagcccacaagccacaccaggccggcaatcgcggaattgcgcgtatcgtccgcaaggaacaacgtcaggtagatgaacacgaagaacacgatcgccaccgtattgagcaccttccacgcgggcatgacgaacccgtccgcgatgaaatcggcggaacggcgatacctgcgatgcgccagcagcgtcaggatgtagatgaacaggaacaccgcggagctggcggacgagaacagcacgaacgcccccgagatgccggggatggcgttgacgatcggcgacagcaggatcagcgccgcggacaccaggatggcgcgggccggcaccttgcggtcggacaccttgccgagcttgttcagcatcgggttcggcgacacctcggacagctgatacaggtggcggccggcggaatacaacagcgaattgagcgacgaggacgcggcggtgatcaccacgaagaacaccagggcggacgcccagttcaaaccggcatactggaacaccatgatgaacggggaggcgaaggagccgtcctcgttcggcttgaacgaggtccacggcacgatgcacatgatggccacgagcgcgcccacgtagaagatgagcacgcgcacgatgatctcgttgacggctttgggcagcacctcacgaggattcttggtctcggagacggtgacgcccacgaactcgagcagctcataggcgaagaacaccatctggaagctcatgaggaaggccatccagccgttcggggcgaacgagaagccggagaacaggttgtcgagtccggcgtggcccgccgggctcacatgatccacgccatgaatccgcgcggccgggtaatggtagccgatcacgatcatgaccacggcggtgacgatcatcgcgcaaatcagcgtgatcttgatcatcgagaaccagaattccacctcgccgaacaccttgacggcgatcaggttgacggacaccagcgacaccaggaaacacagttcgatcagccatttccaatgggtcaggtcgatgccgaacgtgtcgaagaaggtgatgaagtacgtggagacggccgtgatctcggtcatgcccaacagcacgagcgcggcccaatacgtccagccggcgaaatgcccccatccgttgcccaggtagcgggtgatgaaattgatgaaggtgtgctggctggggtcgcggtacatcatctcgccgatggcgcgcatcaggaagaacatgatgacgccgaccaggatatacacgaagacgatcgagggaccggtcagcgccagcgacttgccggaccccaggaacaagccggtgccgatggtgccgccgatggcgatgaactgcacgtggcggttgttcaggccgcgctccatctcgttggtccggtccaggctttcgacagacttgagtttgcccgtagcctgccgtgtaccaccattcacattcgtatcggccatactgatttcatttctcttctctgccgcccgattgttacgtaccggacgcgatactcgttcaaaacaagttcagactgtatcaccgaaatatgtcgcgaaaaccgctcagctcaagaatacatgcgatgatactgtaaatattcagccaaaaaagttcaattcaccaacacctaattgaacttctacctctattccacggacttgagcgagctgaccgggtctacgcgatcgagcactgggttggtgaacagctgcaccagcagcgcgaacgccagcgtcgccaccacggcaatcgcatagctgtaccagtgcacttccacttcgaaatacagcgacggcatattcaacgcagcagtcagtaatccgcctatccacctgccaagcggcagaccaaccaccacacccataccggtcaatatcatcatctcgcggttcacgtagttgtgcacctcgcggtcatagaagcccagcaccttcagtgtggccatctcgcggatgcgttcggacacgttcgtattggccaacgtaaacagcaccaccagcgccaggccgccggcgagccccacaatcagcgccaccacggcacccatcaaatcgaacttaaacgtggcggccagatgcgcacagctcacggccttgagcaccgacgattcctcgcccaaccgatccgcatattcggcctgttcggtctcggaacctttcagcttggcgagcatcgcgttccacgtcaaggtcgaggcagtgccatctcccgaagccgaagacgtcacaccgccggccgcaaacttctggtcgtacagtcgctcactgatgtacacatcagagccaataagattgcgcgtcacggccgtgacctgcaccttggcccggctgctaccgccattgcccagcgtgacggtgtcgccggcatgaatattcagcgagttggcggcggactgcgatacaatcacgccactatcgtccagcgctacagtgccgccacccgctttgccgaagatattgggcagtccgaaccatccatcatcgccagcttgttccagcgtgaccatatcgttcaagatattcagcgaatcgttgggcacggtcatcagctgcacggtttcgctttcctgcgccgcattgctcatctcgccactatccacgcgcagattcagcgtttcggtggtttggccatcttgtgccacctgcttgcgcatcgcggcggcgtcatcgtcattggccacgaccatcaggtcgtactggtagatctgctcgtattgtttgacgccaatcgtgtcgacggtgtcattaatcgcaaatccgcagataatcaacgccgtgcaaccggccacgccgcccacggtcataatcaagcgcgacttgaatcggaagatattgcgcgcggtgactttgccgaggaagttcagccggctccataccgggcgaatccgctccagcaatatgcgagcgcccgctttcggtgccttcggccgcatcagcgcggcgggcgtgtgccgcatctcctcgcgacaggcgagcgcggtggccacgcccacgccgaccacgaacagcacgatgccggccgaaccgtacagccagtcgtattcgagtcgcacaccgggcaatatatacagtccctcaatcaccaccagcaggaatgccgggatgccaaggaatccgaccagcagaccgatgccgccgccgaccaggcaggcgagcaacgcgaacagcagataccggctggacacggcgagtccgccatagccgagtccaaggtaggtgccgataagtccgcggtcttcctcgaccatgcgggtcatggtggtcaggctcatgagcacggcgaccagcaggaacacaatcgggaatgcgcggccgatggattcgatggaactgacgtctgatttgagcgagctgaatccgtcgatcgaagcgcgcgtctgcacataccaacgtgcgttggccacatcgtcgatgcgccgttgctgcttggcgaattcgctttccgcttcgcttcgcttcgcatcgagttcagactgcgcatcatccagtttcgccttgccgtccgcaagctgttgttcgccttcttccagctgccgctcgccttcttcgagctgctgcttgccgctggccagttgggcggcctgcgcttcaagttgcgccgactgggtttcgagggttgtggcattcgcttcgagttccgcggatttggtattgagctgtgcctctcctgcagccgcttcctgttccttggcggtcagttgcgcgttctgctggtccaaggtggattgtgcgggggcaatggtttcgtttaatgtgcgctgcaaatcggctttctgctgggtcagactgtcccgctgcgtttgcagttccgtttgcttggcggccagctgttgccgcagctcactgattgacggcacttcaggcagggtaatgccaaggcgcgcgagcagttgcttgatggcctgccatgtgggtgagttgaagtcgatattcgggtcaagttgcgccagtagattgtcggcctgttgaatcatggacagcatctgatcaatttgtgccacgccttggtcgatttgggtaatgccctgttcgattttcgtgcgattggcagtcagttccgtttgcgccgcatcgagctgtttgcgagccgaggcgagctgcgctttgcccgattcgagctgggtgcgcgcttcggctatctgctggcgaccttgcgcgatctgttgacgggccgatgcaatctgcgcacgtccatcggcgagctgccgttcgccatcggtaatggttgtcctgttgttctccaattcggtacggctatcttgcaatgtcgttttgttggcttccagctcggcccagttgtcatcgatctgcttctgggcttcgtccagctgctcgttggcctcgtctttggcatcatccagtttgcgctgcgcgctggagacgatctgttgacgacgggctttctggcgtgtggcctgtatctgatgttcgatacggtcggccacggttttgatggcttcatcgtaggcatcggaaaacgtgtcaaaatcggacgcaccagtgacggcaaccgatatcgcagtgtatatattgccggtcacgccgtcgctgggtgcaaagaacgtatagtcctcggatgaggtggaccggaaggaggtcatgcccgaatagccgtctggattgttgaggtcgcgcgggtcgagtacgacgccggtgatggtgagtttcgtggggaactgcggggattgctcggcgtcggcgtccgtattggcgtcggacttcgcatcggatgccgaggcattggcggcgacacctaccgtatcggcattattggaatcgtcagtctccgtggccgctaccgatatgacggatgaagaggtgtcttgtggcgtcacagtaatggtgccgccaatcttgagtccgctatcgttcaggaattgctgcgtaaccgccacttcgccggccttgttcggcagtttgccctgccgtatgtacggctgatcaagcccttcggtaccgatttcctgcatggtcacggttttcttggtgccgtccaccaacgtggtcaccgtctgagaacgttcgggctgcacggtttgcacaccgtcgattcggcgcagtgccgttgcatcatcatcggtcaggccgtatgtggatagcacctgcaggtcatgcagtccctgctgatcgtaaaaacgaccggccgccagaaaagcatcgcggcatccggcgtagatgccggtcagcacggccacgccaagcagcgtgatgacggcgatcgagacgaacctcttccagctgcgcagccagcaacgcaacgtatctttggcaaataccgcagaaacgcccgctcctcgaccgccgctatcgtcgaggttccgccgtttcacagaatgtttcacaggttgtttcacgaatcgcctcgcttgtttcacggggcgtttcacagagtgtcttgcagtgagcatcgccaatcacctaccattcgatatcggcgatgggccgcggcgttgcgttgacctcctcgctggtcaccttgccggagcggaagcgaatcactttgtgagccatcggtgcaagcgcggaattatgcgtgatgatcattacggtcatgccttgtgtttggcaaatatcctgcagcaactgcagcacttccttgccggtctcgtaatcgagcgcaccggtcggctcatcgcacaacaacagcttcggctttttggcaatcgcgcgggcgatggatacacgctgttgttcgccgccggacagttgcgcggggaagttgtccatcctctcccccagtccgactttgcgcagcgtttcctctggatcgaaatggtcagggcagatttgcgaggcgagctccacgttttcgagcgcggtaaggttaggcaccagattgtagaactggaagacgaagccgatatcgttgcgccggtaggtcaccagttcctttttccgcagacccgtaatatcgcgtccgccgaccactacgcggccggttgtggcggtatccatgccgcccagaatgttcaatgccgtggttttgccggcaccggactgccccagaatcacgcttaattcgccttgttcggcggtgaagctggcctcgtcgagcgcgcgaatcacactgctgccagaaggatattccttgaccacatggtcgaattcgatatacgccatcgcacacctccaacgcgctcgtggcagccacctagccccataggccccgccagaacttcctgctatactcaagtaaaacaacactgtgtcggttctgcaaccaacagttggattgtgggttgtcggaacttggggagaaggccatggccaaagaattgacggaaagccgccgcacccgctacacgagacgtgccatgcaggacgcgcttatcgagttgctgcgagatcagccgctcggctccatcaccgttaaagcgttgtgcgagcgggccgatgtgaatcgttccacgttttacgcgcattatgcgagcatcgaggaactgctgcacgacattgaagacgaaaccatggcctgggtcaccaccgcactcgaacagctactcgcccagccagatcctgccggcatcgagcatgttattgagcgcatctgccagtacattgccgacaatcgcaatcatctccaagtgctgatgagcccgaaagcggatatcggtttccagcagcagctgctgggattgatttacagccagcgcggtgtaggcgaacagttgcaatcttcggcgggttacccagccgaggcgcagatgcgtatgcgattcgccgtgtccggcagcattgggcttttgcaatattggctcgccaccgatctcgcggcctctcccgaatcggtgtcccacaccatcttcaccatgtgtatgcctgccacgcagtgagcacagtgaattcagtgaactcagtgaactcagtgaactcagtgaactcagtgaactcagtgaactcagtgaactcagtgaactcagtgaagcgtgcggtttcataagcatcgctcgctatagcttcgcctgctcaccggccgcgcccacgcccgcgcttgcaatagcgcacaaatagacgattgaccatttctgagacgatacggcggcatagaataacgaacgttgcgcatcacggcaagccccgcgtgcgccaaacccaagaaatgtgagagaagagcacaatgagtactactgatgcgcctaagaagccgcgcgaaaccgacgacgtgccggtgccggccacgctgcgcaagtcattgaaaaaccgccacatccagctgattgcgctgggcggcgccatcggaaccggcctgttctatggttccagtgaatccatcgcgctggccggaccctcgattctgctcgcctacttggttggcggcctcgcgattttcgcgattgtgcgtgcactgtctgaaatgtccgttgaggatccgaaggcgggcgcgttcagctactatgccacccgctactggtccaagcgcgccggctttatttccggctggaactactggttcaactacatcctcgtctcgatggtggagctatcagtggtgggttcgtttgtgaactactggttcccggcgattccgacatgggtgtcggcggccgtgttcttggtgatcatctgcgccgccaacctgctgggcgtctccaagttcggcgagttcgagttctggttcgccattatcaagattgtggccgtgatcgccatgattatcggcggcctggccgtcatcatctttgtcctgcccaccgcatccggcgtgcgcgcaagcttcgcgaactggttcaccgtgggtaacggcttcttcccgaacggcctgatggggcagaattccgacggttcctggaccggcctgctgatggcactggttgtggtgatgttcagcttcggcggcaccgagctcatcggcatcaccgccggcgaaaccgaggatccgaagaccacgattccgcgcgccaccaatgatattatttggcgaatcctcgtgttctacatcggcgctctgggtgtgatcatggccgtagtgccgtggaacaccatcgatggcaagtccagcccgttcgtgcagatcttcgattccgtgggcattcacgcggctgccggtattttgaacttcgtgtgcctgaccgctgtgatgagcgtctacaactccggcctgtacgccaactcccgcatgttgtactcgctggccaagcagggcaatgcgcccgcttacttgggcaagctcaactcgcgcggcgtgccagtggccggcgtgctgacgtccgccgcgatcaccgccatcgccgtggtcgtggtgttcgtgtggcctgagttcgcgttcaactacctgatgtcgattgccaccattgccggcatcatcaactggacgatgatcatgctcaccgaaatgaagttccgtaaggtggtcgccgcgggcggcgctcccgaggattccgagctggccggtctgagcggccaggaggcactggacgcgattcacttcaaactgccgtttgccaaggtgaccccgtgggtggtgctggcgttcctggcgctggtcgtggtgctgatgtgcttctccaccagctaccgcatcgccgtcatcgccggcgtgatctggctggccatcctcttcgccgcctaccagctcactcaggcgaagaagtaaggctccatttgcgaatagctctcactgatgagcactcagtgagagctattcgcaaatgggatttattcatgaaacagctcatcgatgccgacgagctgaacgtcggattgagacgccgcagcatcgtcgaccagtgattgatcgaaaccgccgagcgaaaacagcaggtatgttcgctggccgataccggttcgcgcagcacggtctcgcagtagattcagcacggaacggtccaccggcgcattgcggaatttgcactcgcccacaatggcagcatcagacgcattgtcaacggccatcacgtctatctcatcctgacgatcccaccaacggccaaccgcacgcgcacggaagggcaaccgtccagcagcactctcacgccacatccattcacggcacagaccctcgaacggtttgccggcaaaatcatgtaataccggcttgatatgacgctcgtatacgccttccacatcgccccgctccaattccgaacgatacggaaagacaaacgaataccagaatcggaagaaattgtcgctcagctgatacagcccacgcgaacctttcgcccgctccttaggcttcgccgtgactgggaactcacgttccacaatccccagttccataagattggcgagatacgacgatactgttgcgtttgccatcatcgtgtgtgtcgcgatctcattcagcgaagttgcgccgagcgcgatcgcccgtatcacgctgttatatttcgcagtttcccgcagttcttcgtgcaacaaaaattcaacctcgctgtatagcggagcaatgcgtctcagaatatgccgcttgacatttgcgtctatggtctcatctgggtcaaattcctctaggtaacgcgggataccgcccagtattgcgtaggccagcgccttatcctcgctactatagttggggaagaattgcgctgcatcccaatatggcatcggcagcatcttcaggatgccggtcgcacgaccatatagcggcgatttttctcccaacagctccttttcgatgaagctcatggcactgccgcaaatcacaatcatcagatttgcatgacgcaacgtgtggtcccaaagattctgtagcactgacggcaatgacggatcagatttgaccagataaggaaactcatcgaatatcacaagcctgcggccgccatcgctcggctctggcagccgggttaactcggttaacgccctttcccaagaaggatattgactcagataatccttgcccggggcacccgcctcgaacatgagacgggagaacgatgccagctgttcatctttagtggcattctgcgccgcgaagaataaggtttccttgtcttttgcgagttgaataagcgtctctgtttttcccacgcgcctgcggccgtagacgaacacaagctgtgccctacgctcagtgaaacattcctgcagttgcttgaggtcatcgtctcgtccgatgaatgccatgccgcccgcctcctttatgccatacgccggcgtatttctatcgcatcacgatttattgtatcacgattagtataatcgtgattatacaagctgtgacgaggtgcgggtacgggccaatcggcatcgacgggaccagccgcaggggccacaattacatcaccgtggtcgccgatctcgtggagcacgacgtgaccgacgtgacgccgggcgaggacccggccacggtcgaacggttctcgcgtgatttcatggaccacaacggggtcccggaatatgtgcgtctggtcgcctgcgacatgagcctgggcttccggaagggcatccgtgagcatctgccccatgcgcggcggatcgtcgacaggttccacgtggccaggcacgccaacgaggccgtcgacaaggccgggaagacggaaggccgctccaacccgctgctcaaacggaccaagtacctgtggctgtgcaacgaggaaagcctgaccgaactgcaggtggagaccaagcgcaacctgacgaggcaacggttgaagaccggccgcgcctgccggatgcgcgaggtcctgcaggacatccacacggacagccgcaccccgtccgaggcatgggtgcgcctgcatcgcctgtgctcgtggatgatgcactcgaggctcgagcccatgaaggacttcgcccgcatgatccgacgccacttcgccgagatcgtcgcctacttcgagcacccgtacaccaacgccgtgctcgagggcgccgacagcgtcatccagaacgtcaaacgacgggcgagaggcttccgcgacatggactacttcgccaccatgatctacctgacctgcggcagactcgacctcaaagccgtcaccaccacttgaccatcacccaccacaaacagcgaatagcctcaatttgttatctttaccgcgcttgcgtggacagagaacgctcagacctcgaagatcgccgcatattcgcgagagaacccgcctagtcaatgagatatggattgaaaacacgctcggtgacggggatatggagcatcagcatggtgccgtaaccaagaatcaccagcaggaacagtccaccgggcatgtagaaccagctggccaccagcagcgccacgaacacggcatccacgatgaccagggccacggtcatcgcgatgtgggagatgccgaagatgaaggcgttcttcaaggtgccggccacggtgttctcgaagcgtgcctgaagcgcgaacacccattcgaagccgataagccagaggatggtcagcgcgaatttgatgatgagcagcggcgtgatctgcaggacgatccatgaccagaccagtgcaatcagcaccaccaagaacggcagccacagcagtgtggctttgatgaagttggctttgaatgacttgaagtagttggcggttacgcctttgccctcgccctcgatggagcggcggcaagcatcatggccggcggtcagggccgcaccgatggtgatgagcggaatcgaagtgaccagcatcagaatgttgatccatacgccgtcaacaagattgctccacgcgcgcatgaatttcgagtccggtgccagccagttcatcaactactccttgtgtcgcctgtggctcccctctctgaggggagctgtcatcgcagatgactgaggggagacttgatggagctcaggatactcccctcagtcggcttccgccgacggctcccctcaaagaggggagccggattggtggagctcagcccttgaccgctccgccttcggccctgcaattacggactcgcctacgacgaggctcatcattagcttcgccgctgtcgcggctcagcctggagcctgctggaagcccactgggcttccagccatgggctgacgacgcgagtcgtcagcccttgacggctcccgccatgacaccagagactatatacttctggcataccaagtagaagacgatgatggggatgatggccagcaccaggcaggccatcatggcgcccatatccacggaaccgtagccgcccttgaggtattgcacggcgaccgagatggtcttgtacttgccgaggtcgagcgtcaggtacggcagcaggtaatcgttccagatccacatggcttcgaggatggccaccgagacgatcgacggcttcatgatcggcaccacgatctggaagaagatgcgcggcactgacgcgccgtcgatcatggcggactcctcaagctcctgcgggatgcccttgatcacgccggtgaagatgaacacggccagaccggccccgaaaccgaggtacacgatgcacaggccccacggggtattgagcttcagcatgtcggcgatcttggagagggtgaacatcaccatctggaacggcacgatcatgttgaacaggaacagggtgtagagtagcttcgcagcccagttgttcacgcgcacgatccaccatgcgcacatcgaggtgcacaccagaatcagcaccaccgagccgacggtgataagcagcgtccagccgaaggaggcgaagaactgcgtggtctcgatgccgcgcacatagttctcaagtcccacgaacgccttgccggcaggcagggagaacgcgttcttggagatgtacgccttctgcttgaaggagttgatcagcaccaggacgatcgggaaaatccagaacagggagacgacggcaaacagcacggtccataatgcgccatgcttcacaggcttgttctcgttcatcaggctgccacctccttgctcgtggtgagcttgttctgaatcagggcgatgaccgcgaccaggatgaagaacagcacggccttcgcctggccgacgccttcccagcccatacggccgtagaaggtgcgggtgatgttcagcgccagaccttcagacatgttgctcggcgcaccgttggtcaatgcgaggttctgatcgtagagcttgaaaccgttggtcacggtcaggaaggagcacacggtgatggacggcatcatcagcgggatgatgatgcggaacatggtctgccgtccgttggcgccgtccacggccgcggcctccagcacgtcggtgggcagggcctgcaggccggcgatgtagatgatcatcatgtagccgatctgctgccagcacaccaggatgaccaagccccagaacccgtaggacgccttataggtcagggcgcggccccagtgggccagtacgccgttcaggagcagcagccagatgtagcccaggatgatgccgccgataaggttcggcatgaagaataccgagcggaacagcgtggagcccttgatcgccttggtcagcatgtaggcgatggcgaaggcgatcacgttgatcacgatggtggtcacgatggtaaacgcggtggagaagccgagcgcgtgcaggaattccttgtctttcaacgctttgccatagttcttaagccccacccattcaccgtcggtaacggtggtgaattcgcaaaagcttaagtagacgcccatgatgaagggcaccaggaacccgatgatgaatgcggcgaatgtggggagcgcgaacagcgcccaccatctgcgtatcgccttgccagccatgctgatcatgacttttcctcctccttgagtccgctgcgttgcgacactgcatcgtgcgccggctgcggagttcaactcaatgcgagcctgccgatcgagaaccgcatgcacggcctgttctcgttcaagcctatgttcatagtaaacgtcgaatcattatatgtcaaacgttgtcattttcagcgtttcaatctcgagcatactccagctccagcaatcttctttcaactaagataatggctatataaagccaatctgacgccgtcatagacactttgcaaacgtttgtaatacaatcgttgtcatcgccgcaaatcaatcaatcagcatgtacactgtagtcagttgtgcatgtgtattgcgattttccattcaacgcaagggggctgcaatggctacgagcattcaggatgtcgcccgcgaggccggcgtctccatctccaccgtctcacgttccttcaccagaccggatctggtgtcggccaagacccgcgagcgcgtgctcgccatcgccgacaaactcaatttctcactctcccgctcggctgcggccctgaaatccggccgcgccctgcgcatcgcagtactgatgagcggccatatccgcctgtggttcaccgcctcggtcatcgaggggctcaacgaggtgctgcacacgcagggctacgatatttcggtattccagatttccagcatcgaggagcgcaaggaattcttcgagatgttgccggtacgccgtaacgccgatgccgtgattgtggcgtctttcgatatcgacaacaacgaaatcgcgcaactggcttcggtcggcgtgccgatcgtcggcatcaattcagtcgagcccgaagcccgcggctttaccgccgccgtcaatatcgacgacgtgcagggctccacgctggccgcccgccatcttatcaatctcggacatcgccgcatcacctatatcagcaccaatcgcgaggtgtcgctgagcttctccgtgcaaagccgattcgactcattcaccgcctgctgccgcagggaaggcatcgagccgcaggtcatcgtctgcaaggtcgatgacgatggacgttatgaaatcagcgacgtggtcgaccaactcatgagccaagacgagatgcccaccgccatcgcatgccaggaggatggcatcgctttgccgcttatgttccagctggagcgcaatggattctccgtgcccggcgacgtctcgctggtcggctacgacgatagtttctacaccggcgatatcggcctgaccaccatccgccaggatccggtggaaatggcccgcgtggcagcccgcatgacgctcgacctcattgacgagaagccgattgagcaaccctatatcgtgttcccggcccagctgaaggtccgctcctccacctcccgcgttaagtaggctcacacaacaaagcccaccatagaaaaagtgtgaggcaaccgcacaataacgctcaatcgcacattgtggagaatggcgaaaaatcgccgattcatggccccacagcgtacgattgagcgggtgcgtgcctcacacttttctgcggcggacgattttgtgcgagactcagcaatacaaagcggcgcccctggagaaggaaaggcaggggcgccgcggattgttacttatcggctatgggactctataagactcagtgcgaggcctcgtattcggaagcccaaccgtccacgaaggcggtcttgacggcatcccacttgccggtgccctgcgcgtactcgagcagcgcctggccgaccttgttcttccattcctcggacggcatcatggtgaagttccaagaaacctgggtcttgccggactcctggtcttccacggcggcctcggtcagcgggttgtcgcttttgacgtcatcgaaggtcttgaacggggtggtgaagcccatgtcctgagagagggccttcttgccggtatcagaggtgatcacccacttgaggaagtcctcggtggccttcttgtcggcgtcggaggccttgtcattgatgcaccagtagttctcggaaccggtggtcagaccctgcttctcctcgcccttgacgccgatgtagatcggcatcatgcctacctgatcggcggtcatgccggccttctgcaggtcggtccaggcccaggtaccgttctggtagaaggcggcctcgccgagcgcgaactcggagttcgcatcatctccggtcttggcgctcagctgggtgggttcggtggtggagtcggtgatgtacaggtcgaagatcttcttgtagttcggcaggtaggtgcccttgatcttggccggctgctcggtgacgttgtcgtccttgaactcgtagtaaagcggcagattggccaggtgggtcttgaaacgccagtcggagctggagtcgaagccggcggaggtgaacgcgcccttgatgccgagctcgtccttgcgggcctgcatgtcgtcggccacggccttcagggtgtcgaagttgtcgatttcgtccatggacgtggccttggcgccatccagcgcgaagtacttgttgaggatgtccttgttgtagatcaggccgtaggtttccatcacatacggcacgccgaccaccttgtcgccatccttcagggccacatcttggttggtgagctccttgtacacatccgtattggacatatcggcggtgtacttcttccagttctggtagccgaccgggccgttgacctggaacaaggtcggggcttcggttttggcgatttcggacttcagggtctgctcgtaggtaccggaggccgcggtctgcaccttgacctcaacgcccttttccttggtgtattccttggccagagcagtccactgatcagccgcttccggcttgaagttcaggtagtagaccttgcccttggcgtcatcgccggaggtcgagcttccgcaggccgccaaagcgccgagggacatcgcagcgacagccgccatcgcgactgctgacttgactgtacgattcatcatcgaacctttctctttcatcgtcgacccggccgtccccggtcgggacaggtacgctagcacgcacctttacgactatcgacatgcactattgtgcaacggtttgcttctttttgcaaacgatagcaatatcggcgcgtcataaatcatcattttcaggccattgtcaacaaatatcccattaattcagtcatttttgcctcattatcgcaatgcaagcgttcgcaatcatgagagcgctaacatatctttcatggcaatcgattgccacttatacccatcaaaaaaacaacacgccgacgctatcgtttgcaaatcatttatcgacataccgcaattcccgccacaaacaataaaggcccgcccgcagtagcgggcaggccagcgcaatcgcagcgcaaccggggctaggcgttccaccgttcgatgacgttatctcccttatagacgctgagcaccgagtagtgcgccgtatccaaacgcagcaaccgtgcgaaatgcgggtccacgcccagccattgcgaggtgaggatgcgcaggatgtgcgcatgagccaccaacagcacattatggccgtctttcagcagcggcgtaatctcgtcgatggcgctcttggcgcgtgccgccgcttcttccagcgtctcgccaggcccggcatggaccggcacctgttcgcccgaaggcaaggtctcgacccagtcgccctccagcgtgggcgtcagcgagcgcggcccgtcacgccacacatcccattcaaaaccgctggcctcactcacctgctggcgcgtacgcccctcggctcggccgtaatcccattcagcgatgccgtccaacacaccgtggtccgcaaaaccagccaattcagcggtttggcacgcccgcttcagcggactggaaaacacacagctctggctgaatccttcggggaaggcctcgcgcaggcgccttccggcatccgctgcctgctgctcgccgaccgcggtcaacgggatgtccgtgcgcccggtatgctgcccggattcgctccacacggtctggccgtggcgcagcaacaccaaaaatccattgccgccacgagagttctcgacggcaacggtgccgttcacgttctgttcgctcatgcctccactctagtctgcgctcgttcatgactccaccattaacgcccatcttttgcgctgagatgattgagatgctattagactgagagtcatgagcgacgaaacgaacaccgacttcccctccagcgccgaccgcgcggtcgacagcctgcaccgcatcgacgagaaggtcaacaggctgcgcgaggaccggctcaacgaccctgattctctgggcgacaagctcatcaagtcggcagtcccagcgctggcaggcttggttgccggcaaagcattccagatgatatgggacaagggcacaagcaaacgcaatctgcgcaagggactggcggcagacgcgccgcaaagtctggcaatgagtctggcattcgccgccgtttcggccgcactcggcgcagtggtttcgcagctgtcggatcggggctccaaggcgttcgtcgaccaccgccatcgcaagcccagccgctaatcccccggttggatgatggtttctgttggctgactgatgactcatcgctggaatttcgtcaaggaaccatcagtcaatcgacaggaaccatcagtccagcacagttccgccacacaatatcggcatttcactgtgaggtaatccaccgtggcgtccggcgtctgccgtgcgacaataaagccatggttaccaacgcaacaatcgaggctcttctgggccgccgctccatccgtaagttcaaggacgaggccatcgacgacgatacccgcgccacgctcgaaaccgtcgcccaacatgccgcgtccagccagttccttaacgactggtccgccatccgtatcaccgacccggccaccaaagccaagctcgccgaattcggccatcagccgtatatcgccaccgcgccgttgctgtacgtgttcgtcatcgacgagcaccgcaacgcacgcatcgccgaacgcaagggtatcgttcccgcttccgacgaattccatctcaagtacagctatcgcttcgcccaagctcagaacgacgccgtgctggccctgcacgccatggagaccgccgcctattcgctgggactgggctgagtgattctcggctctctgctcaacaacatccccggccttatcgacgtgctgaatctgccggaatacacgtatccggtgctgggtctggccatcggcaagcccgatcagaacccgaccgtcaagccgcgcatgccgcgcacgatgcagttcttcgagaacacctacccggctgacgccgatggcgtactcgaccagctgcccgccttcgacgaggaagttcaccggtactacgatctgcgccaagccgaccgtccggtggacgctttcagcgatcaggtcgccacgatcagtcggcaggatgtcagccatcagacactgctcgacaaggccgccgctcagggcttccgtctggatcagtgagaccagaaccaacgagatagcctcggataggctcgtcactgagtcgtctcggtctcagcactgcgacgactcagttccaacacctcaacatttcatcaccggataccggcaaaattgcacagccatcccgccggtgtcgcaccatcaacaaacgttcacatatcagtcccattatgcggacaaccaacggccagttttgcaagaaaacccgccaaaccagcagtatccgcaccagtggtgggaatagactgcatgtggccgcaatgactacgaaccggaaaagagggactggatgcggacggtttggcaagtctttctacgcgattgcagacgtatcttacgcaatcccgttgccgttgtggtgacgctcggcgtagcaatgctgccctcgctgtacgcatggttcaacattctcgccaactgggatccctattcagccaccggcaatctgcaagtggccgtagccaatgaagaccaaggcatcaccaacgatctggtcggccatctcgatgcgggccggcaggtcgtcaagaaactcaagcagaatgacgaactcggctggcgcttcgtagacaatgaggaacaggccgtccacggcgtggagaccggcggatactatgcagccatcgtgctgcccaaggatttcagcgccagcttggtcgaatcggtgaccggaacctccaaacagccgaaaatcaaatattacgtcaacgagaagaagaacgcgatcgcgccgaaaatcaccgacaccggcgccaccaccatcgatgagcagatcaactccgccttcgtcaccacggtagccaccaccgttgcctcggccatttccgaaaccggagacgatctcggccaagccactggcaaagtccagcacgatacgatcgatgatctcaatacggtgatgtccacgctgaacaccgttcaggattcactcaccgacttacaggacacgctggcccaatcagacacgattctcgccgacgccaaacagaccaccgcctcactcaagcagaccgtcgcggccgcgcagaatgcctcccgccagtccggcacactgttggcggaaacacaggccgggtcacaagccttctccaccacactggtcggcgcgctcgacagcagttcagcacaactctccggactggccgtccacgtcaacaacgccgccggcagcatcaccggctccttcaacagcgcgcagaactccgtcgacaccatcaccaacacactttcggccccactgaacgccacccaaacgtcaatcagcgatctgaaagacgcgctgaccaaagccggcatcggcaaagacaccaccgacccggtcggccagaacatctggaaacaaatcgatgcgctcgactcattgatcagcaaacagcagacacagctcaacaccttccataccgacaccacacagttcatcaactccggcaaagacgccaccacgaacctttccggagccatgaccaacaccaccaccggcggcatcgcggcgctgaataccgcgcgcggctcgctgaccggcaccgtaatgccgtcgctcacctcatcattgaacagtttcgccgccctgaacggcacgctggatggcacgttgacttcgttgtccggcaccttggatcaggccgacgggctgttcgaccagcttgtcgataccctgaaccaaacgaaaaccaccatcagcagcacgcaggattcgctgcgccaggcggccagcgatgtcgccaccgtacgcaccgatatcgccacgctcgatagttccgccgcttaccagaaaatccgggatacgctgcatctggatgacaagggattcggcgaattcatgggcaatcccgtcaccctgaccacgaaagtcgtgtacgccaccgacaattacgggtccgcagtcaccccgttctacacgaatctggcactgtgggtaggcggtttcgtgctgattgccatctacaagcttgaggtcgaccgcaaaggcattcgtcgtatcaccgctacgcaagcatatcttggccgctggctgctgctggtcaccatcggattcctgcaagccatcatcgccaccattggcgatctggtgctcggcatccaatgcgagcatccgctgctgttcatcttggccggaatcttctgttcgttcgtctacatcaacattatttacgcgctggccgtggcgttccgccatatcggcaaagccatcgccgtaattctggtcattgtgcagatacccggtgcctccggcctgtatccgattgaaatgatgccgaacttcttccgcgaactgcacccatggctgccctttacctacggcatcaacgcgatgcgcggcccgatcgccggcctgtacgcgaaccattactggctcgacatgctgcacctgttctggtatctgccggcggcgcttttcgtgggacttgtcgtacgccggtatgcgatgaacctgaacgcgctgttcgaccatcgtttgggagataccgacctgatgatcaccgagcacaacagcatggtgaacgaacaggtgagcttgaactccgtattccgcacggtgtccgacagcaaggaactgcgcgatatcatcgctcatcgcgcgcaccggttcttcgcgcggtacccaaagatgatcgttgccggtctgacattgctgaccgtactcccgttcgtattcctggtactgctgttcgtcacccaagagaaaatcgccatgctgacctcctggattctgtcgattattcttatcgacgcctatctcattgtggttgaatacgcacgcgaaacctacgccatgcagcttggcgtcagtgccatgagtgccgacgagttccgcaatgtgatgctcaacggatatgtgtggcggcgtttccacggccacggacgtcacgaagcggcggtgggcagcaatccggatatcggcgaaaccactgaacgactcacactgttcggcgatcaggccgccgagccgactgcgcacaccgcacagttcgagcagtccgggcagtccggtcagtctgggcaaggaggcgcacgatgaagcttatctggaaaatattcgtacgtgacgtgcgccaagccacccgcaatgtgatcgccgtaatcgtggctatgggattggtgattgtgccggcactgtacgcctggtacaacatcgccgccagctgggacccgtacggcaacaccaaggccttgaaggtcgccgtggcaaacgtggataagggctataagtccgatctgatgccgatcaccatcaacgtcggcgaaaccgtgaccaatacgctcagggccaatcatgaccttgactggcagtttgtggatcgtgctaaggccatcgatggcgtgaactcaggcgaatactatgccgcgctgattattccaaagagcttcagctccgatatgatgacgctgttttcaccgaagatcaagcacgccaagctcgaatactatctcaatgagaaaatcaatccgatcgctccgcatatcaccgaccagggtgctaccaccgtggccacgaccatcgaccagacatttgtgaagaccttggcgagcgtggcgctggatttggtttccaacgtggccgattacgcgcaaagcccgcaaatggagcagtacgtcaacaacgcctccagtcatattgccaccatgtcgtctcgtttgaccggcactgcgtcgcagatggattcctatgccaatctgctcggggccgccaacagcatcattgattccaccgataagctgctgggatcaacaggctcagctgcggccacaaccaaaaaggcgttgaaacagacccgcaacggcgtctccagcctcgacaaggcattgtccggagccaccgatggcgtcggtacggcattgcagcaggccggttcatcctacgacaccattgccaagcagatcgatgccgcttttgccgatgtgggctcacaatcctcgcagatatcaaacaagctgaccgatatgcaatccaaagtggaggctcaggccgacagctttggaaagtatgccgccgctttacgagatctcgccaaacaagcggcttcactgcccgtgggcggagataccgttgccgctcaactgaacgcggctgcagaccaagccacaaaggcgcagcagagcatgcagcaagccgccaccgcgttgggcgatgcggccacgcacatagcaaatggtactgccgatgccgatacagcgcgtcgagatctgaaatcacaaatcgccgccgccaaacaatcgattactcaggcttcagacacgtacaagagcacgctgaaaccgcaactgaacaatctgacctcgtccatggacgaagtggccacgcaggcaagttccgtaatcgacgggcttgcgtcgaccgtcagcagcgtgtcaggtctttctggcggcgtttcagacagcctgacggatatccagtcggccttgactgacgcagctagcgctttgacccgttcggcgaagaaactcgacaacttgtcttcccaactcgcctctatcaccagtggcggcaccaacgacctgtctgtgatttcctctgcgaagcccgatgccattgcttccatgctggcggcacccgtagcggtcgaccgcatcgcgctctatcccgttgccaactatggttccgcgatggctccgttctacacgattctgtctatctgggtcggtgcgatcattctggtcgccatgttgaaagtatcgatttccgaccatgagaaggcccgtatcttagggttgggcaatgatctgccgctcggttcgggagtgggtcttcgcgaggccatgattgccgggcggattgccggaccggccgccgcgttggatgtgctgaagaagccgcgtgccgagtcttccggcaatgcgcggcagttcggtttacgcttgcaccacgaatatttcggccgatacatgattttcggtttccttgctttgctgcaaggtacgctggtgtgcctgggcgatatgttctatctcggcgtgcagtgtgagcatccgattcagtttttgatggtcgggtggttgtctgcactggtgttctcgaatattgtgtatacgctggccctatcgttcggtgatatcggcaaagccattgccgtagtactgctggttatgcaggtagccggttccggcggcacattccccattgaaacactgccgacgttcttccaggtcgtttctaaatggctactgttcccctatgcggtggatgcgatgcattcggccatggcgggctcattcggcatggaatactgggtttccatgggcaaactggcactgttccttgttccctcattgctgttgggacttatgttgcgcaagccggtaattcgcttcaacgattgggttatccgcaaccttgaaagcaccaaggtgatgtgagtgttggacggagtgtgtccgagcgccctgaacgcttagcagcctacgacctggcgtgtttggaccgtaacctgcctcagatacggcgttggcgaggcctgtggagcttctgacgctaacgtctacgtggcttgtagccctttttacgactgtgtggcttgagttgctggttcagcggtacatgccggtaactggattgtggatcgcgatgtgtgaggtgccagcatccgcaatattcgcaacggtacacccatagctcggctccacgctcgatcaggctttgatcagcggcacgctgagcctgcgccttatcgtggtacatgattttattcgacgtggcgcaacgtttaggggtgaagtaatgcatagcagaagccagtgtagagcgaccccataaccaagccagtttctggctcccctctggaggggagctgtctgcgcggcggaccgggggccgggcgtcgggctcccacggtcgcggacgcgccgcgccgttcggcctcgccgtcggggctggccgggaatggtcccgggcgtgggtctcatgggtatgcggggaggtcccggtgcccgtgcgggttcgggccggggccggtttcggatatagggaaagccccttggggcgtgtgctccgaggggcttcctgtacgtgtggtgcggcggcgtgctactctcccacaccctgtcgggtgcagtaccatcgccgtgccaggccttagcttccgggttcggaatggga

SEQ ID NO: 3687 - DNA, 26730 bp, Unknown
  R150_10m  MAG No. k141_1771
attcgccacattcctcttgatggagatcagcgaaccagtttccacatagtcataccggccatccgcaaccagatatttgatgagctccctcgccgccggataccgctgcacctcgtcgaaaataatcaacgattcacgctcatacagtcttgtgcggtaatacgcagacaacagcatgaaaaatgtgtcaaagtcatcacgctggttttcgaagatgtcgcgaacgtcgcgcggcaaacgtgtgaaatcgatgagaatatatgacttgtactgagtgcggccgaattcctcgacaatggtgcttttgcccacacggcgagcgccttcgatgagaagagcctcacgcccacccgctttttgtttccatgcgatcagcttatccagcatcttgcgcttcaacatgagcaatcacctcattacacgaaaacaacagtataggcatatgctattctacacgaaaacagaggtatagaggtagccgattctacacgaaaacaacggtataaggacgcaagccgaaccggctcacccccaatcccccccccatcacaccggcggcctgtttgattgtgcgattttgtgcgaatggctcacacggttcttggtgagaaccgttcgctgcgtacctgaccctagaaccggatcagcgccttgatgaccttgcgttggtccatcgcctcgtaggcgtcttggatatggtcgaggtcgtactcggcggtgaacacgcggccggggttgatctcgcccttgagcaccgcgtccagcagaccctcatcaaggtcatagtggcgcacgggagccgggccgcccttgatgccgatgttgccgtagaacgtgccttctgcgctgatctccacgtcgtgcggcaggcccacacgaccaatcacgccaccgcggcgaatcaggccaatcgccgtgtcgaaggactgcttggagcccacgcattcgagaactgcgtccgcaccatagccaccggtcatctccagcaccttgtcaatagcctcttggccacgctcgggcacgatatcagtcgcaccgaattcgcgggcgagcgccgcgcgatcctcgtgacggctcatggcaataacgcgcgtggcaccgcgcatcttggcggcaatcacaccgcacaggccaactgcgccatcgcccatgaccacggcggcgtcaccgggcttgacctcggcagaaaccgccgcgtgataaccggtggacatcacatcggaaacggtcagcagcgaagcgagcgtcgcgtcatcgtagtcttccggcgaaccgggcaccttgaccacggtgccgtccgcctccggtacgcgcaggtattcggcctgacaggcggagaagtagccgccgtgagggcatacggattcgaagccggccttgcataccgggcacttgccgcagctgtacgggaatggcacgaccacgaaatcgccgggcttgacggattcgaccgccgcgccaacctcttcgaccacaccgatggactcgtgacccacctggctgtgcgcggcctgtccgctcagcccacggaagaaccacaaatcagagccacacacgcacgtgcgcaccacgcggatcacgatgtcatcatcctgttcaagcgtcgccttcggcacttcttccacggccatcttgccaggctccacgaaaatcgcagctttcatggtttcagacatacgttcataactccttgttttccggcatcgagcgcttaaggcccgttatcctcgtgttctattaaacaataatcgccttgcattaaccaatagccataaaccatgtttcgccatacccatgaggtatggcaacaaccgagcaattcactgcgataggccaatatccgagatacgctcactgttcgattcgtcgccatgagtaatctggagaaccggcgatgggacccgcctgaacttgtttcgaaccgcacactgctgatagttcctacacacgatttgacattgcatggaatcgttgtgtcttcagtaggattcagcggtttcaggaaaggctattatgggctcgcaatccccatccgcagatgcccggccgggcacgcgcacggccactcctccggcgcacaaactccccgatatccatcttgatattgtgttggtcgtcttctgcggcggtgccatcggcaccgcgattcgctatgcgttcgcgcagattcccgcagccggcagcttccataccggcacgtttgtggccaacatgctggcctgcttctgctatgcgggtctgaccgcctatttggccggctcttcccggttcgacacgcgtgccaaggagctcaccagccgtgggctcggcatgggcgtatgcggcggtttgtctacgatgtcgacgttggcattggaaggcttcaccgcgattcgcgacggtcaggtggcggccggcattgcctatctactggtgacgttcgcgctgggtctggtttgtgcgtctgccggcgtgtgggcaggaacgcatctggccggctcctcgaacgcatccgccgaagcgtccgctgatacgaatgccgctacgaccagcaagggaggtaaggcgtgatgaccgtattcctaccaatcttggtctgcctgtgcggcggcgtaggcgcctcctgccgctatctgcttgacgcgaccatcaaaacgtattggcaacgcgcattcccgctgtccacattcaccatcaatctcatcgccggattcctgaccggtctggttgcggcgctggcactgggcgggacacttgatgaaccgtggcggctggtgctggccaccggtttcctcggcggattctccacgttctcgaccgcgatcaacgaaatggtgacgctcttccacaaacgccgctaccccacggcaacggcctatctggtgctgtcgctgggtgtgccggtcgttgctgcggcctgcggttttctcgtctgaccgccacgacgattcccgacgcggtcagcggtatcatcgcgaggtcgaacgtcacaggtacatccgggaggtatatgggcatggcgaacaatggagcggatgtgaagcacaatcagggcgcggacgtcacgaacgcctcggccacgacgaacactgcggaaaataccgtgggcacggcaaccccgaagcaaaatggactcgccgtgttgggcaagtatatgggtgtttccgccacgcagaccattgtggagtatgcgacgttcgccatcctgcacttgatcggcgtgccctcgcagatctccaacggtatcgccgtggtgtgttcggcgacctacaacttcgtgatgaaccgcaacgtgacgttcaaatcgtcaagcaacttcacccgttccgtgatgcttttcgtgctgctgtggatctggaacttcacgttcagcacactgctgatcggctggatgccgggcgcgacggacctgagcccgtatgtggtgaagttcattgcgatggcctgccagttcggctggggttatccgttgtgcaagtacgtgatttttaggtgacacattccaattgctcactgtcgttcgccttcgcctatttgtatttggagcgcttatcagaagaacagcatcgcaacacctgcggcgaagcacatgagcagaatcgatgtcaggaagctggcgagcatcggcttcttgcccttggaagcgatggccttgaagttcacgttgatgccgagcgcggccatggccatgccgagcacgatgtacgcaaagtccacgagctgcggggtgatggaggcgatgagcggcacgaaggtgccgatgatcgaagcgccgatgaagccgagcatgaaccacgggaaggccacagtcttcttgccggtgttctccacctcggagtgcttcttctcccaccagatagcgatgatgatggccgcgaacacgagcatgagcacgcgggaaagcttcatgatggtggcgatgtccaccgcgccgaaagcgtcgccggcggcgaccgcgtgggcgatttcgtgcagggaagcaccggcggtgatgcccagctggtccttggtcatgccggccagcgggccgagcgcgatctccagcaacgcgaacacagtacccataatggctacgatggccacggccatggtcacgtcgttgtccttctcgtcctgcttgtcctcaggcaccttgatggaaccggctaggcccatgacggcggccgcaccgcagatgccggtgccaccggcggtcaggatggcgagcatcgggtcgacaccgagcttgcgggcgatggcatagcacacgatgatggtcagcgtgacgaccacagctgcgatcggcagacacttgatgccctgcgtgaacagcacggcgaggttgagcttgaaaccgagcaggatgatgccgaggcgcagcagcttgttggaaatcaggccagcggcgtccttgacgcctgccttgcggccatcattggaaccgacgtaggcactgcggatcgggaactggatgatcataccgatgagcagcgcgatgataagcgcgccgaacaggctgaatccggggaactgcttgagccaggaggcgaacagcgaggccagcagagtcagaacgccaatgaacaacatgtcaacggtggtaatgcgcttccaccattttgtacagaactctctcacggtgtctattgaagctcaagcatttacatcggtcaaatcattgcaaccaatacatatcatcgattttgtcgatacctaattgatctccctctggtgagggaggtggccgccgcaggcggacggagagagagaaacaacgttcgcgacctcccctcagtcgactatctgactacccgcgcagcgcagcaataatcatctccgccaactcccgctgatcgtgcgtcagaccggatctcggcaccagcgcatagaaccgccgcacaaactcatcgccaagctcccgctgcaccggcacgcccgccggcacggcggcttccgaaatcaacgactgcccgaacccggcggacagcgccgccacaatcgccgcattactggacacttccatcgtgcgtgcaggcacaacctgagcggtcttgaaatacaaatccgtgtaataccgcacgccggaaccgtgctcgcgcaccatccacacgccgtcgggctcccccgccaacaccagccggtcctcgcacagggtgacgcggtccaccgaatcgttcacgatcggcttttccaccacgccgagctgcacggccttcatgctgacccgttcgagaatcgcatccgagttcatcacgtgtacggcgaagtcgaaactgtccatgttccgagccatcaccggcaacgccttcggcagcagaatcgccgcggtcgtgtgcgagaacgaaacggccagcggctcacgcgcctcctgcacgcgggcgatctgctcacgcgtatcccgccataatccgtcgatgccgatggcggtctggtacagcatccgcccggcctgtgtgggcgtcacgtcgcttttcgcattgcgcacgaacagcggcgcgccgaccatctgctccaattgggcgatacgcgacgacaccgtcgactgcgacaccttcagttcgtcggcagccagcgtgaactggcccacctcgtatacggcgaccagggtttcgagcagagggaacatggtttaactgtacgctgtatgatgcacgaatatttcaattagcttgggcgtagccctaggccacggacctggaccaccctcagtctcgctttgcgagccagctcccgccagcgggaccccaatggttttcatatcactatgcttcgcgcagttctgcgagctgtgttttggccttgtggagcttggcatagatttcattgcgctgaacaggattcttgacgcgctgatggtcgcgggtgagcttgtccacttcggattcgagccgagcaatttcagtatggcgaatgatgcgcgcatccagattttcgatctccggcgtgcccagaatggtctgtgagcacagcgaggcccacagctcatcaatagtagagccggccagctccagctgggcctcccccgccggctgccaatcgccggcatatacccgatagatcggcgtgtggccggcacgccccggtatcgcccgacgcacggcgaacgcacattcctcacgtgtgctgccctcgaacggcacgtcgcgtacgcacacgaacacgatgcccgatttacgctgcccggcaatcaaatcgatgacctcgttcggtatgccagtggctttggccgtaagcttcagtccgatgaccagcacttccggaaccagtttgccgtccgcaagcccagtgttaatcgaccggaccaacgccagcatggtaatggattcgatttcgttcaccaatcgctgcttgagtttgcctgaaatcggtgccttgcccacgaacaaggctttcggcagtgtgcctttggcttcgggaatcgccgtggagacgggcagtcccagtgaaagcgcggatacggaaccacagtgtgcggcttgcgaaccagtcatcatcgaccttctttcccggcctgccatcagtgtcataccctcgcagtgcagcagtccgtttatctattggaaagcaacactagcgcatccaggccggaagtcgtggtacatatccatatcctgctgcggttataggaaatcccctccgagtttcctcgaaggggatttcttaagtcgctagttcaagcgaagattcttgtctgatgaaaatcaggcgaggatcttggtcacacgaccggagccaacggtgtggccgccttcacgcacagcgaaggtcaggccctcctccatggcgatgggctgaatcagctcaacggtgaaggtggcgtggtcgcccggctgaaccatctcgacgccttccggcagctcgatgacgccggtgacgtcggtggtgcggaagtagaactgcggacggtagttggagaagaacggcgagtgacggccgccttcgtccttggtcagcacgtagacttcgccctcgaacttggtgtgcggggtgacggagcccggcttggccacgacctggccacgctcgacatcctcacggccgaggccacgcagcagcagaccggtgttgtcgccagcctcgcaggcgtccatggtcttgtggaacgtctcgatggaggtaacggtggtggtctgggtcgggcggatgccgacgatctcgaccggggtgttgacggccagctggccacgctcgacacgaccggtgacgacggtaccacggccggagatggtgaagacgtcctcgatcggcatcaggaacggcttgtccaggtcgtgaaccggggtcgggatgtagtcatcgacggcggccatgaggtccttgacggactggacccacttctcgtggtccggagcgtcatcgtgcagggcgccgtaggcggaggtgtggatgaccgggcagtcgcggtcgaaaccgttctcgtcgaggaggtcgcggacctcttcttcgacgagctcgatgagctcttcatcgtcgaccatgtcgcacttgttgagggcgacgaggatcttcgggacgccgacctgacgggcgagcagcacgtgctcgcgggtctgggccatcgggccgtcggtggcggccacaacgaggatggcgccatccatctgggcggcaccggtgatcatgttcttcacgaagtcggcgtggcccgggcagtcgacgtgagcgtagtgacgcttctcggtctggtactcgatgtgggcgatgttgatggtgataccgcgggcggcctcttccggagcagaatcgatctggttgaagtcgtactccgggttgacatccgggaactcctcgtgcagcaccttggagatggcggcagtcagggtagtcttaccgtggtcgacgtggccgatggtaccgatgttaacgtgcggcttagtacgctcgtacttttcctttgccattacttttgtcctcctggacgtctcgtgagtttcctgcgccctttcgcacagggactcgcttattctactgggtttctgggttatgtgccactttgaagagccagaacccagtcagcggtatacgatactaccgctgactggagacaccggccacttcatgatgtggcgcgtgtcactcgccgcgctgggccttgatgatctcctcggagacgctcttcggcacctcgtcgtaggagtccatctccatggtgaacatggcgcggccctgggtcttggaacgcaggtcgccgatgtagccgaacatctcggacagcgggaccttggcgtcgatgaccttgacgccgacgccgtcggtcatggactggatgttgccacggcgctggttcagatcgccgatgacttcgcccatgtactcttccggcgtacggacttcgaccttcatgatcggttcgagaatgaccggcttggccttcggggcagcttccttgaagcacatggaacctgcgagcttgaaggccatttcggaggaatcgaccgggtgcatctggccgtcggtgacggtggccttgacgcccacgaccgggaagccggcgagaacaccggactccatggcctccttgacaccggcctcgatggggccgatgaattcggcggagatgtggccgccggtgaccttgttctcgaactcgaaggtcttgccctcggtggtgtcgagcggctcgaagttcatcaggacctttgcgaactggccggaaccaccggtctgcttcttgtgggtgtagccctggtccatgacggccttgcggatggtctcgcggtaggcgacctgcggcttgccctggttgcactcaaccttgaactcgcggcgcatacggtcgacgatgatgtcgagctggagctcgcccatgccggcgatcagggtctggccggactcttcgtcggtcgtgacctggaaggtcggatcctcttcggccagcttggacagggcgatgcccatcttctcctggtcggccttggtcttcggctcgacggccacctggatcacaggatccgggaaggtcatggagtcgagggtgatcgggtcgttgatggagcacagggtgtcgccggtggtgacgttcttcaggcccacgaaggtgtagatgttgccggcgtcggcgcggtccatcgggttttccttatcggcgtgcatctggaagatcttgccgatgcgttccttcttctcgcgggtggagtcgagcacggagtcgcccggcacaacagagccggagtagacgcgcacgaacacgagcttgccgtagaacgggtgggtggagatcttgaagaccagagccgagaacggatcggtcttgaccgggtgacggtcgatctcaacggactcgtcgccgggcttgtagcccttgatggccggcacgtcctcgggggacggcaggtagtcgacgacaccgtccagcatcggctgaacgcccttgtccttgaaggcggaaccacagaagaccgggaaggcttccttggcgatggtgagcttgcgcacgccggcgcggatgtcttccttggacaggtcgccgtcctcgaagaacttgttcatgagttcgtcgtcggcttcggcggcggcttccacgagcttctcgtggtactcctgggccttgtccttgagatcgtccgggatctcggtggtgtcgtacttggcgccgagctcctcggtgccgttccacacgtaggcctgcatctcgaccaggtcgacgacgccggtgaagtcgttctcggcgccgatcggcagctgcatcacgatcggagcggcgcccagcttctccttgatggtgtcgacggagtagtagaagttcgcgcccagcttgtccatcttgttgatgaagcagatacgcggaacgccgtacttatcggcctgacgccacacggtctcggactgcggctccacgccttccttgccgtcgaacacggcaacggcaccatcgagcacacgcagggagcgctcgacctcggccgtgaagtccacgtggccgggggtgtcgatgatgttgatctggaacttgtccttggtgtcgtgggactgacggctccagaagcaggtggtagcagcggactggatggtgataccacgttcctgctcctgcgccatgaagtccatggtggaggcgccgtcgtgggtctcgccgatcttgtagttcttaccggtgtagaacagaatacgctcggtagtggtggtcttgccggcatcgatgtgggccatgatgccgatattgcggacgtcgtggaggtccgaaatctcttcagccatctttttcgttagttttactcagggcgtgtgattaccagcggtaatgagcgatggcgttgttagcctccgccatcttatgagtatcctcgcggcgcttgacagaagcaccgaggccgttggaggcatccaggatctcgttggcgagacgctcggccatggtcttctcacgacgggcgcgggagaaatcggtcagccagcgcagcgacagggtgttggcgcggttcggcttgacctcgaccggcacctggtaggtggcgccaccgacacggcgggagcgaacctcgagggacggacggatgttgtccagggcgcgcttgagcacagccaccggttcctggtcggacttctccttgaccatatcgagcgcggagtagacgatgtcttcggcgatcgacttcttgccgtcaagcagaatcttgttgatgagctgcgccaccacggtggaaccgtagatcggatcgggcagcacgacgtgcttcttggaaggtcccttacgtgacatatctcttacttcgccttctttgctccatacagggaacgaccctgcttacggtccttgacaccctgggtatcgagcgcgccacgcacgatgtggtaacgcacacccgggagatccttcacacggccgccgcgcacgagcacgatggagtgctcctgcaggttgtggccctcgcccggaatgtaggcggtgacttcgatgcccgaggacaggcgcacacgagcgaccttacgcagagccgagttcggcttcttcggggtggtggtgtagacacgggtgcacacgccgcgacgcagcgggctgcccttcagggccaaagtcttggacttcttcggctttgcctgacgtcccttacggacgagctgttcaatagtaggcaacttgaattctccgattcagtggtttctcttgcttttgtgtgaccgccgcactgcgcccacacttttcagcacactcgcttggcatccgcctgttggcgacacccgacgaatcggaaaagatagcccagtccaccggcccgatggccttcgcccctcccgtcggcgcattactacgtgcgatcagcggtttgaaggatatcccagcatgctcgcctgttacataaggcgtgctgctggcacacacgaatatctatactacgattccgccggacaacgacgcgccgggcctcgactcactagcttgggacaatccgcgccctgtacttttcctctccttctggcgcaacaatcccgggaatgcgtcgcacaacacacgcacacacgccctcccaacgcaatattcccgggagtgcgtcgcgaaaaaacaaacgccacacagcaggtgcccccgcggagactatgtcacacgggggcaccgccaaggaggttacattatgtttcttttcaccacatgccgcttctgtgttatctgtttccagcacatcctcgtgctcttccatatccgatgggaacctctagcgacccggcctctttgccgtatcaccttgccgctttctgcattactaattatagcaaaaccgccctcgcgaaacgcccgatacatcaatcgggagtaagcgggagcggctatgttatgcgaggtaggaaaggtgagtgaccgactgactggagtcgtgccttacccgacctttctcaccatctcaggatttcaggcagcgaccttggcggccttgtcggcgtcgaacgggtgggccacggaaacggtgctcttggcggagcccttctcgccgttgtcagaatcccaatgaatctcgtgccggtcgtcatggttgcgccaccagctggacaggatggagccggagatgttgtgccacacggagaagaacgtggacggcacggcggcgagcgggttggacgcgaaggaggtcagggccagcgtggcgcccagggcggagtcctgcatgccgacctcgaacgtgatggccttctgctgcgcgtagcggaagcccttcgggtagatcctgtacatcagcttcgagaagccgaagcccagcgagtagccgcacagattatgcaggatgaccaccgggatggccatcagggagctggccacgaacagcttcggaccgttggcggcgacgaccacgccgatgatgagcaggatggccacctgggagacgatcggcagggccaccgtgaccttctcgatcttcttgccgaagaccatgtggcagatcacgccgagggcgatcgggaaaagcaccaccttgacggcattgaggaacagggattcgaccggcacgctcacatactgggaggccagcagctgcatcagcagcggaatcatgaacggggcgcacagggtggagaggatgccgatggagacatcgagggccacgtcgccacgggacaggtagctcatcacgttggaggaggtgccggacgggcagcagccgacgagaatcacgcccacggccagcgggccggacaggtggaagatcgcgcacagggccacggcgacgagcggcatgctgacgaagtgggccaccgtgccgacgatgaccatcatcggctgggtgaggatgcgcttgaaatcgtccagcgtcagggtcagccccatgccgaacagcacgatgcccagcatgtagccggtgtacgccttgccccacaggctggcggccggcacgaagtagttgaagacggcccagacgatgacgatgaccgtaaaccacttggtcagccaatctgcaaaggctttaaccttttccatggtgtttctcttcccttgttcggtgtaggtaacatcgcatgaaactaggcgggtcgcggttgatatgaaacataatgctcacattgtgaacgctcacgtaatcatctctgcaatccccagccgcaccatcacgccgttgtgtgcccctgacttttcatcaatcgccacacaagacccactcgtccacatcccaccatttgagacagcccacagcctggccccaagaatgaaaccaaccgcttgattccatcgcgacacaccgatgagcacacatccgcaaagttgtgtatagtattcacctgttgtgcgaattcagcttgctgaatacgacactatggtggccatagctcagttggtagagcatctgattgtggttcagaaggtcgcgcgttcgagccgcgttggccaccccagtaaaacccttccgttcgcggaagggttttgtttttctccatgaattccccgctcctgccgggaaccgccacgttgtacactcgggcatatccaattcatctaacacaaggacaaaaggtccgtcatgctgtcttttgagaacgattactcccgcgccgcccatcccgcagtgcttgaagccgtggctgaagccaacaaccatctgtattcgggctacgggtccgacgaactgagcgatcaggccaaggccaagatccgcgaggcctgcggccagccggacgcggatgtgtggttcctcgtcggcggcacgcagaccaaccaggtcgtcatcgacaccatcaccccggcgtatgcaggcgtggtcgcggtcgcctccggccatccgaacgtgcacgaggccggcgccatcgagttctccggccacaaggtgctcacgattccccaacacaacggcaaaatggacccgaccgaactggacgagttctgcaagaccttctatgcggacggcaactacgagcacatggtgttccctggatccgtgtacgtctcgcaaagcaccgaatatggcaccatctactccaaagccgaactgcaggccatcgccgatgtggcgcataagtacgatatgccgctgttcgtggatggcgcgcgactcggctacgcgctgaccgccaccggttccgacatgacgctcacggatctggcgaccatcgccgacgtgttctacatcggcggtaccaaggtgggtgcgctgttcggcgaggccgtggtgtttaccaagcacaacacgccgaagcacttcctgacccgcatcaagcagcacggcgccttgctggccaagggcttcgtgctgggcgcgcagtttgacgccttattcaccgacaatctgtacttcaagatcgcccgcaacgccaatgaggcggccgatcgtattcgcgaggccctgcgcgccaagggctacatgctcactttcgaagcgcccaccaaccagattttcgtgacgatggatcagccgaccatcgaccgtctggagcgcgaggtcaagctcggcttcaccgagaaggccgacgacacgcataccgtgatgcgcatctgcaccagctgggccaccacgcctgaagaggtcgatcagcttattgaggtgttgtaaaacccttcgctaatctctccctccgtcatcgcttcgcgatgccacctccctcaccagagggaggttttttcgtagctcccgccgatgagggagctggccgccgcaggcggactgagggaaagacctctccgcaaacgagaaggctcctactcccctatcgccttgcgttccatatccacgaacttgtggaccgaggcttccacggaataatgcgccttggtgtattcggcgtatttctcgccccattcggcgcgctcggcctgatgtgcgatccaccaatcgatgcgtcgggccagcagggccgcgtcccgcacggggaacaacgactcgtcgatcagcgcgaactggccggccgccgacaattcggacgcggcgatcaccggcaccaatccgcacgccatcgcctcgatcacgctcaccgattcgatgtcggcaatcgaacaatgcacgaacaaatcgcccgaacgcaacaaatcgggcatatcggcgtgcttgtggaatccgatatcggccttgcgcgccagcaaacgcccggcgcggaacttgagatactgcttgagcggcccagtaccggcgatcaccagctgaatatcgccggcgtggcgggacatcgacaccgccttgatcagcgtaatctgatctttctcgctggccagtcggccggaagcgacgacacggaacggcacgggagccgaggcatccggatcggccggcttcttcggagaatacaccggtgaataaccattggaaatcacgtgcaacttggctttatacccgtgcgcgcgcaacaggctcgcggtcatttcggtgggcacatggatgtggtcaatgtgcttgtacagccagtgcttgaacagccagtacaggaagctggaaataccgggaatgcgacgtagcgggccggccgaatacagcacgttctccggctgcaggtggaatccggcagtcacgggaatgcccatttggtgggcgactttagcggcgcggcggccgaatttgaacggcatatagatatgcaccacatccacgccttggaaggcggtgcggaacaacgtgtcgctgggttcggcgaattgcatgagctgcttggcggccacccacgagacgagtggcaccttattcacacgcgccggatattcgggcgcccctataccgacaagcctcacatgatggccttgccgctccaattccgcagcccattgcaaagccgaattggaggtgccgttgccctgattgcccaccgtatcgaccacaagagcgatagtcagcggacgatcaatgctctcttcaatcccgttttcgcgcattgcctcatcctaaaccaccgcgaggcaatggcgtcggccgcgctgcttggataggccggaaatggtatgggctgccgcattttgcctaatattgaatcacgcgcttcgcagcgcacgatcgacgcgggccacgacctggaacaactcggcggtgtgcttgagcagactgatgcgcacccagccttcgcccacctgaccgaagcagaccccggcatcagcgccacgccggccgtgttgagcagccaatccacgaatgcggcggaatcgccatgccaccgcgccagccggccaccatatacattttggacagcgagccaagttccagcgccacgtccagcgcgcccggagtctccagcaggctcagcgagcgtacgtcaccgaattcgagccccgcataggcggaatcgttaagtacttcgactattgccagcgtgccggcttgtagcctgaaatgccggaaccggcacgccgctattcgctatatgtcgcatcccaaaatgttggcccgaccgccccatacttcatcggccggtaattgctaaggtacgacggctctgttacgcacgcaatggcatgtctatacgcagtatttatggcgggttacgggcatctgaatcttcatggggcggcaacctgcccatggggcggtatttaccccatggggcggtgaaattcccatggggcggtaaggcaaaacggcttaattccgcggtttcacaaaaccaacaaaccgccccatggactcattaccgccccatggggaatttaccgccccatgaagccggatattccgcccgtaattttgccgcgcgaggcactccgctcacgcgacataccgaaatcatcgcgtcatggcagaatgtgggtatgactgagaacgccgtgaatactgccgtgacttccgcctcctctcccgcaattcccaccgagacttccgccgtcccccccgcaactcgcgcagccaaccacccgctgggcacaccgctgggcaagcaccccacccgtgtgctgtttttgggcgctggcgagctgggcaaggaggtcacacttgaactcatgcgactgggcgcatgggtgtgtgctgctgactcctatgccggcgctccggcccagcaggtggcgcatgaataccgcgcgttggatatggcgaatgccgccgaattgcaggcattgttcgatgaaatcaagccggacatcatcgtgcccgaggtagaggccatcgccaccgatgtgctggccggtgctgcggccgcgggcgcccaggtggtgccgagcgccgaaatcgccgcgatttgcatggaccgcgagcgcctgcgcgtactggcccacgaagaattgggcttgccgactacaccgtatcgttttgccggctcgctggaagagctgcgcgccggagcttcggaagtcggctatccgtgcgtggtcaagccggtgatgagctcgtctggtcacggccagtcggtggtgcgttccgccgacgccatcgatgccgcttggaccgaagcgcaggagggccgccgcgccgccgatgagggcgatgtgtcgcgcgtgatcgttgaggcgcttgccccgctggagcgtgagctgacggtactgaccgtttcttcgtccgccggcattgtgacgtgcgcgccgatcggccaacgtcaggagtccggcgattaccgcgagtcctggcagccggctaccgtgcccgatggtgaggccgagcgggcgcgcgacatcgcacgtaccgccgttgaaggcttggtggccaaggctcaggcgaccggcgaaaccggttggggcgtattcggcgtggagctgttcgtgctcaccgacggctcgattctgttcaacgaggtctccccccgtccgcacgataccggtatggtgacgatgacctcccagcgtctgagcgagttcgcgctgcacgcccgcgcgattctcggcctgccgatcacccccgagcatgtggcgctcacgattccggccggctcggtggcggcaagccatgcgattgtggtggccggcgacggtgaggccgagttcaccgatgtggccgctgctctggccgaacccggcacggacctgcgcatttttgccaagcccgaagtgcatggccaccgccgcatggccgtggcactggccgtcggcgagtccgaagccgacgcccgtgccaaggccggccgtgtggccgatgcgttgacgattaccgtggagtagtccacggcctgatcagctcagcatggcctcaatattattgccgtccgggtcgtggatgaacgcggcgtaatacgtggggccatagttcgggcgcgggcccggagcgccgttgtcggtaccgccagaggcgagaccggcctcatggaacgccttgacggcggcctcatccttggcgcggaacgccacatgggacggcaccaccgggttgccgtccttcggagactccagccaaacgctgtcgccatcctcgtcattggcaaagcacacggcggtcgggtacgccactttcttgacgtagcccagcggggccagcagcttctcgtagaaatccgcgtactgtgcggcgtcggaaacaaacaaaccaatatgatcaatcatgacgaacctccttgcaccatttcgtcactcccattatcgtgcgtgcgcggccggacactcacgttttgtctattgacgaacatctgagtgtccgcgtgcttgcgtagatactgttactccgaacgactatgcgaccggcaatgagtcgattgtcggaccaataccatccgcctccgccatcccaacagcgtatggtcgttcgatgcagcgacgtatgatgcgctggccgcatcgtagcgtcatgccgagtgttgttgtagccctcgattggtacccttttaccgttagttcacccagaaattccactcctgaaaggtgagtcatggagaagctggaaaagctctacgagggcaaggccaagcaactgtacgcaaccgacgatcccgaggttctgtgggtcgaatacaagaacaccgccaccgctggcgatggtgaaaagaaggaagacttcaccggcaagggccgcctgaacaacctcatcaccaccatcatcttcgacctgctcaagaagcgcggcatcgacagccatctcatcaagcgagtgaacgacaccggccagctggtacgcaaggtgaacatgttcccgttggagatcgtgctgcgcaacgtggccgccggccacttctgctcccgtctgggcgtggaggaaggcctgccgctcaaggagccggtgcttgagtacttcctgaagaacgacgatctgcacgatccgttcgtcaacgacgatgatctggtggccctcgacgtatgcactcgcgaggatctcgccgagatcgccccgctggcccgcaagatcaacgaggccctgatcgagatcttcgccaagatcgacgtcaagctggtcgacttcaagatcgaaatgggccgcgccaccgacggcacgctgctgttggccgacgagatcaccccggattcctgccgtctgtgggaccagaaggaccactccggcaaggtcgagcaccttgacaaggacctgttccgccgtggtctcggcagcatcatcccggcctacgaagagatcgaggagcgcctcgccgaactcgccaagtccgaaggcatcgaagtcgccgaataagtcgtttaggtgcaggtagcagaacatacagctggctcccctctccgaggggagctgtcgccgataggcgactgaggggaggtcaagacgttcaccgccatgacaactcccctcagtcagctccgctgacagctcccctcagagaggggagccaagttcttttaccgcacttcttcaatttttcaataatttcaagaaaggatttccatggtttttcgcgtgtacgtggaaaagaagcccggctttgatgtcgaagcccagcagcttgcgggcgaactgcacacaattctcggactgaacggcctcaaggccctgcgcatcgtgaaccgctatgacgtcgaaggcatctcccaggagctgttcgaccagaccgtgcccaccgtgttcagcgagcctcaggtggacaatgtggcctacgacctgcccgacttcgccggagccaaggtcttcgccaccgagttcctgcccggccagttcgaccagcgcgccgactccgccgccgaatgcatccagctcatctcccagggcgagcgcccgacggtccgctccgccaagctgtacgcgctggaaggtgacctgaccgacgccgacgtggacaccatcaagcattacgtgatcaacccggtcgaggcccgcgaggccagcctggagaccaaggaaaccctgaagacccaggtgccggtgcccggcaaggtcgagaccatcgccggtttcaacgagatggacgccgaagccggccagaagttcatcgacgagcgcggtctggccatggacctggccgacctcgaattctgccagaagtacttcagcgaggagggccgcgaacccaccatcaccgagatcaaggtgatcgacacctactggtccgaccactgccgtcacaccacgttcggcaccgagctggacgaagtgaccatcgatgacgccaccgtcaaggccgccttcgagcgttatctggcgatgcgccacgagctcggccgcgacgccaagcccgtctgcctcatggacatgggcaccatcggcgccaagtggctcaagaagaacggcgtcctgaccggcctcgacgagtccgaggaaatcaacgcctgcaccgtcaaggtcaaggttgacgtgaacggccacgacgaggactggctgttcctgttcaagaacgagacccacaaccaccccaccgaaatcgaaccgtttggtggcgcggccacctgcatcggcggctgcatccgcgatcctctgtccggccgctcctacgtgtatcaggcgatgcgcgtcaccggcgccgcggacccgaccgtgccggtctccgagacgctggaaggcaagctcccccagcgcaagctcgtgaccaccgccgccgccggctacagctcctacggcaaccagatcggtctggccaccggtcaggtcgacgagatctaccaccccggctacgtggccaagcgcatggaggtgggtgcggtcgtggccgccactccggccgaccatgtgcgccgcgaaaccccggcccccggcgacaagatcatcctgctgggcggccgcaccggccgtgacggcatcggtggcgccaccggctcgtccaaggcgcataacgtggaatcgctcgaactcgacggcgccgaagtgcagaagggcaacgctccggtggagcgcaagctgcagcgtctgttccgtcgcggcgatgcctgccgtctgatcaagcgctgcaacgacttcggcgcgggtggcgtgtccgtggcggtcggcgagttggccgacggcctgttcgtggacctcaacaccgtgcccaagaaatacgagggcctggacggcaccgagctggccatctccgaatcccaggagcgcatggccgtggacgtggccgccgaggacgtggacgagttcctggcctacgcccgcgaagagaacctcgaagccacggtgatcgccaccgtgaccgaggacccgcgcatggtgatgacctggaacggcgacaagatcgtgaatctgtcccgtgagttcctggcctccaacggcgcttccaagcaccagaccgtgcatgtcgaggcacagcagtcctacgagaccccgtggggcgagggcacgctggccgagcgtatgaacaagctggtcaccgacatcaacgtggcctccaacaagggcctttcggagcgcttcgactccaccatcggcgcgggcaccgtgctcatgccgttcggcggcaagcgtcagctcaccccgaacatggccatggtcgccaagctgccggtgttcggcgagaccaccaccgcttcggcgatggcgtggggcttcaacccgtacatcatgtccaagaaccagttcaccggcgcctacctgtccgtggtcgagtcgctggccaagctggtcgcggccggcttcgagcatgagaaggcctacctgagcttccaggagtacttcgagaagctgcgcgacgagccggaacgctggggcaagccggcggccgccgtgctcggcgcactgatggcccaagtggacctgggcgccggcgccatcggcggcaaggactccatgtccggttcgttcgaggatctcgacgtgccgccgacgctgatctccttcgccgtggccgtgggcaacatgaagcgcgccacctcccctgaattcaaggacgccgatcaccgtatcgtgcgcatcgcgccgcgctacctggccgacggtctgaccccggacaaggatgcgctgcttgaggtgttctccgtgatcgaggagctcaccgacttccacgatgccctggccgtctctacgccgggctatggcgccaccgccgaagccctgttcaagatgacgctcggcaaccgcatcggcgtgactctgaacgacagcatcgccgtggacgacctgttcaccccggcatatggttcgttcatcgtcgagctggcagacgatgccaagcttccggccgtctccaatttggtcgagatcggcgaaatcggcaccaccacctccgagtacgtgttcaaggccgccggcgagacgctggacctggacgctgtgcaggaagcttgggagtccggcatcgaatccgtgttcccgtaccgttccaagggcgaggacaagggcgcgaccgtcgagaccatcgacttccacgcgccgaagaagaccgtgtacgtcggctcttccgtggccaagccgcatgtggtgatcccggtgttcccgggcaacaactgcgagtatgattccgccgccgccttcgagcgcgccggcgccgacgtgaccacgctgatcatcaacaacctgacaccggccgccgtcgccgaatccacgcaggcgttggtcgatgagatcaacaagagccagatcgtgatgatcccgggcggcttctccggcggcgacgagccggacggttccgccaagttcatcaccgcgttcttccgcgcgccggccgtcaccgaggccgtgcgtgacctgttgaagaaccgcgacggcctgatgctcggcatctgcaacggcttccaggcgctcgtcaagctgggtctggtgccgtacggcgacatcgtgccgatgaccgacgcctgcccgacgctgaccttcaacaccatcggccgccaccagagccgactggtccgcacgcgcgtggcctccgacctctccccgtggctgtccaagacttcggtcggcgacatccacaccgtggccatctcccacggcgagggccgcttcgtggcctccgacgaggcactcgcccagctcagggccaacggccagatcgccacgcagtacgtggacgagaccggcacccccggcatggacctagatgtgaacccgaacggctcgctgctcgccatcgagggcatcaccagcccggacggccgcgtgtttggcaagatgggtcactcggagcgttccggcaacggcctgtacgtcaacgtgcccggcaacaagtaccagccgatcttcgaggccggcgtggaatacttcgccgcctgataatcggcgcgtatcgcgtctgatacggcacacagggaaggagctctcgggttccttccctttttgttcacgccggtcataggctaaggttggggtgttcgcactaccgaatccgccgctgaaaggacctgtcgtcatgccgatcaacgaggcattgttcgccgcgatgaaggccgccagctacatcaagcccaacgcgggcaagtcgtacaaattgcagcgcgtggcagaagagcttatcgccaagcaggcacccgccaatccgaaatgccgtgtcgaggacgccttcgcgcctatggcggatggatatgccgtaccattgcgagtgttcacgccgctggtcgcctatggagcgcccctgcccgaagccctggaggaatcttccgccaatggcacgccagtggcctcggcaatatccgcgattctgcccgccgtattacccaaagtcctacccaaaatacccatcaaggaaagcacgtcgagcggcaacaccgacggtatttccggcaatgccaacacggaacttccctcagtcacgccgcgtggcacgatcctgtttttccacggtggcggttggaccacaggcggcatcaacctgtacacgcaggcttgcgcgcatatggccgtacgtctgcaacgccgtgtgatctcggtcgagtaccggctggctcctgaataccgcttccctactgctgttgagaattgctatgaggtagcccggcagctgtttgctggggaattgccgatttctggggtgggtggttctgttgatgttgaccacccccagtcggctgcgccgacagcccccaccggcgggggcgatatatctgcgacaatcccagcaccggatcccgacagcatcgtgctgtttggcgacagcgcgggcggcaatcttgcggccgccgtctcgctcatggcccgcgaccgcggcgagttcatgccgcgcacgcagatgctgctttacccggtggtcggcaacgactacaatcccgagaccagcccgttcgaatcggtgcggaccaacggcaccgactacatcctcaccgcacaggacatggccgactacatcgacatgtaccgttcgtccgtggccgacctgaccaatccgtatttcgcgccgctcaccgcgcatgacctgagcaatcagccgcgcacgctggtgttgtccgccgaatactgcccgctcagagacgaggacgaagcgtacgcccgtcgtctgcaattggtgaacgacaacgtctcctgttaccggattcacgacggcatccacggttatctgctcaacacgtcggccgtagggctggtgtccaccacttaccggatcatcgagcatttcctcgacgacacaccgctggtgccggctcccggcaccggcaccaccgccaacgcaccggagggaggcgacgcatggcaagacgtacttggtaccgactagacaacatcggcaagttctactcctcccaggctggccgctcctcgcagaccgtgttccgctattcggccgagctggcggacgacatcgccccggacatcctgcagcacgcgctcgaccatgccatcgcccagttcccgagcttcaacgtgcacctgctcaacggcatgttctggcattacctcgaacagtcggacggccggccactggtggagccggaacatctgccgatatgctcgcgactgcattacgggcccaaaagcatgctgttccgcgtgagttatttccgcaatcgtgtcaatctcgaggtctcgcacatcatttcggacggtcgcggcgccatcaacctgttcaagtcactgttgcacgcctacatcgccgagcggtacgacgtgccgggcgtgccttcggattacgacggctcggacagcgacaaagccgaaaacagcttcgacaaatactacgagaaagacaaggccggtgccgcgcccggcacgaagatctaccggctggccggccccatcgaccgggacgcgcccacgttcatggaatatcacgtcagcgccagcaaggtgcttggtgcagcgcatcagtgcggagtgagcctcacctcctacctcatcgccgcgatactgtgcgcgattcgcgacgtcatgccctcgcgcgcccgcaatcgcgcgattcgcgtggatattccggtcgacttgcgcgccttcttcaggtcggagaccgtgcgcaacttctacggcatgacttacgtggcgtacacgccggccgatatcgaagccgatgaggactccgcgaaaacttccgcaacgggcccagacgcgaccggcgacggccagcagtccgccgcccgcaccgcgcacggcaacggtatgggtggattgctgaccgatgagccgttggccgacatcgcccgccatgtgcaggagcagctcgaccatgccaccagtcgcgagcgcgtcgaatcgcatatgaaccgcatgattgcgctggaaaagaatccggcgctgcgtctcgcgccctcccctgccaaggactgggtgctggagctggcccggttcatcgccgaccgcgagaccacgaccaccgtctcgaaccttggccgagtcaccttggacgaacgactcgcgcgccatgtgcgttcggtgagcttcctcaccacaccggccagcctgaatttcacggtctgctcgtttggcgacgacctgagcatcggcatctccaccgtctaccatgatctgaacgtcatcaagaacctgtgtcggattctcgccgcgcagggcatcagcggccgtatgaacatcgccggcgcgcatgtggagaaaggagcgtcggcatgaagcattgcgatgcctgcaacgtcgatttcaccggcgatatggcccgttgcccactctgtcagaacgaattgcacggcgaggcctctcccgccgcattccccgcgcagcagatctatctgcgtccgaggcgtttggcggtggagatcatcacgtttgtaaccggcgcaattctgctgctgcatggcttcttcagctatctgttttcgtggccgataccgattgccagtgcatcggcggccgcgctgatcatcagcgtgctgttcatcaacagtgcgattctgcacgcgccgcggccgcttcgactcatgtttcgatatttctatatcatgctggcgattgcgctggtctggtttgtggcgacgatgaatcatgtcgtcaccatgttcgtcataccgatcacgtgtctggtttcgctggtctttgacgtggtgctgcttatcgtgctgcgggccaaggccattgaccagtacgccaagtatctggcgttcgacatcgtcgccggtctgctgcctctgacgttcattccgctcggctgggctccgtgggatgtgctggtgatggtcagcgggctggtctccctgctggtgctgctcggcctgctcgtcttcgcccgccg

SEQ ID NO: 3688 - DNA, 11117 bp, Unknown
  R150_10m  MAG No. k141_1963
gccaaaggcgtttcgccggatggagcggtgtttgccgtcacgtctccggtaacggccacaccgttcgattggagcagttcggcgaatttcgtggccacgtcgctggcggtgtgctgggacagttccgggtatccggccgaatcatcagggtcggccggcgcaggcgtatcggcggtgtattggcggcctccatcaatcgccattgatgagaccggcgtgaagtagacggtgtagtcgcttaagaccgcgccgccttccgacagacctgcgggaatgcgtgagtcgccgaatagggtgtcgtcgtactcgagattgacggaagtgatgcctcgctgggcgagcgcggccacggtggccttggccaaggtgttcagaccggcacgtccgttggtatggttggcgtcggaatcgcctgcagacagcagcatgtcgccattgcctttgagggtcaacgtattggtgccgtcatcggattgggtcaggaacacttgggtatccaaggtggatgccatgttcagggtggatgaggcggcgagcgcggtcagcgttttcagtgtggatgcaggctcgcgtggagtgttcgactcatgttcggcagcgacggtgccttgggcgtcttcaatgatcaccgacgtatcgtttcccacgccttgcgcggacagcaattcgttgaccagtgcagaagcggccgtggaatcaatggccttgttcgcgttcagggcaccggcgatggtgccgcctgatttggcggtggccggattggcgaaaacaggtgcggtgacaggttttaacgtcaacaatccgggggccacgtcggtgatgtcggcggcgcagtaccccgcgaacagggcgatggtggtcagtgcggaaatgatgacggtcagtgttcggcgatgcgatcgttgggtccgccgttgcgcttcacgtcgctgacggcgtgataccgctgtagataccatcgtgctccttatgccaaggcaatcatttctgcaatgaggcgaacgagtcgagtgttgccacaatcgagagcattcgcgcatccatcagcttaccgcccagccatgtcccgagtgccagaatgccgatgccattggccagcgcgaccggaataatcgccagccacatgccgccttcggctcctgtcagcagcatgaccagcgccacgatgccagtgggcagcatgagcagcaggctgccaagcatgtagacgaacgggaagaagccttgggccatggcgcggccttgaggcgcggagaacggcttgtccattgaggcgaccgggtacatcagtacacaggaggtgacttcggccacgcccagtccgctcaaggcgatgcccatgcccgtggcgaggaagatcaggccggtagcgaggtcatcgggctgcgcccagcgtccggtcagtgcgccgaccagcacgatgccggcgagatagagcagcaccatgtagacgaccatgatgccgacgtagacgcgtacgcggccgattctgtcggtccggccacgcacgccggcgatgacttccatggtgaagccgcggccgtcatatgcgagcccgttgctttccacgacggacatgaaccagccgcaccagatcagcgactgccagacgaccgcgctgatgccgtgtgcctggaaggcgaagatgatcaggaacaggaccggcatggcgaaggtcatggcttggcgggggtctcgtttgagataggtgatcaggcgtgcggaaaccgcgccggatgccgaatcgggcatccatgcgaatgcgccgatgcctttggcggtctcggacggactgtttgcgccgatggtgagccgttcatgtctcagacaccaggtgcagacggcgaagcagacaatccatgtgacggcaaggatggcgatgcgggcgagcagcaccgcccaggctccggtaagcgcgtcgaacggtagttggaaggccgcgccgaacggcgtccatgcgacgatggtggtcgccgcgccccaggtttcggtgttgaggctgaaggccacgccggagttgaccagaatgttcggcaactgacagatgataacgaacgtcagcacgatgaagatatagaacgcgcctttgccgcgtttgctggtcaccagcgtggtggatagggcgatgagcagtttggagatgctcatcatggtgatgacggccagcactgcggcgaggagggaactgatgattacggctggtcccatatgccgataggccagtgtccagagcatcagtgaggccacgccggtaagggcggggatgccggacaggccggaaagcagcaagccgaattgcaggttgcggtcggcgatgccgtagagcgcgaatttgcgtgggttcatggtggagccttcgccaagcatcatgagctggatgaagccgatgaagatggtcatggtcgcgccgaccagcacgacgactatgttgacgatgcctccggaaccaaggatgttcagcggaaagccatccgcgttcacggtgaagggcggcagtatgccgatgaaccatgcgagcacgccggtgccgatgatggtgccggccgcgagtacggcggaaaagacataggcgacggtctgccacgccgattttcgcagggtggcgagcgtgagcgtccagcgcaggcggaccagggtgatggcgctgctgatcatcggcgggcctcatcggtgggtgtggcgggcgtggcggttgtaagcggaatgggctggaccggctggaccgaagttggtgcttgggcttgggcttgcccgccgtcgagccatgcgagatgggcggcttcgtggcggccgccgaccagttgcaggaagcggtcttcgagttcttcgccggcggcgacctcgtccaccgtgccggccgcgcacaccagaccgttgttgattacggccacatgcgtgcacatcttttcgaccaatgccatcacgtgcgaagagataatcaccgtgccgccggtcttcgcgtattcgatgaggatgtctttgaggttggcgctggacaccgggtccacggattcaaacggctcgtccaggaccagaatgcgcgggctatgaatcatcgcggaggccaggcagatcttcttggtcatgccggccgaataatcggtgaccatcgtgttggcggccccggccaagtcgaaagcattgagcaggtcctgggcgcgacgcgtggtctcatcgcggctcatgccgcgcagcatgccggagtagacgagcaattgcaaaccggtcagtcggtctaagatctggtcgggctggggcatgacgccgatcatgcgcttggccgtgttcacgtcgctccacacgtcatggcccaaaatcatggcggtgccggcgtccggtaccaatagaccggtcaccatattgagcgtggtggttttgccggcgccgttggggcctacaagtccatagaacgagccgaccggaatatcgagcgcgagtccgttgacggcgatcttccggtcgaagtgcttgaacaggccacgaatggacaccgccgcattcggattcggcggccatgcttgtggctgcggttgcgacggctgtgcaggcgcgggggcggcagccggcatcatcggcggctgaaatccgacattcctttgagtattgtctaagctcatacatccactctaccccaccagccaaccctcagcgaagcaaacccccgggttgctgttggattgccccgctgagcggctccaactagcggactcggtcaacccttatgcgcgatgggcttccactgggctttggagaagagggcctggaaggagatcggcacgtagctgagaatgtaaatcgggaagctgagcacataggcgagcagctccttgttcgtggcaccgatctggtcgcgctcgacaatgatggtcaatgcagccaatgccatcaggcccaacaccgatatgatgatgccactggaccaactggccagcgattgcagctggctcggccaactcacgaagccacacgcggcgaacagcaagcccattaccgcgcgaatcacgcccaacacggtaaacggacacagcatcaaggtgaagtcgatgcaggagaaatcacgttcgcgaaccgcgcgtttcagcaatgccgagccataataacggaatacctgcaggaatcccttgctccaacgcaaacgctgacgccaactttgcgagaaggtaaccggctgctcgtcgtagagaatcgcagtaccgcaatagccgatgcggtcgccatgcagaatcgaatccatagtgaattcaagatcttcagtgagcagatggaacttccatcccttgttccgcttcatcacctcgcgggagaacatgaatcccgtaccgcccacatggcaagaggaaccgagaatcatacgcgagttagacaggaatcgcgattcacggatgaaccacagcgcagaaccagaagacacccagttatccgccagattcaccgaattacggtagctggtcagaatcttgaatccggagcagaacgccttgttcatttcctcgaagtagtgcttgtccagcttgttatcggcatcgaacacgaagtaggcctcataatcatcggccacaccgatgtcgagcatatgccccaacagatacgtcagcgcatatcccttgccaaccagctcaagattgtggcgttccaccacatggcagcccaaagaccgcaccacgtcggcggtgttgtcggtgcagttgtcggccaccagccagatgtcgatgaggttggacgggtaggtctgatcgcgaatcgacccaataaggttgccgatcactttttcttcgttgcgcgcggagatcagcacggcataccggttggtcatcggggcgtcggggaagcgcacgggcttggcgaacagggacatcacgatgcacagtccctgatatatcatgccggcaccgccgacgatcatcagaagaatatcgagtacggaaagcagagtcatcagcgccaccctgccctaggattgctggaggcagattgatcagactgcttggtttgcttgcgttgctcgggctgctcaggctgttcggcggaccgctcaggctgctcgggctgctcagactgctgcgtatccgcggcaccacgctgcggaatcgccgccgtatccggctcatcaaagcttgcatccgcaccgactgtattatcggcgttatcggtatcatcggcatccgactccggctcagtgccgtgtaatcccttgcgagcgctggaggatagcacgttcttcggaatcgccacggtggcggaatcgtccaaatcggattctttcgtctcgtgcgacggaatcgcataaatctgttcctgcagcaaacgcagttcctcattcatcggcacgcggttggtggatcccctggccgcacgcggcatgtgctcgccgattggctgcaatacgtgctcgccgaacgcctcggacgcctcgacgatcttggacttcttctccggagtcggatcgttcatcagcggtgagtcaatcagctcatagcgcttggtgtacgcacggaagatggcctgcagcgatgcggtgaccggcagcgccaggaacgcgccgaatgcgccgaacagcgagccgaacgccagcaccgagaggaaggcgacggccgcgttgatatccatcgtgcgctgcgaaatcctcggcgagagaatcaggttctcgatctgctggtagacgatgatgaacaccagcaccgccacggcgtacgtccacccgcggttgccccaagcgaacagcaccggcagcgcaccgccgatataggtgccgaccgtggggatgaactgggataccacgccgcagaacagggccaacggcagccagtagggcacatgcaggatctccaagaagatggcggtgcaggtggcgttgatcagcgccagaatcgaacgggagaacaggaaggacgaaatctggccttgggccacggtccacaccagcaggaatcgacgctgcgtgttgggggccagccactggcagaaggagcggcgcagctttgggccggcggcggagatgtaatacgtggtcattaccacggtcatgaggttcagcaggaaggagaacaggccacccaccgtactcatggcggtgccggcgaaatcggtgacccacgaggtctggatattgttgaagatttccatgccaagattgctgatttccggcatcttgaacgtggcgtgctggtccacgaactcacgaatctgcccatacattgccggcaaaccgcggaccatggcaatcatctgctgtacaaacatattgccgaacagcgtgagcagcacacccacgaccacggccacgcccaccagactgacggcggaagccacgccacgcttccagccatgagccaccagcgccaccaccagcggttcgacggccagcgccaggaacagcgagatgatgatgtcgaacaccagataggagatgtcgccccacgagcgccagcagaacatgaatacgatgacggcgagggccacatacagcagcgcgcggccgaaccattccggtggcctgcgggaatctcccttggcggggaacaaagtaccaaagtcgatacgattctcgtcgttcgggtctgccccggcttctgcggcaccgcttctcgacgtgtcggtgctgtttatgtttcgcgcgcgttcgctcatggctccccattgtagcgaggggtttgaagctcggatacgccggcggcgtacacccgcttttctattgttgatgttatgctcaacgtttcgatcatcatcccagcgtggaacgaagccgaacgcatccgcgactgtctgctgaacgccactcgccagaccatcatgccgcatgaggtgctggtggtggacaatcgttctacggacaacacctgcgcgattgtcgaacagttcatcgccgaacatcccgaggccccggtcaaactgttgcaccagaacgatgaacaggggctgattcccacccgcaactttggcctgaacgccgcgaccggcgatgtgctgggccgttttgacgccgactgtatgatccggcctgactgggtggaggtggtctccggcatcttcaccgaagacccggccgcgatgggtgccactggtccggtgatgtattacgacatgccctcacgtcatttcgggttgaaaggcgacaattccttacgcaagcgaatctaccgtgccgatggcggccagccgctgctgttcggctcgaatatggccttgcgcgcttcggcctggcatcagatcgcgaatgaggtctgccgagataaggccgatgtgatgcacgaggatatcgatatttccctgcatctgatgggcaagaatctgaaaaccgtgtactcgccgcgcatgatcgccgcgatgagcgcgcgacggatggacacgtcgctgagttcattcctgaactacatgcgacgttttaagaatacgtttgatgcgcatccgcaacatacgcgcacgcataagccggaggtgttgttcaccgccatgtatccggcgatgcatatgttctacccggtgtggcagaaagtgctgaattccgcggatatcaatcctgctgaagccgcgtggatcaacgagcagatgaaactggcggaggcgcaaagcaagcagctgtacgacgagacccccaccgacgaagtctacgacgaaaagcacgagagatagcgatgccggtgggttcccgacgaggggaacccaccggcatcgtcggcgtcatcgacgaatcacatcagcgacttgtagatggcgaggatgtcctcttcggttgcctgacgcgggttgccgggggtgcacacgtcgttgaaggcgtcgtgagccagcggctcaaggtcgccctcggtggcgcccacttcggaaatcgtggtcgggttcttcagatccacggtcagcttgtggacggcctgcacggcctcttcgcgcaccttctccaggtcgccggtgtaggcgtcctcgacgccgaacgcgtcggcgatgtcgcggtacttctcgcccgtgtagtccttgttgtattccatgaccggggccagcagaataccgttggccacaccgtgggccacgcccagacggccgcccagcgggtgagccatgccgtgcaccaggccgaggcccacgttggagtaggccataccggtgatgtaggaggcgtacgccatctgctcgccagccggaatgtcgccgtcggcggacttggctaggttcttggcaatcatgcgaatggtctgcatggacaggcagtcggacaggctccaggcacccggggtaatgtaaccctcgatggcgtgggtcagggcgtcaagtccggtggcaaccttcaggccgcgcggcatggagtcggtcagatccgggtccacgaaggcgacgatcgggatatcgtgcgggtcgacagccacgaacttacgcttgttggcggtatcggtgaccacgtagttgatggtcgtctcggaagcggtaccggcggtggtcggcacgccgaagatcgggacggacgggttcttggtatccgcgacgccttccagggacagcacgtcggcgaactccgggttggcggtgatgatgccgatgcccttgcaggtgtcttgcggggagccgccgcccaggccgatcaggaagtccgcaccggactcggcgaacttggcgacgccgtccttgatgcactctaccggcgggttcggcttgacgttggagaacacttcgtagggcaggccggcctcatccagaaccttggtgaccttctcggcggtgccggtctccagcagtaccggatcagtgacgataaatgccttggtgaagccgtgctgcttggcgacggccggaatttccttgatcgcgccacgtccgaagtatgcagtctggttgaaaatcatgcggtataccatagggactctccttttgagctagtgtcttaactggtggtccactcactctttgagtggtccaacggttccccagtctactccgcgcatgagcattcacctgaaaacacgctgaaagaacaacactgaaaataatggcaagaaatggcggaattccgcacttgtcgaattattgtccattgaccaaaccagttcaatcgcccgagatctcaacgataagaccgtttccggagtcatctgacgctctccgggaaactcgtctctcatccgcttacttcgcgcgtacacaatcaatatgcgagatgcctaattccattcgtgtttcatcagccgaacgcgaactggttcaccagatggtgtattcaacggtttcagtctcttgaagaggactaagatacctcgacaattggggtgatcatcataagagaatgaggcagataatggcaaatggcaaggctatgacggtcggcgagatggcatccctgtttctcgaccccgacactcccgttcgtatcgacgcttttgacggctcgcatttcggcccggcagacgcggatttgaaggtcaaaatcgccgcgccgaactgcatgtaccagctgctcgcgcacccgaatgaaatcggcatcgtgcgcgcatacattctgggcgatttcgacgtggacgacattgactacgccgacccgtatccggcgatgcgcaagctggtgtcgctggccaaatacgttcgcccgctcactcccgcatccattgcccgcgtatccgccggcattctgagtcacggcttcaagaagccgccggtgcccgccaccgagggcccgagcaagttcgcccgcatcaagcgtggcctgatgccgcacaccgaaaaggccgattcggaaaccgtcagcttccactacgacatgtccaacgagttctacgccgacttcctcggcccctccatgacgtacacctgcgcggtattcgacaacgagcacatgagtcttgaagacgcacaggccaacaaactgcgcctgattctcgacaaactggacttgcagcccggccagcgcttactggacatcggctgtggctggggttcgatggtcatcaccgccgcccgtcgcggcatcaaggcgctcggcgtcaccctctccaaggaacaggccgcgtacgccaacgaatggatcgcccgtgaggggctgcaggatctggccgaagtgcgcgtacaggactaccgcgaggtgcccgagcatgacttcgacggtatctgctcgatcggcatgatggagcacgtaggcgtcaagaactaccagagctacttcgaagagatgttccgtctcctgaagccgatgggccgactgctgaaccaccagatcaccatcagccatgacaagcctcacggcaagcccggcaccgacgaattcctcgaccgttacatcttcccggacggcgacctcggcgcgcccggcttcatcgaatcgtgcatccatgacgccggcttcaacgtggtgcatcaggagaacctgcgccagcactatgcgctcaccctgcatcactggaaccagaacctctccgagcattgggacgacgcagtcaagcaggtcggctttgaacgcgccaaggtatggggtatgtacatggccgcctgcgctctgaacttcgagctcgacggcatccagattcaccagttcctggccgtcaagccggatcgcgtgggccacccggacggcaagtggtaccctctgcgccaatggtggcaggcctgactccgtttctgtgggacggcacgcggtctttaccattgttcatctgccgtcccacagaagtgtgggatagcagatacatcaatcgtttgacgtatctgctatcccgcatgacataagccgagaaccgcagaatagagccattctttgccctcagctctgagggcgttcttcgaacgctgtgggacggcacgtcgaaaatcggcaaaatcacgtgccgtcccacacgattcccttcgcacgcgcatttcgcaggtgctttttctgcaatactgactctatgagcgccacagccccagaaacggctggggcggacgatcgcaccgaccatgacacgcgcggataagacccacgtttctttatttaaccctaacccgatgttcgcattggtgctgttggcgtgcgtagttgcggcgaggagggttataggccaaaatgtgtgtccgttttggcttgtgttcctttgtggcggtgggcgttcctcctgttcgagttgtatgggcggggaactcgaggtcggccagaatgtgtgtccgga

SEQ ID NO: 3689 - DNA, 91267 bp, Unknown
  R150_10m  MAG No. k141_2412
cttcctacagcacgtgctgtaggaaggctgttatattgcctcagcactgtcgtgcttcggcgtcgcctacggggagcccactgggctccccgctttacggctccgcctacagcatgtgctgtaggaaggctcgttgttgcagctccaaaagcgtacgctgatgaactcagcgtacgcttttcacgaaggggcatgttccaatcctgcaaaggcggcgggttggattcgctttgcgcaataatcgtccgctaggctggtgagccatgtgtggaatcgttggatacgcgggaaatattgaaacggcatgcggcaagcctttggaggtctgcctgcaaggcctggaacgtctggaataccgaggctatgactcggccggtgtggcgctgaccgcgcccggcatggataaggtggtcgtgcgcaagaaggccggccgtttgaagaacctggtcgaagacatcgagcgcaagccgatgccgctcgccacggtgggcatcggccacacgcgctgggccaccaatggcgagccgagcgacgtgaatgcccacccgcacaccagcatggacggcaaggtggccatcatccataacggcatcatcgaaaacgcctctcagctgcgtttcgacctgcaagccgaaggctaccgattcgcctccgccaccgacactgaggtggccgctaagctgctcggcaagatcgtggacaagattatcgcggacgaaggcaagccagacttgttcaaggctgtgcgccgtatggcccgcatgcttgaaggcgcgttcaccattctggccaccgactgccgccagccggacatcgtggtcggagcccgccatgattcgccactggtcgtgggccttggcgagggggagaacttcctcggttccgacgtcgccgcattcgtggcctacaccaagcgcgccatggaagtcgaccaggatcaggccgtatgcgtgtccgccgacaaggtcatcgtcgccgatttcaacggcaacgtggtcgaaaacccgaagacctacaccgtggattgggatgcttcggccgccgaaaagggcggctgggattcctttatggacaaggagattcacgaagaccctgccgcagtgcagcgcaccctgcttggccgcttcgacacgaatggcgccatcacccttgatgaagtgcgtatcgacgaacacgacttcaaggccatcgacaaaatcatcgtcgtggcctgtggcaccgccagctacgccggccaggtagccaaatacgccatcgaacactgggtgcgtatccccgtggaaatcgaactcgcgcacgaattccgttaccgtgacccgattctgaccccgcgtacgctcgtggtggccatttctcagtccggcgaaaccatggatacgctgatggccctgcgccacgcgcgcgaacaggggtccaaggtgctggccatctgcaacacgcagggtgcctccattccgcgcgaatccgacgccgtgctctacacacacgccggcccggaagttgccgtggcatccaccaaggcgttcgtggcgcagattaccgccgcctacctgctgggcctgtatctggcgcaggtcaagggcgcgatgttccgcgatgagattcatcagatgctcgactccctgaaagacatgccgcgcaagattcagtgggtgctcgacacccagcccaagaccatccaggcggccgccgagcgcatggtgaacgccaactccttcttgttcctcggccgccacgtgggctacccggtggcgcttgagggcgcgttgaagctcaaggaaatcgcctacacgttcaccgagggcttcgcggccggcgagctcaagcatggaccgatcgcgctggtggacgagggtgagcccgtggtgttcatcgtgccgccgcagcgcggccgcaatgtgttgcacgccaaggtgatctctggtatcgaggaggtcaaggctcgtggcgcgtacatcatcgccgtggccgagcagggcgacccggatgtggaacggtacgctgacgtggtgttctggcgccccgcctgcccaacgctgatgagcccgctggttgacgtggtaccgctgcagctgttcgccatggacatggcaaagctcaagggctacgacgtggacaagccccgcaacctcgccaagtccgtgaccgttgagtaagccacatcggtacgtgattgacgagcctcatattccgtttgagatggacgtgctgtatgaggacgagcggatcatcgtggtggacaagccgcattttctggccaccatgccacgcggcatgtggtatcggcagaccgcgctgatccgattgcgtgagcggctgggggagccggacatcacgccagcgcaccgattggaccgcatgaccgccggcgtattggtgttcgtgcgggattcggcctgccgcggcgcgtatcagatgctgttccagaaccggcaggccgtcaagatctatgaatgcctggcaccctgccggccgatcagcggcccgcgattcggcacgatcatgcaggtcgaaccgccacgcccgttcccattgctgcgccgatcgcacatcaccaaggaacacggcacgatggccgcattcgaggaaccgggtttggccaacgccgaaaccctcatcgagcgcggcgacctctgtttccctcccgctggcgggaggtggcgcgaagcgccggagggtggtccccatccgggaaatcaccccatctgccgctacacactccacccgcgcaccggcaaaacccaccaattgcgcgtccacatgaattcgctcggcctgcccatcgtgggcgacgacttctacccgcgcatccagacacgcccctacgacgatttcagccagccgctgcaattagtggcgcgtgtgctacgattcaccgatccaataacaggcgagaagcgcgaattcgtttcccgtgtgccgcttaggatctgatttcttaggggggggatggcgagaccaatccccacccgtccgaatcactgtccctttcgactggccatccagctcattgcatcgtcgtacaccatcatgatgcgcttgcgatagctatcgatgaattcctgcgcaccaatgctcgcgataacgtcgtgagcgggttgcacggtgctgtcgaatgcctccggcagcctatccaccaaggtgtggaatcgtaaaatcacggattcctcatctaatcccatccgctgtgcgaatcgttccagatgtttgcggcgtaattgaagaagatctcggcgtccgccgatgttcatcgccaaagtggcatttatgatctgcttgccatgccccaaataagggaacaccgaagcaaggtcatagagcggggcaagccgcacggacgcgccatcgagcaatagcgagtagttcttggcgtggctgtctgttgccccgacgagataactggcgaggatgccgtcggtgaaggctcggatattgctttcggcctgaccgggcagaccgtgcttgcgtaacatttccgcatatgcattggacgttgggccgttgtgttcctcgtatttcagcgatgagggaatgcccagcgcttgggtaaagtcttcttggtgcagggccgtcaccgtaccattggcggacactatacggtcataccgctcgctgatgatggctgggaccccatcaaagatgtgaaaagaggtgtgggccacgggtattcccatcgcctccacaatgcgcatggtgatgtgttcgttgaatgcttggtgtggaagggtcggtatgccgggcttgatgatatgagtcgtccgcgcgattccagtggtggagaaccatgatccattgcggttcctcagtgcgatcttgccctgctgtcccgcgaccgaccaatgctcgtctacgcttgcggactggatgcctgtgggggcggctgcgcgtagtcgattcgcgatctgcgaatcgctgattggaataagcgaatcgtcatctatgggcaagtgcgggtcggcggacagccgtaatgcgccggtggcatcgaatccgatggcttgcaacagatcaaatgcgcttgtcgatcgggcatgatgcaatcgcatggcttcatctcgggcctgaggggattccgggaccagggcctcaaggaaattacgcgggatgtcgcctgaatattcggctgcggtaatgggcatggaaagcgatattggtgtgggtgattgcgaccaacgataggaatcgtgatattggaaaataatgctgccatcgtttgttcttcgaaactggccgatgggtgtttcgccgagaaatgcattgagagtgttttcgctcatggtgtcaccattcatagagttcggcgggctgcggggttttgcggacatccagcgacaagccaagctcagtcagagcgctgagaatggtggagaatccgggattggggactcgggcgtgttcaaattcgatcagccagcgacgtgacacgcccagccgttgggccatgtcggtctgactgatgccctggcgttgcctttcatccttgataagccgcgcgtattcggcgatatccatgacaatcatgtgcaaaatatatcacagtatagtaaagtgtgcaatattctgcacatagttggaaatgtgcagaatattgcacaaccgagtcgattggtcggtgcggaattgcctatggatcactggcaggtgaatcactgacaggtaccagtggatgccagcacatgccgctcgtcagctgatgtcgcgcacggaaccgcgttcgatcagttccggcgggattacggttttgacgccgaccggtatcttctcgccttcgcattgacggcggaccatggagaaggcggtggcgccaatgtcgtcaaagcgcagcttcatggtcgtcaggttcaagcgcggaaccatatctgccagcgaatcatcgacgcccacgatgctgacatcctcgggcacgcgcttgcccgctgactgcaacccgagcattgcgccgtatgccatttggtcgttggcggcgtagatggccgtgcagtcggggtcgtgggccaacgccacgccggcctggtagcctgaatccgcgcaccaatcgccgatgtacatgctcggtacgcgtgctcccatttgttccaacgcttctcgccaaccgcgggcgcggctttcggcggcgcgcgaggtggacggtccggcaatgtggtagacggtcttgtgccccttgctcatcaggtaatcgacgatagcggtcgagcagccatactggtcggcgtcaacggtggggcagtggtcggcggcggattcgcagatgagcacgactggaagttctcgcggaggcttgtatccgacgaaatcggagatgcgttcctccagcactacgatgacaccatccaccggctgacgctgcatgcgatcgatggcggcggaaagcgtgcgttccgcaccgtggcgcatggtctggatggtgactgaataatcgtcatcggccgcgttggccacaatagaatcaaggatgcgggcgttgccgaacgcggtggtgttgaacatcaccacgccgatatcctggaagcggccgtgctttagggctcgggccgcataattcggacgatacccaaggcgtttcattgcagcttcgacacgctggcgtgtttcgggtttcaccgcatcgctgccattcgccacgcgggacactgtctgtggcgaaacgccggcggctttcgctatgtcttgcatggacacctgtgttggcctcgacatttcaccctcgcttgactcattaatgttggtgtttcgtttgcaacgcttatcttagggccgcttacggtaacgataacatcgttgtcttcgtgaccattgtagcagagtgactgagaaacccttaattcaacacggtactcaacacgattggacaatgttacaaatggtgttatgatgataacgcaaacattttggtcaaccttcgaaggagaggggttgggaatggcttcagccgatatcgcagctgcgcccgtgcattcgggcaaggctcgtgtgaataagcacaaggccgattggcgtggatggaaattcatgtggccttttgcggtggtgttcgtgttcgtgttcatcgtgccgatcgtgtacgccgtttatatttcgttcttcaagaagcagatgatcggcggcaccaagttcgtcggcttcgagaactacgcgcgcctgttgggtgatggccagttctggagcagtgttggtcgtgtggccctgttcacgtgcgtgcaggtgccgatcatgctgtgcctgtcggctttgatggccctggcgttggattcgatgaagctgcatggcacgaggttcttccgtatctcgacgttcctgccctacgcggtgccggcggtggtgtcgacgttgatctggggtttcgtgtatggcgcgaagtacggcctggtgggttcgttgaacgatttcctgggcacggacatcgacgtgctcgcccccagcgtgttgttggccagtatcgggaacatcgtgacgtgggagttcacgggctacaacatgctcatcttctacagctcgctgtcgaccatcccgcattccctgtacgaggcggccagcatcgacggcgcgtcggagtggcagatcgtgaagagcatcaagcttcccgaattgcgcggcagcctggcgatcacggtgatcttcagcatcatcggctcgttccagctgttcaacgagccgagcattttgcagaacatggttcctggtaatgcgatcacgacgtattacacgccgaacatgtacgcgtacaacctgagcttctccggcaaccagtcgaactacgcggccgcgttggcgatcgtgatggccgtgatcaccatggccatcgcctacatcgtccagctcaacagcctcaaggagcagatgaagtgacgacgactactgctgttcgtgttgaggaatcgatgatgatcgtgaaggagcgtatgtgatgagtgcagcaacgacttcggccgccggtcgcctgaccgacggcgagctcaaggcccgggagaaggccgccaggaaggcggagaaggcccgccagaagaggatcgccgccgacgaggccgccgaacgcaggcgcagcgcgaaggcggggttcgcgaacgtgaacaacccgaggcgttccacgttgttgaccgtcctgtgcgcggtcttcgccgtgtactgcctgttcccgttcgtctaccttttgatcaacgcgacgaagacgcaggccgacttcaccagtacgttcggcctgggcttcggcaagacgttcgccctgttcgacaacatcgcgacggtgttctcctatcaggacggtatcttcgcgcgctggctgttcaacacgatcctgtacgtggtggtcggcgccggcggcgcgaccctgctggcgatcatgggcggctacgctctggccaagttccgcttcccggggcgcaaagcggtgttcgtggtcatcatcggcgcgatcagcgtgccgggcatcgctttggcggttccccagttcctcctgttcgccaaattgggcctgacgaacaccccgtgggccatgatcatcccgtcgctgatcagcccgttcggtttgtacctgatgtggatcttcagcgagcaggccgtgccccaggagctgctggaggcggcgcgcgtggacggcgcgtccgagttccgcacgttctggcagatttccttgcccctgttggctccgggcatcgtgacgacggcgttgttcacgatcgtggcgacgtggaacaactacttcctgccgttgatcatgctcaaggacgcggactggtacccgctgaccatcggcctgaaccagtggaaggaccaggcctcgaccgcgggcggccaggcgatccagaacctggtgatcacgggctccctgatcacgatcatccccctggtgatcgcgttcctgtgcctgcagaagtactggcagtccggactcgccgcaggcgccgtcaaggagtgatggagtcggctccgccgacgcggtgtcttcaccgcctcgcggcggggtctctccctccgtcccggcttcgccgagacaaccttcctcatcagagggaggtaatagtgccaagccccccctctgacgagctgagccgttaggcaaacagccctgtgggctgtttattcccgcggacgcagattatcgataaaattcaataaaggagctgaatcatcatggaacgtaaagagttcaagtggccgcagccgcttgcgggcaacaagccccgcatctggtacggcggcgattacaaccccgaccaatggcctgaggaagtgtgggacgaagatgtagccctcatgcagcaggccggcgtcaacctcgtctccgtagccatcttctcctgggccaagcttgagcccgaagaaggcgtgtacgacttcgattggctcgaccgcgtcatcgacaagcttggtaaggccggcatcgccgtcgatctcgcctccggcaccgcatccccgccgatgtggatgacccaggcccacccggagatcctctgggtcgactaccgcggcgacgtctgccagcccggtgcccgccagcactggcgcgccaccagcccggtcttccttgactacgcgctcagcttgtgccgcaagatggccgagcactacaaggacaacccctatgtggtctcttggcatgtgagcaacgagtacggctgccacaaccgcttcgactattccgaagacgccgagcgcgccttccagaagtggtgcgagaagaagtacggcaccatcgacgccgtcaacgacgcttggggcaccgcattctgggcgcagcgcatgaacaatttttccgagatcatcccgccgcgcttcatcggcgacggcaacttcatgaacccgggcaagctgcttgactggaagcgcttcagctccgacgccctgctcgacttttacaaggccgagcgcgacgccctgctcgagatcgcccccaagccgcagaccaccaacttcatggtctccgccggcggtgccggcatcgattacgacaagtggggttacgacgtggacttcgtgtccaacgatcactacttcacgcctggcgaagctcacttcgacgagctggcttactcggcctccctatgtgacggcatcgcccgcaagaatccgtggttcctcatggagcactccagctccgccgtcaattggcgcccgatcaactatcgcgtcgagcccggcgaattggtgcgcgactccctggcccacttggccatgggctccgacgccatctgctacttccagtggcgccagtccaaggccggtgccgagaagtggcactcttcgatggttcctcacgcgggccccgactcccagatcttccgcgatgtgtgcgagctgggtgccgacctcaacaagcttgctgacgagggcctgctgagcaccaagctggtcaagtccaaggtcgccgtcgtcttcgattacgagtcccagtgggctacggaacacaccgccacgcctactcaggaggtacgccattggaccgagccgctcgcgtggttccgcgcgctggcggacaacggtctgaccgcagacgtggtgccggttcgcggcccttgggacgagtacgaagccgtcgtgctgccgagcctgaccatcctgtccgaagagaccacgcgccgcgtgcgcgagtatgtggcgaacggcggcaagctgttcgtgacctactacaccggtctggtggacgacaaggatcacgtctggctgggtggctaccccggttccatccgtgacgtggtgggtgtgcgcgttgaggaattcgccccgatgggcaacgatttccccggtgccatggaccaccttgacttggacaacggaaccgtggcgcacgatttcgccgacgtgatcacctccgtggccgataccgctcacgtggtcgcctccttcaaggcggataagtggaccggtttcgacggcgctcccgccatcaccgtcaacgacttcggcgacggcaaggccgcatacgtcggtgcccgtctcggccgtgagggtttggccaagagcctgcccgtgctgctggaggaactcggcatcgagacttcggctgaggacgatcgcggtgaagtgctgcgcgtcgagcgtgcggacgaaactggcgagaaccacttcgtgttcctgttcaaccgcacccacgatgttgcggtcgtggacgtggaaggcgaaccgctggtcgcctcgctggcccaggtcaacgagtccgagcacacggccgccatccagcccaacggcgtactcgtcgtcaagctgtaaaaccgcgcatagcgcctaattacccaacggctcccttgctgctcatcgtagcaggggagtcgttttcgtatctccagcaaagtcgggtagggtggtcaccgtgcgaggcaaaaacagagtgacgatggcggacgtggcccatgaggccggtgtttcggtagcctcggtgtctaattttctgaacaaacagccatatatgagcgaggcgatggccgcgcgtattgcggaagccatcgacaggctcggatacaaagtcaactcgtcggccagaaacctgcgttccgggcgtacccggttgctcaagctggttattcccgatctgcggcaggtgtacttctccgaactcgccgaggatattctggccgaggcccggcaacatggctacggcgtcatcgtggaatccaccactaacaatcgtgcccgcgagctggaaagcatcgcatcgatgggcacgcacagcgcggacgggctcatcttaagccctctgatgatgacggttgacgatatcgcggctttggatggcgattacccgctcgtactgttgggtgaacgtttgttcggcgtcaacgcgccgcacgtagtgattcgcaatcgcgaaggggccgccgccgcgacttatcacctgcttgatgccggttgccgccgcatcgccgtagtcggtgccgtgccccaccccgagcacgatttctcgtcgggctccatccgcacccacggatatcgtgaggcgctggccgcgcgcggcatcccctgtgatgacagtctgcttatcgaaacccaaggctgggggagcgccgacggtttggtcgcggtggacaccatgctggagagtggcctgcaattcgatgccgtgttcgctttgaatgacttgctggcgtggggcgtgctgcgtgaactgcgcgaacgcggcgttgccgtgccggatgatgttcgcgttatcggcttcgatgacgtggaggaatcggcctacatggtgccgtctctttccaccgttaaccccggcagggaagccatcgcccgactggccgtcgaatccatcatccaacaggtcgaatccggcagccgtgcccccgcccaaaccatcgaggccccctatagcctctccctgcgcgagtcctcaccggcgttggcgcgcgcctgatgaatccgtggttcgaaatatccgaagtgaatgacaaggcccgtcaatcgtatggtgattgacgggccctggtcgtattggacttgactgtacttggtacgggcgtgactctccgtcttttagccgtggaattccacgctgatccaggagatggcgggaagcgttgccgtgcaggtgccggtggcgttcattgcaatgtcgagcggttgcggcgtgacggcttcgggcgcttcggcggtgttggtgcggtacggatcgtcctcatgcaacagttgcgccttgctgagcgcgagcgtgccgagaccgggcaggccgggcagcccggaaaggtcgatggtgagcgtgtgcggggtgttggcgtcgcggttgacggcaagcagcagaccggtgcgggcctgttcatcccacgtgactaccgcgtcgatggccggcacgtcgccatatgcctcggtatggatggtgggggagctgatggccggagcgtaggcctggccgcgcgcgtgaagggcggcttcggcgaacgggtagaacgtggtctgccgccatgccgggccgtgttcctcggccatgatgggggcgatgacgttgaccagctgggcgcgcgaggcggaacgcacgcgatcgcagtgcttgagcagggtgatcatcagggaaccttcgaccaccgcgtcggccgcggtgtagatgtcttccagcaaatgcggagacttaggccatggctcgtggtgcaaaccctgcgcggcctccgccttccactggtcttcctgctcgttccacttgtccgaataccatacgccccattcgtcgaaggacagggcgatgtctttggtgccgttgttggcttctcgcgcctgatcggccgcgtccgagacggtggcgatgaacttggtcatgtcttcggaagaggccaggaagtcctgcatggaggcggcggtccgggttttatggccgcggtcgaagtagtaggcatggcaggagacgaagtcgagattctcgtaagccttggtgagcacggtcttctcccacgtgccgaaggtcggcatataggcacccgaggaaccgcaggccacgagttcgagaccggactcggcgagcttcatggcgtgggccaccttatccaccgcgccggcatattcttccgggctcatgtggcccacctgccacgggccgtccatttcgttgccgatgcaccacatcttgatatccatcggctcctcgatgccgttggccacgcgctgatccgcccaagcggtgccgggcgcgccgttgacatactcgagctcgtcgagcgcggctttcagcccccgggtgcccatgttgacggcaagcatgatttcggtgccggctttctggctccagcggtagaagtcgtcgatgcccatctcgttggtttcggtgcaatgccaggccaggtcgcggcgcacggggcgattctcgcgtggaccgatgccgtcttcccagttgtagttggatacgaaattgccgccggggtagcgcacgcaggtgacgcccagctccttgaccaggtcaagcacgtcttggcggaagccgttttcgtcggcggtgggatggctgggctcgtagatgccgccgtagacgcagcggcccagatgttctacgaatgagccgaacagacgcgggggaacgtcggctaccggagtggcgtcggcgttgagggcgatgctggcgtccggcgtggcgttgccagttgtggagacgttactggccgtggtgccggcggcggtcggcgccgggctgctttcctgcttgtcgggatgggtggtttcggcggaatactggctgttgtgagtggtcatgagcgggatgcatctccttcggtttgcggttagtcaccatggtgcgacatgtcgtgtttgcgtaaacataaaacatgtggtaccgtttcttaaaacgatacaagacttggaacaaaacgccaagtcccgtcgtttcccataacaaggaaggaaagaacgatgaagttcggcaagaagacaattgccctgattggtgctgtggccatgctctcctctgtagctgcctgcggttccacctctgccggggatagcggaagcaccggctcctctgataagaagatcgagctgaccgtgtggtcctgggattccacactgcctcgtacggtcaagggattcgaggccaagaacccgaacattaaggtgaaggtgaccaatgccggcaccaacaaggacgagtacaacgcactgtccaacgccatcgaggccggctccggtgctccggacatcgcccagatcgaatactacgcactgcccgaatacgtgattcgcggccacctcgagaacctctccgatctcggcgcctccgatttcaaggacttctacaccccgggcacgtggtcctcggtgagcatcaatgacggcgtctacgccctgccgatggattccggcccgatggcctggttctacaacaaggacgtcttcgacaaggccggcgtcgatccgacccaggtgcgcacgtgggacgacttctacgaggctgccaagaagattcgcgccgtgggctcctacatcacctccgattccggtgacgccggtttcttcgactccatgacctggctggccggcgcgaccccgttcgagacctccaaggacggcgagaccgtgaccatcaacctgaccggtgacaagaacgtcaagaccttcaccgacttctggcagaagatgatcgacgaagacctcatcgacaccaagaccgtcggctggaccgacgattggaacaagggtctggatgacggctccatcgcatccctgctgaccggcgcttggatgccgtacaacctgctttccggcgctccgaacggtgacggcaagtggcgcatcgcccagatgccgaccgcagacggctccgagaccaactccgagaacggtggttcctcgctggccatcgtgaagtccgacgacaaggccaaggtcgccgccgcctacaagttcatggaatacgcctgccacgacgccgagggcattaagacccgtgttgacggcggtgccttcccggccgacaacgacaccctcaagtccaacgacttcctcaacatgacctccctgaccgactccgacggcaaggcccacgagtacttcggcggtcagaagttcaacgaggagctggccaaggccgcagccaatgtgtccaccggctacaagttcctgcccttcgaggtctacgctcgcggcaagttcggcgactacgccggcgatgcctacaccggcaagaccacgctctccgatgccgtggcttcctggcagaaggacctgcaggattacgccaagcagcagggctaccaggtgaagtaacggcaatcacagcagacttcctcctgtggtttctgtagcgggaggttgcgataacaggatcgggcactcttcggagcgcccgattttcttatgccatgggagcagtggcgcgcggattgcgataccaagatggcgtgttgccgaagaatgtgtataataaaagatgttatcgcaaccatagctacaaagtggcgaaacaaagccgttttgtgactactgaaccatagagtgatggttcacgatagcatgacgacgaggagagttgccatgctgttgtggtgacaatcactgcagaccgccgaaaggcgatccaaggaaggagaacagaacgatgaagttcaccgttgctaagaaggccattgcacttaccggtgcggttgccatgctgggttccgttgccgcctgcggttccgacaccgccagtggcaagccggctcaagataaggacgttaccgaaatcaccgtgtgggcttgggagcccacgctgacccaggttgccaaggacttcaccaagaagaccggcatcaaggtcgatctcaagaacgtcggcaccaacaccaaggaatacacccagcttgataacgccatcgaggctggctccggtgctccggacgtcgctcaggttgagtactacgccatcccgcagtacgccatcaagggcaacctgctggacatcaccgacaagacctccggctactccgacttctacaccccgggcccgtgggcttccgtgcagttcgccggcaaggtctacggcctgccgatggattccggcccaatggccttcttctacaacaaggaggtcttcgacaaggccggtgttgacgccgagcagatcaagacctgggatcagtactacgacgccgccaagaagattcacgccctcggcgacaactactacatcacctccgacaccggcgacgccggcttcttcgactccatgacctggctggccggcgccaagccgttccagacctcctccgatggttccgaagtcaccgtcaacctgaccgaggacaagggcgtcaagaccttcaccgacttctggcagaagctgctggacgagggcctgctcgacaccaagaccgctggctggtctgaggactggttcaagggcatggtcgacggcaccatcgcctccctgttcactggcgcttggatgcctgccaacctggccaactccgctgctgacggcgctggcaagtggcgtgtgacccagatgccgaccgctgacggctccaccaccaactccgagaacggtggttcttcgctggctgtgctcgcctccaccaagaaggctgacgctgcttaccagttcatcgagtacgccaaccacggcgacggcgtggccacccgtgtggccggcggtgcattcccggctgacaaggcctccatggagtccgactccttcaagaacaccaccactgtgaagaacgccgatggcgaggacgttgactacttcggtggtcagaagtacaacgaggttctggctcaggctgctgagaacgtgtcctccgactaccagttcctgccctacgaggtcaaggcccgcaccatcttcggcgactaccttggcaagtcctacaccggcgaccagaagctgactgacggtatcgccgcttggcagaaggcactgcaggattacggcaaggatcagggcttcaccgtgaagtaagccttgaaccctcgctgagactgcctagctaatctcacctgatacacaaagccccgtgacgaatcccgtcatggggcttttaccgttttaagccccgcctagtacactcgtcaccatgcgagtgatcggacagcgaatcaaaagaatggcaaccatagcagtgactgccatcctttccgtatccctggcctcgtgcgggcaggccacggacgacaaccgtacggagatcagcgtatggagctgggaaccgagcatgggggaggtcatccgccgtttcgaaaaagccaatccggacatccgcgtgaaatggaccaatatctccggctacggcaatcttaataccgccattcaagacggttacggcacgccggacgtggctcaaatcgaatactatgcactgttgcagtacgcggtctccggccaattgcttgatctgaccgacaaaatcggctcggattattccaacttctttaccctcggcacatggtcgtccgtgcagctcgccggccgtacctatggactgcccatggattcgggcccgatgggcttcttctacaacgaagacgtgttccgccaagccggcgtggacgccaccaagatcaagacttgggatgactattacgaggccgccgaaaagctcaaggagatcggcgcgtatatcgccgccgactcgggcgacggcagtttctatgacgcgatggtctggctcgccggtggtcagccgttccacacgtcggccgacggcaaaaccgtgaccatcgatttggatgaggatgccggcacccaacggttcaccgaattctggcagaaaatgatcgatgaggggcttgttgacaccacctccgccacatggtcggatcggtggaaaagcagagtgggcgccggcaccatcgcctccgtgttctctggggcttggatgccgtcgttgctgctgtccaatgtgccgggcgcggccggtctgtggcgcgtggctcccatgcccacctatggtgggcagcctgccaacgccgaaaatggcggctcggcgctgaccgtgttgcaactgacccgtaagccggatgcggcctatcgtttcgtggactttgtggcgcatgacgcccaaggcattagcgcgcgtgtagacggcggtgccttcccggccgattacgccaccctgaattccgctgattttctggataaaaccacgattaccaatgaccgtggcattgaaatcccgtatttcggcgggcagaagttcaaccgggtactgtcggaggccgccgaggatgtgtcggtcggataccagtatctgccattcgaagtgtatgcgcgcagtgacttcaaatcgacggtgggccaggcatacgagtggtccggcagtttccacgcctatcagcagcgacaggaagccattgagatgggcatgaaggacgaggaaggcaacccgctcgaaccattggagaagcccggcaagaaagtcagtctctccgacggcctggcccgatggcagaaagacctccgagaatacggcctcaatcagggctttacgattaagtagggttttgagtaggtttttcggggagggacggaatcgactgcgctatgcgcggccgatgcctgcacaccgcgttacttcacattgcgcgagtagatgtatgccatgcctttgaagatcaggtctgaatcgtagacgtcgatcatgtcggtgtcgttcttgaaaatgcggctgagccctcccgtggctaccacttggaacggctcatcgatttccttgcggaactgctgaatcgtgcgctcaatgccaccgaggaacgtgtaatacagtccggcctgcatagcagtgcgcgtattggtggccagaatcgactgcggttgcgtgatctccacttccggcagctgggcggtctgcccccacaacgcctcggccccggtgcggatgcccgtggtgatgaagccggagcgaatcgtgccggaaccgtccacatagttgaacgtggtggcggtgccgaagtcggccaccagcaccgggccgccataggtgtggtaggcgccggcgcagtcggcgatgcagtcagagcccaaggttttggggtcgtcgagacgaatgttcatgccggtcttgacgccagggcccaccaccatcggttccaatccgaggaatttgatcagcgaggcgcggaaggaatacatcaccttcggcaccaccgagcagacgatcacatcgtccacatcgtcggccgtgtaatcgctcaaagccaggaactgcgtgatcatcagaccgtattcgtctgaggtgtgcgtcgccttggtggtgatgcggtaggagccgacgatgcggtcgccctccagaaaaccgatcacgatattcgtattgccgatatcgaccgccatcagcatgggtcaggcctccttgttctcgtcatcgacattgctcgcgccgccggaacgcaacgctgcgagccgcagcaacagtcgttgcgcaagcacggttttgtccatcttgtcccaatgctcgatcttcggggtgccggcatcctccgctccggacgtgagcacggtgacaacgttggtgtcggtgccgaacccggcaccggcgtcgcgcagattgttggccaccagcatgtcgcaatgcttggacgtcagcttcttctccgcattacgaatcagatgctcggtctccatcgcgaatccgcacaggatctgcgagccgtcgtcgcgcttgcgttcgccggcccacgccagaatatccgggttggaaaccagctccacggtgatgctgctgcggccggccttcttgattttctccggcgcaatctcggccacgcggaaatcgcccacggcggcggccataatcgtgatatccgccgccgggaaggcgtcggccaccgcatcgaacatatcctgcgcggtcgtgacgcgcaccacatccaccgcatcgggcgcggtcaaggcgactggaccggagaccaacgttacgtcggcaccaaattcggctgcggccgaggcaatcgcataccccatcttgccggtggaatggttcgtcagatagcggaccgggtctagcggctcctgcgttggcccggcagtgactagcacgcgcagccccttgagcggggaagatgagggagcctggtcatcctgcgcatccgccagcagccgagcggccacttcctcgatgcgcgccggctcttccatacggcctcgtcccacgtcgccgcaagccagattgccttcctccggctccacaatctgccagcccaattcggcgcaggttttcagattgcgctgcgtggccggattgttgtacatatgcacgttcatcgccgggcataggatcttcggcccctcataggccagaatggtggacgtcagcgtatcgttcgccaatccacaggcgatgcgggcgatgacgtcggcgctcgccggggccaccaccagcagattggcccaggccgcatcggccacatgattgatggtcgttggcacggtcggattggccgtcacgtcgccgtgcgcggccggataagcggggaacatcgtggtacgggtgggttgatgggtcagtgaggtgaatgtcaggggagtgacgaagccttcggccgctgtggtttcgataacccgcacctcgtggccggccttggtccaatcggatgccagatgacaggccttgaacgcggcgatgctgccggtgacgcccagaagaatatgtgccatagctgcctcccggccttatgccaaggccgcacgtgtgcccacgccagcgcttcccgcgtcgttgcccgacgatgcgccgcgtgttgtggtcgccgcggaccctccgtcggcgccgcaatccagtatagccattgcctccggcgtgtccggggatatagtagaacgtggtgatcgacccgaatgggcggtcaaccacgcaagataacaacgaaaccatattcgggcgtaagcatgcccgaatacatcagggagtatccatgtcccagaacaatggtgtgcacggcgagtccggcgcaaccgaagacaggaacatcgacggcgcgaatcaagccgccagcaccgacgcgagcctgaacgcgcgcgcgaaatcatcagacaagaagaacggcggcccgaaatggtggctgtggacgctgatcgcggtcgtcgtggccgcggcgctcatcgtgggcgtcaccgtcttcggagggaaaagcaagggcaaggacgcgaacgcctccggctcggccagccgatccgataccgtggccgtcggcctcaaactcgccccggtcaatcttgacatccgccaccagtcgggttcggcccttgagcagatcctcatcggcaacgtgtacgagggcctcgtctcgcgcggctcggacaacaaggtccaccccggtctggccaagagctgggagatctccaaggatggcctgacctacacgttccacctcaacgagaagatgaacttctccaacggcgacaagctcgacgccgaggatgtggcgtggtccatcaacgagctcaaggcccagaagtactacgactacgagcaggtcaagagcctggacaaggccgaggccgtggacgccaacacggtcaggctcaccctctccgcgcccaactcgaacatgctgtggtacctcaccagccgtcccggcctggtctacgacaaggacgccacctgggatcagaagaacggcgcgttgggctcgggtccgtacaccgtggtctccttcgacccgaacgacaagatcgtgctcaaggcgaaccccaagtattggggcaccgagcacaaggcgaggaccgagaacgtgatcgtccggttcctgccggacgagaacgccagcatcaacgccctcaagagcggcgacgtgcaggtgctttcgcccatctccgccacccttgccgatccgttccgcaaggatccgaactatgtggtcaagtccggtgacggttccgacaagttcgtgctcgccttcaacatggccaacgacaagctctccgacaagcgtgtccgccaggccatccgatacgccatcgaccataagcagatcatcgcctcgcgcggcggcgtggatgcccccctcggcggtccgatccccaaggtcgatcccggttacgaggatctgagcggcctgtacccgcatgacgtggccaaggccaagaagctcatggagcaggccggatactccgagtcgaagccgctggacctgaccctcacctacgccaacgtgtacggcaccgagctcggcgaccagctcaagagccagctcaagcccatcggcatcgacctgaagatcaactacgtggagttctccacttggctgcaggacgtgcacgccaacggcaactacgatctttcgctcgtggaccatgccgaaagccacgacttctacggatggaccacgccgagctactacttccactacgacaacaaggacgtgcaggccctgtacgccaaggcgctggaggccacctccgatgacgaggcctcgaagtatctggccaaggccgcgaagatcgtctccgaggacgcgccggccgactggctgttcagctggaaggtcaccgtcgcctacgccaagggcgtggacggcttcccgcagaacctgagccagaccgtgctgcccctctggcggatcacctacaccaagtagtcccggaacccatcggtcgggcgcggcgcgggagtgattccgtggcgcgcccgaccgtggacggcccatccggccggtgacgccacgggcggtggcgagggaatcgataagggaggcgttatgcggttcttgatgcaacgcttgctgctgttcgcggcggcgctgttcggcatctcggtgctggtgttcgcgatgctgcgcatcctgccgggcgacgtggcggtcgtgatggccggcatgaacgcatcgccggcgcgtgtggcggccctgcgcgccgaattcggccttgaccggccgtatgtcgtgcagtatctcgactgggccggagggctgctgcacggcgacctcggcgtgtcggcgctgaccggtcgggcggtgacctcccaggtcggccaacgtgcgacgatcacgttcccgctgatcgtgatgagtctggccatcgcgctcaccctcggcttgtccatgggcgccgccgccgtgatctcccggtcgccggccgtgcgcggtttcctgcgcgtgctgtccatcgtgggcggcgccgtgccggccctgtggagcggcctgctgctcatcctcctgttcgcacggggcgtgggccttgtcggtctgctgccctcgcaggggttccccgccgctgggtggggcgctcccgggcgggcggtctcgtccctgatcctgccggcgctggccaccggattcgtgtccggtgcgggcatcatgcgttacacgcgctccattctggaaggcatcgccgatgagggagggccgatcgatatggccatgtcctgcggcatgacccgcacccaggcgttggtgcgcgtgggattgcggttggcggctccgcaactcgtctcggtggtgggactggcgttcgcctcgatgatcaccggcgtgatggtggtggagaacctgttcgccctgcccggtctgggcgccctgttggtgggcgatgtcggcaaccgcgatctggtggccgtgcaaagcgagttgttcctgctcgccgcgttcttcctgctgatcggcttggcggtggatctgctgcacgcgctgcttgacccgcgtctggccgccggaaaggaggaatgatggttgatcgcaatggtcgatggcgtcgttcgggcgtggttctgggcaccatctggtcccgtggcaccggccgctactcgctgatcgtgctggggttgtggatggtcgtcgccctggtgtcgttgttctggaccccgcagtcgctgctggccaccgacggctaccacgtgtgggataagccgtcgtccgcgcattggctgggcaccgacggcaccggcgcggatgtgctgagctggctgatggccggatcgcgcacgaaccttgccatcgccctgctcaccgttgtctgctcggctgccatcggcatcctactggtcgggctgatggtcgcccgttcttcggcgctcgcttcggcgtcggtcgccgtggtcgacgcgctgatttccatccccaccgtgctcatcgccctgctgctcgccgtgccgttcggcgcatccgcggccgtggtgatcggcgcgtgctccatcggctacgggctgcatctggcgcgcgtcgcccgtccggccgccctgctcgccgcccgctcgggatacgtgcagtcggcccgggcgaacggcgccagcgggttcggcgtactggtcagacacatcgtgccgaacatcacgccggtgctgatggtgcaatcgtcgatgtcggcgggcacctcggtgctggccgaggcgggcctgacctatctgggcgtgggcgtcggcgcgggggtgccgagctggggccattcgctggccacctcggtcaaactcatcaacgtgtttccgttgacggtggtgtggcccggtctgatcgtcaccctggtggtggtcgcgctgaacctgttcggcgacgcgttgcgcgacgccaccgacccggtggctaatcccgcgttgcggcagatgactgtgcccggtgcggttgtgccggtggctaggggagccggtgacactgcggcgcagtccgcagtggcagcgccgaaggagacggatgatgagcgttgaaattcacgggctgaatattgctatcggcggcaaaccgattgtcacggatgtcgatctgtccatcgcggacggcgaacgggtcggcctgatcggttcctccggctccggcaaatcgatgatcgccaagtcattgctcggcctgttgccgcgcgaggccgtgctgtccggcaccatcacgatgggagaaaccgccatcctgtccggagaaaccgccgagtcgcggcatgggcaggaagatgactcaggatctgacgaagaacgcggcgcggcagataggcaccatgttgccggtgaacgcagggttgccacctcgggccacgattccgctgcgtacgccgacgagcatacgcttgccgatctgcgcggccggtatgtgggtacggtattccagaatccggcccatgcgctgaacccggtgatgaccgtggcgcagcagattgcgttgccgttgagactgcactacgatctgaccaaggccgaacgtgctgagcgagtgaataccatgctggacaaggtcggactggaccgtgacgtggccggcacatacccgcacgaactgtccggcggccaacagcagcgcgtgggcatcgccacggcgctgatcacctcaccgcgattcatcatcgcggacgaacccaccaccgcgctcgactccatcacgcaacgtcagatcgtggacctgctgacctcgttggtggacgacgccggcgcatccatgctgttcatcacccatgatttctccgtactcgcgcgtgccaccacccgctgctacgtgctggacgccggccgcatcgtcgaatccggacccaccgccgacctgcttgctgcaccgaccacgccgcaagcccaacgcttggtcgccgccgcccaaaccctcaccctccacacccccaaggaggattcgcatgagtaacagcagtgtgccactcctctccgcccactccatcaccaaatccttcggaccgcgcaccgcacgccaccaagtcctcttcgacgtctccgccgacgtccacgccggcgaatgtctggccgtgatcggcggctccggatccggcaaatccacgctgacccgcattatgctgggcttggaatccgcggactccggcagcgtggaatacgagagccaatccattgtcggcggccgaaaatcgccgggattcgcgaccctgcgccgcgaatcgggactggtgttccaggacccgttctcatcactcgacccgcgttggcaagtcgccaaatcggtggctgaaccgctgagtctgcagcgacgtgatctgaacaacaccgatatcgacgagcgggtggtcgcggctctgaccatggcgggtcttgaaccggcggacttcctgaaccggtacccaatcgacctgtctggtggccaggcgcagcgcgtggtcatcgcccgcgccatcatcaacgagcccaaggtaatcctcgccgacgaaccaatgagcgccatcgacgtggccgcgcgcatccagatcctcgacgccttcgccgctatccgtgaggcccggccgagcaccgccatcatcatggtctcccacgatctcggcgtggtgcagcacatcgccaaccgcatcctcgtgcttcacgacgggcgcgtcgaagagacgggtcccaccgccgaagtgctcggcaacccccaatccgattacacccgtcagctcatcgaggcagcctcgttatagacctttttggctcccctccctgaggggagccggccgccggcgacacgcgcttgtcgcgggttgtgctatggtgtgaggcatgcagattatctcatgttgttgtcgctaaccgacgcccctgggcgagcggtcagtgacgcataacttgagatggagcattcgaatcgcggcgaatctgccgcatacttttcatgtatccgatggcacaagcgtaatcgtgtaatgcgcgagccgtggttaacatgaaaaaccggttcacttttcggattcaccgtacagtgagcgggaatactcgattttcaaaccaaagccacagtccattcgtctgggaacgtcggttcacgaacgcaacgcagcaaaacccccacaaccccagcaacgaaggacttcacatgaccatccacaacagcctcgcagaactcatcggcaacaccccgctcgtcaagctcaaccacatcccgcaggcggccggcgtcaaagccaccatcgccgtcaaagtcgaatacttcaaccccggcggctcctccaaggaccgcatcgccgagcgcatcatcgacgccgccgaacagtccggccagctgaagcccggcggcgtgatcgtcgagcccacctcgggcaacaccggcgtcggcctggccctggtcgcccagcagcgcggctaccgcacgattttcaccctgccggacaaggtttccgaatccaagcgcgcggtgctgcgcgcctacggtgccgaagtcatcgtcacaccgaccgacgccggcccggacgacccgcgctcctactaccaggtcgccgaacgactggccaacacgattcccggcggcttccgcccgaaccagtacgacaacccgaacggcccgctgagccactactacaccaccggccccgagatctgggaggctacggaccacaaggtcacgcacttcgtggccggcattggcaccggcggcaccatctccggcaccggcaagtacctcaaggaagcctccaacggcgcggtcaaggtcatcggctccgacccggaaggctccatctactccgcttcctcacgcgacgaagtccaccagtacgacatcgagggcgtgggggaggacttctaccccaaggctttcgaccggaacatcaccgacgacatcgtgcgcgtatccgacgccgaagcctttgaaatgacccgccgtctggccggcgaggaggcgttgctggtcggcggctcgtccggcatggccgtggccagcgccatcaagtacgcgcttgccaatgatttggacgagaaccagattgtggtggtgctcgcccctgattccggccgcagttatctggagaagatcttcaatgacgactggatgcgtgccaacggctacggcgacatcgtggaacacaccggcaagccctccctcgccgagcagtaccttaacggaactccctctgatgagggagctgcggatggactccataactagctatcaaaagaatcaataccaacatccgcactaactaaccgcacctgttttaccttcgaatacggaacaatcccgaaaggaacccaatatcatgtccgctgaatacaacgccaagttcgccaacaccgacatcgccactcgcgccatccacgccggccaggagcccgacccgaccaccggtgcggtcgtcacgccgatcttcgccacctccactttcaagcaggatggcgtgttgggcctcaggggaggccacgactactctcgctccatcaaccccactcgcaccagcttcgacgagcagctcgccgccgtggaaggcggcaagtacgcgctgagcttctcctcgggcttggccgccatcgacgtgctgctgcgctccaccatcaagcccggcgacaacatcctgctcggcaacgatgtgtacggtggcacctaccgcctgctctccaaggtgttcgtgccgtggggtgtgggcctcgacgtggtggacatcaccgatctgaaagccgtggaaaccgcattggcctccaagcactaccagtatgtgtgggtcgagaccccgtccaacccgctgctcaacatcaccgacatcgcggccaccgccgaagttgcccacaagtacggcaccaaggtcgcggtcgacaacaccttcgcctcgcccgcccttcagcacccgctggccgatggcgccgatgtggtggtctactccaccaccaagtacatcggcggccactccgacgtggtcggcggtgccgtggtggtcaacgacgaggagacccgtgagaaggtcgccttcctgcagaacgccgccggcgcagtgccctccccgttcgactcctggctggacatccgcggcctgaagaccctggatctgcgcgtcaagcgccacagtgccaacgccctgaaggtggccgaatggctcgaatcccagccctctgatgtgattgagcgcgtctggtacccgggcctcgagtcccacccgggtcatgaaatcgccgcccgccagatgcacggcggcttcggcggcatcgtctccgtgcagctcgcggccggtgccgaggcggccaagcacttcgtggaccacacgcagatcttcacactggccgaatcgctcggcggtgtggaaagcctcatcgaggtgcccgccgccatgacccacgcctccgtggccggcaccaccctgcaggtgcccgccaatctggtgcgtatttcggtcggtatcgagaacgccgacgaccttatcgccgatctcaagcaggcgttggatcgtatctgaccgtactgacggtactggtgacaccgtattgacggtgccaccacgcttatcggcggactcgctatcgattggtacctacaaaaaatccccggcccacaagggtcggggattttccgttatcgattgaacatggatcgaatcagctggcgttgccgccctgccatccggtggcatccgcaccagccgggcgcaacgcctgaccggaagtcggtgtggtgccatcaacgaccacacgagtgccgatggtggcaaagtcgtacatccacttggcgtcggccacctgcatgttgatgcagccgtgcgagcctgggataccctgctgcacatagatggggtgctcgccccacatgtatgcaggaacaccgtgcagggcctcgccgccgttatagtaggaaatccacggcgtgcctggctggttgtagccttcgccaaccatggtctgcgattcgtacttgagatacacgtagaacgtgccggtatcagacagcatggaaccatcggcggtgggcttgccagaagcgatgttgaacttcttgaccaccgtggtgccctgatatgcagtggcagtctggttcgtcagatcaacatgaacccacttatcgccatttgccgtatcgaagttatgaggcacctcgacctgcttgacatcatatgggctgtctttcacagccacagtggaatcagtggactggttctgctcgatggcggtagccagacgttcgggggcgtccccggcaccagtcacttcaataccatccacaccgagtgtcttatcggcaccaatttccacgccgccttcgtctttcggcgtgatgtagacttcgcgtgtcaccttgggaacagtcagttctttggttacgctgtcactggtgacgtacttggtgatggcatcgcggtcgactaccagactcatggtgccacccgccttattcaccgtgggcttgaggaatgaggcaatggtatcggccgggatggtgacgctcttgttcacgccgttgtccacggtcagtttgaggccaagcttggcattggcgtcaaactgtgtttgctgtgcgctcgcgtcatcaatcggattctttgcagtctgtagcttgaccggcaccgtcgcattttcgcccggggtcgcgacggcctccttgactgcagcattgacaacattgatatccgggcccttgccatcctgacccgcggtgtaatcgaactgcttggtgctcttgttgtagacaacggtggcaatctgcgctcggtcggcctcatcgaccaggccggcggtgacgaattgttcggcagtctctttgtccctggtggcggtcagagcgatatgcggctgatcgaaaatattgagcttggccacgtcgccggtcttcgcgttcaacagcgcatctacggttttatccgtgtcgacggtgacgccaaggtccttcagcgaggctttgacgctgttgccttcggcggtgaacgtcactgtggtgttattcagctgctgcttcacagtattcgcaagttcttcgcgggtctggcccatgacagagacattgcccaaatgaacaccgggcgcagccttgtcttggaagtaccaacgtccgacgaagaaataggctattaatgcggcaagcaacactgcaaatatggttatgatggcaatccgtgcggccttgccatgtgatttagcggtggtagatgccatgacatgttcacccacataggctgtattgtcggcatggttattggtgccattgtcgctttgctgtggcgtggcggtacctgtggccgcggctgcgaacagcccatcggcggccacaggctgcagcaccgccgtctcctgatcgtcaggagaggagaaggaaaatgtatcgttggccataaaatgccccgtcttagttctctcaaagcggcatatcgtgtgatatgccgggaataacgttcctcgacgcataataatacggaagggctacgtacatcgttacgaggtattccgttatacgatgaaatccatccgcggtcggcctacactggtcgtttatgacagcacatcaggcggcgctggaggcgctcacacgatacttcggctatgactcgtttaggcccggacagcaaggaattgtcgaggctttgcttgccggacacgatgtcttgggcgtgatgcccaccggcgcaggcaagtccgtgtgctaccagattcccgccgcgctcagcccgggtgtgactctggtcgtatctcccttgatttccctgatgcgcgaccaggtcgatgcgctgaacgacctcggtctgccggccgcgttcatcaacaccactcaaactcccgacgagcaggcgatggtgttcgcccaagccgccgccgggcagatcaaactgctgtacgtggccccggaacgcttggaaaccgggcgattccgcgactttgccgcccgtacgccgatctcgctgatcgccgtggacgaagcccactgcgtctcccagtggggtcaggacttccgctcgtcgtacttaggtatcggcgatttcatcgccgggctgccgcagcgtccaccggtgggtgcgttcaccgccaccgccaccgaacgggtgcgccgggacatcgtgggactgctgggattgcggaatccggccgtcaccgtcaccggattcgaccggccgaacctgtattttgatgtggtcaaactggagaccaaatacaaggccgcatgggtggcgcggtatgtggccgaccatccggacgaatccggcatcgtctactgcgccacccgcaagaccaccgaagcgctcgccgacacgctgaaccagatggggcatccggccgtcgcctaccatggcggcatgtcgccggacgcgcgtgaggtggcccagcgcgacttcatcaccgacaaggtgccggtggtcgtagccaccaacgccttcggcatgggcatcgataagtccaacgtgcgttacgtcatccaccacaatctacccgaatccattgaagcctactatcaggaggccggccgcgcgggccgtgacggcgagcccagccgatgcacgctgctgtggaatgagtcagacatcgtcacccggcgtcggttgctggataacgattatgagaacgagcgattgactcccgaagagcaggagatcgttcgccagtccaagcgccggctgctggacggtatggtcggctactgccgcaccaccgactgcctgcaccggtatatgacccggtatttcggtcaggaattgtcgccgaatgctggttccgcggcgggtgaagacattgcggcggactcttcgcagtccggcagatgcggtgcctgctcgaactgcgagagcacgttcgagaccatcgacgtgacccgcgtggcgcaggcgatcagccgttgcgtgcatgacgtggggcagcgcgtcggttccggcaagatcgtcaagatcctgcgcggttcgcgggcacaggatctggcatggctgaacccggagcggatgcccaccttcggcatgctcaaggacgtgaacgaggctcgcgtgcgcgacgtgttgagccagatggccacggacgggtacctgtcaatcgccgaagggcgtatgccaatcgtcatgttcggtgcgcgggcggccgaaaccgccgctcccgacttccactatgagatcaaacgggtggaacgcaagtcggcggcggccggttccggtcggagcgggggagtggctgatactgccgattccgccaatgttcccggcgatgcgctgggctcgtatatcccggacgatgacgaggaatcgctgttccagaagctacgcgaactgcgacgcaccatcgcccaggaaatcggcaagccgccgtacatcgtgttctccgacaagaccttgcgcgacatggcccgcatcaagccggttaccaacgcgcaatttctggcggtcaacggcgtcggtcaacacaagctcgacctctacggccagcgcttcatgcaaaccatcgcctcgttcaatgccgggagtgcgtcataacaatctcctatagcgaaccgcggagtatttgcgggcgttcttgggctggcgcgactacgatgactgttcgatacttcatgaccgaacactcagcaagtagaaaggcaacagcatggcagaagacaaggccgaaaagcccgtcgtcgaatcattccagcttgatcacaccaaggtcaaggcgccgtacgtgcgttacatcgacaccgaaacgggccctcacggcgacgtgatctccaattacgatctgcgcctgacccagccgaacgagcaggccatccccaccggcggcctgcacaccatcgaacacaccatcgccgtgctgctgcgtgaacgcattcccggctacatcgactgctcgccgttcggctgccgcaccggcttccacctgctgacctggggcacccactccaccgaggatgtggccaaggcgttgaaggaatcgttggagttcatcgcatacaaggccacatgggatgacgtgcccgccaccaccgagaagagctgcggcaactatcgcgaccacagcctgttcaccgccaaggaatgggccaagcagatccttgaggaaggcatcagctccgacccgttcgagcgcaaggtcgtctgattcatctgattcgattcaattctgattcggctcccgctggcgggagccgggggcgaagccgactgagggtggctgtcctcaactcggctggactgtccggctcctgcggacggaagccattgtttattagtgtccgtcatgcaacgcggaggggatttcttgtgcctacggcatggtaggttggccgtcagttaatcgccggtcaccgtgccggcaacccggcatgtcggagaggtgagaagtgactcagtcgaacgctgcaaacaaggcgacaggccgccgtttccgccacgccaccatgcgcgatctgccgcagatgcataaaatctacgcacgcgcacgcgcgttgatggccgccaacggcaaccccacccagtggggcaacgaatttccgcgtgaatcggtgattgaagacgacatcgccaaccagcgtacgatgctgctggtcgacacctgcaatggccacgaacgcattctggcccagttcgccctgtgcccgggcaaggatccgacctacgccaaaatcgacggcgcctggctggacaacgacacctatgtgaccatccaccgcatcgccgcatccggtctggtgcgccacgcggcccgcgactgcatcaggtgggccctgaagcactacggcaacgtgcgcgccgacacccaccccaataacaaggccatgcagcacgtgctcgaaagctccggcttcgcccgttgcggcctgatccagctgctcgaccggccggtcgacaccaccagaatcgcctatcagcgccacgagtggtgagtgtggctgccggctgatgtgctcgtttctgcaccgtcatcggtttctgacggtagaatcagtgtgtgagaagaacacgttgggtcgggggcgtcgtggcggtgcttgcggctgtcatgctgtcgtcgtgcggcggcgtccagtcgaatcccggggtaacacaccgttgccaatccattcaccgcgcaggtgaatggagaagacatggcgatgcctgtcggccgatggagccccatcggccgacaggcatcgaggaagtcaccgtggccggcggaacgcgcggtcgccgattggggcgaatggcttgtgtggttcgctttggtaccagtaggcgaccgtggccacgtcgtcctgtcgttcgaagttgccggcttcctcggtgccgatctgctgccattcgacgcgcaggtctcgctcgaagtagatcgggtcggggatgtgccaacggtataggccgcgggtcacgggggtggcagtgtcccagtaggcgctttcgcgtccggcgaggttctgcgagtagaacgggaagccgaggtatgggccggtgaaggtgcgctcgtacatgcggccgtgttcgtcgaattcggcgaagctccaggcgccgccgaagtagtcctcggcgccggtgctgcaccaggtggggtatttgccgtcgccgtcgatgtagaacttgaattcgccttcgccccaccagcggctttcgagcgcggtgagcgccaggtaggtgccgacgtaggtgccgtgtccttcgacgccatcgagcaccacgtagtcgtgggcgagttcggtgacgcgttggcggcgccactgcgcgtggaagcgcatcgtgtcggccgacagccggtcgtattcggtgtagtcgatttggtagaagaacgcgggcacgtcctcgttgtggtcgttgcgcagcacgatgcgcgcgtgttcgaacggcatggcgaagtagcagttgaagccccggttcgggttgaccatgacgggaattgagttgatggtgcaggactgggcgtgtccgcagcagaagaagtcgccgatcgggcattgcaccgagggggagtcctcgccgtcccagtagaattccaggatcaggttgcgtagcacgtcggggccggtgggggaggtgcggtcggttaccgtcatccagatgtgacgaatcacgccggggccctcgacgtccatcaatgtcaccgattccccggacctcaccgtgctgatgcaggggcttcccttgcgggaggggcccaacgcgctggccgccatggccgcgcggcccttgccgccgtccgggttttcggcgttgatgcagcgggtgcggccgggggtcctcatggccacggcatccaaggcgccttgtccgagccccggcgcggggttcgctgtggtgaatgcgtcgagcatgatgcttacttcctttcctgtcgcaggcccgtcccgccacggcgttttgtctggggtgagccgggctgctggggggggtatttcacggcaccggcggtgatgccctgggagagcttgcgctggggtagtgcccgatatcttgcgcactttggtcttcgcccgtccctgtggcgatgatcggttcgcttcccatacggtctcaccgagtcttgacatgtcgaggtagcggcgcgtcgaccactcgttcgacgtgacatagcgcacgcgtgcgcagacgagcatcaacgcgctgcgttcgtcggggaagctgccgaccatgcgcgtgcgccgtctgatttcgcggttgcgggggttgaccctggcgaggacgttgcgctcgaagcggaccatgcaccgctggtagcgggcatcgcgttcaaggcctcctcgacgctttttctgaccatacggtccagggtggtctccgacatggcctcatatcgcaaaaaccgtacgctgaaagtaactcagcgtacggttttcacgaaagcagctatcggctatcggtcagccgatagacctcagtcctcagtcgcagcgaccttggtgtcagccccggccttctgctcaaggccgagcttggagcgcttgcggctgtagccgaagtacacgatcaggcccagaccgaaccagatggcgaaacgcacccaggtctcccagttgagaccggcgatgagcacgaagcagaatacgatggccagaatcggggtgaccggcacgcccggcgcgcggaagccgcggggcgcattcggctgggtcttgcgcatccatagaataccggccgacacgatgatgaacgcggacagcgtaccgatgttcaccagctcgaacagcacgttgatgttgatgaagccgccggcgaacgcggtcagcagaccgaagaaccaggtgcccttgaacggggtgcggtacttctcgtgcacgtggccgaagaacttcgggaacaggccgtcacggctcatggcgtagcagatacgggactggccgtacagctgtacgagcatcaccgtggtcatgccgatgagggcgcctaggttcacgatcaccgcgagccagttcatgccggtctccagaatcacgccggccactggggcgtcgatgtacttggcgaactccttgtagggcaccacgccggtcatgatcatggtcatgacgatgtagagcacggtggaaacggccagggacagcaggatgccgcgcggcagtgtcttgttcgggttgatggtctcctcggcggaagaggacacggcgtcgaatccgatgaagctgaagaacacgatggatgcggccggcacaatgccgtacggctgggtggagccgggctggaaagtgtagatgccgtacggggagaacggctgccagttggacggcttgacataccacacggcgcacacgatgaacagcacgatgatggcgagcttgatgagcaccatcacgtcattggtgcgcttggtctggttgatgccgatcgagagcacccacgtgatgatcagcacgatgacgaaaccgggcaggttgaagtaggtggtgacgtccgggttggtgccgtaggcggcggtcagctcgaccggcagatgcagtccgaagccttccaacaacttgttgaagtatcccgaccagccggcggacacggtggccgccagcagagcatactccagaatcagatcccagccgatcacgaaggcgatgagctcgccgaacgccagataggcataggagtaggccgagccggacaccggtgccatggcggcgaactcggcgtagcacaggccggcgaaaccgcagcagacggcggccagcaggaacgatacggacagggccgggccggcggtgagcgcgcccttgccggtgagcacgaagataccggtgccgatgatcgcgccgataccgagcatcgtcagatcgaaggtgcgcatcgtgcgcttcaggggagtggattcggcgacaagctgatccacgcttttcttacgaaacagatccatgttcttctctcatgaaacttaagatatggggctagaccggacggatttccgggatcccggcacgcctcaacgccgggaatcaaaggcggcttccgagaaaccgcatatcggtcattagtgtacgactgccgggcgaaaacaaacgattgtgaccacacgtcacattcctgcgcaacaataggtgcctatgagcatgaacgcagcacccgaaatcgcattctcgtccgagcagggcaaggccaactatgcggccacccgccgccaataccccgcacaggccatcgtgaacctcaaaaccatgcgcgacaacatggcccacctggtctccgtggtcggcggcccgaactccggcacggcggtgatgggcgtggtcaaggccgacgcatacggccacggactgctgcccgccgcactggccgcgctcgccggcggcgcgacatggctcggcaccgcgcaatcgcatgaagcactgctgctgcgcaaactcggcatcggccccgaccgttgccgcattctgacttgggtctacaacggcaccgaagtgccattcgatgagctgatcgctgccgatatcgacgtatcggtcggctccctgcccggcatcgatgccgtggccgccgccgcacgcaagctcggcaagcccgcccgcgtacacgtcaaggtcgattccggcttcggtcgcaacggtttcacgccggctggattcgacgccgcgctcgccaaactcgtgccgctcgccaaagagggcgtgttgcatattgtgggtcagtggagccatctcgccgtggccgattcgcccgatgtgcccgaattcgtgtcctccaccgaccgccagatcgaaacattcaaggacttcacgcgccgcatggaacaggccggcattccgccggagatccgtcacctggccaacacggcggccactttggaccgcccggagattcacttcgaacttacccgccccggcatcggcctgtacggctacgagcccgatcccgcgatgggcaccccgcgcgactggcatctgaccccggccatgcgcctgcaggcgcagctcggcacggtcaaggatgtggaggccggccatggcatctcttatggccgcacctacctgaccccggacaacacctcgaccgctattgtgccgctgggctacgccgatggcatccaccgctccgcttccggtttcgatatggaaggtgccaagcacgtggagaagccgggcggcccggtgcgcatcatgaccactgaaggttcgaagctctaccgcgtgtgcggccgcgtgtgcatggaccagttcatcgtggacctgcacggatccgccgccgaactcggcgttcacgagggcgacacggtcgaactgttcggcccgggccgcggcgaggattacgttgagcctaccgccgacgattgggcccgcgccgccgacaccatcagctacgagatcttcacctgcctgcgcaaccgcatcccgcgcctttacgagcatgccgccgaagtactgcccgccgccgacctcgccaagctcgaccccgccacgctgctataaggtgcattaccgccatacggtggcaccccgtaatcccttcttcccgaatatgtaccactgacatgtgctgagcgtcacatattcgggaaatcggccccaatctcccgaatatgtgccgttgagttgacgtcagtggcacatattcgggaagtcgggattactgcggccgatatgtgtgcctatgcttggcatatggaaacaacgttggatggggaacaggtgctgagcgatgagggctacaacgccttcgacgaggagcgatgggcacccgagccgcccaaatccaagtcgcgcacggctttcgaacgcgatcgcgcgcgactgattcattcgtccgctttgcggcgtttgggcgcgaaaagccagattctgattgccggtaccgacgatttcgcccgcacccgactgacgcatacgctggaagtcgcccagatcggtcgccaaatcggcgcattgctcggctgcgatccggacgtggtcgactgcgcctgtctggcccacgaccttggtcacccgccgttcgggcacaacggggagcgtgcgctcgccgacatcgccagcaatatcggcggcttcgagggcaacgcacagaccatgcgtatcctgacccggctcgaatccaagatctttcacccggacgggcgttcggccggtgtgaacctgacccgtgcggccttggatgcggccgtcaaatacccgtggaccttggccgaagccgaccaacaccccaagggggagcggtcgaagaagttctgcgtctacccggatgacgaaccggtgttccgctggctcaaaatcggcgcgccccaggccgccaaacccatggaatgccagatcatggacctttcggatgatgtcgcctactccgtgcatgatgtcgaggattccatcgccaccggcgcgttcgatccgattgtgctcgccgatccgaagatgctggaccacatcatcgagcagacgcgcgcatggtatggggcgaagtgggatgccgacaagctgctggccgcgttcatgcgattgcgccgagagcatttgttccctgcacatttcaatggttcgcgcgaatcgttggcacagctcaagaacatcacgtccgatttgatcggtcgcttctgctggtcggtggaaaccgccacgcgcgacacgtatgggcccgggccgttgacccggtattccgcgaacatcgtgattcccgaggacacgaattacgagatcgtggcgttgaagggcatcgccgtgtacttcgtcatggcgcctcgcgagcgcgagccattccatcaggaggagctcaagatcgtatcggatttggtcgatgtgcttatggccgattcgccgctcccatccgacgctttggaaagccagttcctggccgattggaatgaatccaccaatgacaacgagcgcctgcgcgtcgccatcgatcaggtcgcaagcctgaccgacaactccgctctggccctgcactccatcttgtgctgagggcgtgttggacgggtgcttccctcagtctcgctgcgcgagccagctcccctcgggtgaggggagctgtcgctgtaggcgactgaagggagtttcgcggaagaaatgataaccgacggtaaaaatttaccgtgtctcaggtgaggcggtactctagagacttatggtcggaatgattaagaaagaagatgtcgagaaggtgcgcgccgccgcggacctgtatgacatcgtatctgcgaccgtaacgcttaagccctccggcaccggcaccttcgtgggcctgtgcccgttccacgacgagaaaaccggcagcttcaacgtgcgtccctcgctcggcgtgtggcactgcttcggctgtggcttgggtggcgacgtattcaaatacgtcgaacaatccgaaaacatcgacttccgcgaagccgtggaactgctcgccgacaagtaccatatcgagctgcactacgagaacagcggcaacggcccgaaccgcgagaacaccggctccaagcgcacccgactgctggaagcctgcgaggaagcccagcgtttcttcgtctcccaaatcctgaccaaggaggcattgcccgcccgcaaactgctcggcggccgcaacttctcccaagccgactgcgaacgtttcggctgcggctacgcgccccaaggttgggataatcttgtgcgccacttggcctccaaggggtttacgcagaaggaaatcctcgacgcgggcttggcccgtcaaggccagcgcggcatctatgactatttccgcggccgcgtgacctggcccatccgcgattcgaccggccgcacgctcggcttcggtgcgcgcaaattatacgaagacgaccagatcgccgccaaatacatcaacacgccggacacgcagctctaccgcaaaacccaggtgctttacggcatcgatttggcgaaatccgccatcgtcaagaagcggcaggtcgtgatcgtcgaaggctatacggacgtgatggccatgcacttggccggcatcgacaccgccatcgccacgtgcggcacggcgttcggcgccgagcacgccaagattgtgcgccgcctgatcgccgacgattcgctgggcgcggtccagctggtcgggccgttgaaggtcaaggaccagccgttgagctcgcgcatcgtgttcacgttcgatggtgacgccgccggccagaaagccgcgctgcatgccttcggccttgattcggccttcctctcccaaaccttcgtggccgtggccgacgacaatctcgacccgtgcgacctgcgcatcgagcgaggcaacgaagcagtgcgttcgctgatcgcccgcgccaaaccgttgtatgacttcgtgatcgacgccgccatcagccggttcgacctgacctacacgcccggccaagtgggtgcgatgaaagccgtggccccgctggtggcgcagattcgcgaccgctccctatgggacgcttacgcgcgcaagtccgcgggccgtatcggcgtggatcttgaggtgatgcgccgcgaggtgatgaacgcgcgccggcagatgcatgtacgcgatgaggacgcctacgcgcccaaacgtcgattcgagcgtgacgagccgcgtgtggaacccggcaccaacccatacgccaatccggccacgcgcaaggcgttggagcgccgtgacgccgccgaacaggcatatttcaagatcgacgacgccgtattcatcgccgaacagcagttcatggccgtgctgattcaggtgccgcgcgccatcgaccgcaccatgttcgggcagctgaccatcgaccatttcatgacttcggtgttccgcaccctgttccaggcgatcgcggccgccggcggactgccatccgacgataccccgcaggggctgtggatgcacaacctcaccaaggccggcgggccgatgctgaatcaggtgatcaacgagctggccgtcatgccgttgccactgcctggcgacgacggtggtaatggcgcacaacctccgcagtcgaacgtgcctgggggagtcggcggtggtgcggccgccgtgcagctacgccctgccacgccggaagagcagcgctatgccactgagcttctcacccgattgttggacatgggcttcatgcgccagatcggtttggccaaacgccgcatggcccagctgcccgacggcgaagagaagataaccctcctcggccagatcacccgcatggaaaccgcccgtaaagacctccaagcccaaatctacggcaacaccgtcggctaatacctcccactgattgcgcgcatcttcgaatacgtgccggatgcataaggccatacaaccggttgccggattggatgggtgcagaagttgcggattggccccatccaaattggactggtttgggtgggccaatccaatccgttcaataatgaagcgcgataccaagcagcgtcgaacgaagggaaactcatgacgcagaatcgtgcggaactcaaccgtaatctggcccagatgctcaagggtggcgtgatcatggacgtcaccacgcccgaacaggcgaaaatcgcgcaggatgccggcgcgtgcgcggtgatggcgctggagcgcatccccgctgacattcgtgccgccggcggcgtctcccgtatgagcgatacggccatgatcaagggcattcaggaagctgtctcgattccggtcatggccaaggtgcgcatcggccacatcgccgaagcccgcattctgcaggccatcgacatcgactacatcgacgaatccgaagtgctttccccggccgacgacgtgtaccacatcgacaagaaccagttcgacgtgccgttcgtgtgcggcgcgaagaacctgggcgaggcgctgcgccgcatcgccgagggtgctgccatgattcgtaccaagggcgagcccggcaccggcgacgtgattcaggccgtgcgccacatgcgcaccatgaacaagcagatccgcgagctcgtggccttgcgcgacgacgaggtctacgaggccgccaagcagctggccgtgccctacgacctggccaagtacgtgcacgacaacggccgtctgcccgtcgtgaacttcgccgccggtggcgtggccaccccggccgacgccgccctgatgatggagctcggtgccgaaggcgtgttcgtgggctccggcatcttcaagtccggcgacccggccaagcgcgccgccgccatcgtcaaggccaccgccaactggcaggacgccgatctgctcgccaagctgtccgaaaacctcggcgaagccatggtcggcatcaacgaggacgagattcagaccatcatggccgctcgcggcgagtgagtgcattaccttggctcccctctttgaggggagccaagaaagggtgacgctcccgccagcgggagtcaaggcccaaggagacaacatggttgtagctgttgaatatatttccaaagaagagtccgcggacgtcgaaaacgtcaagcacggcgtgaccggcatcctggccgtacaaggcgcattcgccgaacatgcggcggtgctggacaagctcggtgcgccgtggaaactgctgcgcgcggccgaggatttcgatgaatccatcgaccgcgtgattctgcctggcggcgaatccactacacagggcaagctcctgcattcgaccggactgttcgagccgatcgccgcccacatcaaggcaggcaaaccggtattcggcacttgcgccggcatgattctgctggctaaaaagctcgacaatgacgacaatgtctactttggcgcgctcgacgccgtcgtacgccgcaacgcctatggtcgtcagctcggtagtttccaggccaccgccgattttggtgcagcggatgatccgcagcgtatcacggacttcccactggtattcatccgcggaccgtacgtggtgtcggtcggccctgaggccacggtcgaaaccgaagtcgatggccacgtggtgggcttgcgtcaaggcaatatcctggccaccgccttccacccggaactcacggacgatacccgcatccacgagctcttcctgtcgctgtagtcgattcgtctgccgctagactggtatccgactgacgaatcaaggagacgatctgccatgcagcttgagctgaatcgacgcagcaaggtgccgatgtaccggcagctggctgccgagctgcgtgaacagatcgtctccggcgcgatggccgagggctaccgcctgcctcccgaacgcgagctgtcctcgcgtctcgaagtcaatcgcaccacggtgttgcaggcgtatcagcagctcaaggacgaaggtcttatcgcctccaaagtcggcaaaggcacgttcgtgctgccggctgcctccgcaagccgaacaccgcacacgtcaaacagtgacttcgggaatgcaataacgcgaacaacacgatcatcggcagaaatgggaacatcgcaagcctcctcttccggcgacgtagaacgtgctacctccactggtttcttgacgacggaccagggcagcagctctgcggcggtccatacgattcgtgaaagccgttcggttcagggcccggagccaaccgtcgtgcgtccgccatggtcggtgttgttctctgattattccaaccggtttacctaccatgacatcgcctcggccgagcgggcgcagcgcggcgacaccattattgacttcgccaccggttcgccgaacccggcggatatcccggacgatctgctgcgcaaggtgagcatcgaggcgttcgaatcgcgggaattcgacggccaaccggaatcacctatcgagggattcgaagagttgcgtgcgctgcttgccgaacatatgcgcgcacgaggcgtacaatgcggcgtccgcaacgtgatggtgctctccggctccgagcagggcatcgacctcatcgtgcgcgcgttcatcaaccccggcgactgcgtgctggtcgaacaatccacgttcttcccggcattgcagaccttccgctcggcggatgcgcgcatcatcggcgttccagtggacgagcacggtatgcgtacagacctgttggacggctattgcgcgcgattccggcccaagctcatttacaccgtcccgacgttccaaaaccccaccggtaccacgctgccgcccgaacgacgcagcgaactcatcgacgtggcgcggcgctatcagtgtctgatcgtggaagacgatgcttacggcgatttgtggtacggcgggggatcatccgacgcacatcgccccataccgcttaagggcatggagaatgcgggatacgtgatgtatttgtcgacgttctcgaaaaccgtcacttcgggcctgcgcacgggatgggttgtggccgacccgcatgtgattaaccggctggcggctctgcggcgcatggtcgaccagcatacgagcacgtcatcgcagcgcatctgcctggaactgcttaaagaaggccgcgtcgccgaacatttgcgcggtttgatcaaggcttaccgcattcgacgagatgcagcaatcgcagcattggagcggtatgcgccggatgaagtgtattggaccatgcctgcaggcggctactatatttgggtttccttaccggacggcgtgcgctctctggatgtattggaatcctgccgttcccaaggcgtcacgttcatgccgggcagcgtgttcgacgttgacgaaatggatgattcccacatccgtctcaactttgtgcgcccgaatgctgctgacattgataccggcattcgaatcattggcgagacgatagcacagatgtagccaagtgactggctcattgcggttgtcgagtttttttgatggctgcatacccacatcgatgggtgcgttcgacgaatgaataagcgaggaagccatcatcagttcgctgtggcatgcgcatagcgttgtcgggcgagcggggcagaccacgtggtcgttgcgtgatctggccgatcgagccggcatcgcattgcccctggcgtagtggcgaggtggcgcagtaacgagtcatgccatcgcgagccgatgatgcgaaatgcggaaccggtcgcggccatcaacgggtatcatacatgcggaagcaacgatacgttggcgtcagcacatccatctgactccagaaagggacacgatatgaccacatcctccgtttcgccggtgaccactgaactggcgggcagcgaaaccggcatcacgcttgtcattcacgccggagcgggcagtcgtggcaagcacagcacgcctgaacgcatcgcccaggtcgaacttgatctgcagcgcgccctcgatgccggataccagttgttggaatccggagcaccggcgcatgaggctgtggtcgccgccatccacgtcatggaagacgctcccgaattcaacgccggccgtggtgccgccctgaccagcgatggcatcgcccagatggacgcctgcctgatgaccggcgatggcgaggtcggtgcggtcaccggcgtaagcaccgtgaagaacccgatcgatgcggcgcgtgccgtcaaagagcagaccaagcatgtgctgttcgcggacccgaccgatgccgagatcgccgattggggcgtcgcgaccgaaagcaacgagtacttcatcactgaacagcgtcgtcagtccttggccgaggctcagtccggtggcgatgagtgggagaagcatggcaccatcggcgccgtggcgcgcgatgccgaaggcaatatcgccgccggcacgtccactggcggcatcaccaaccagatgcacggtcgtgtgggcgattcgccgctgcccggttgcggcacgttcgccaaccagtccacggtggcggtgtcctgcaccggcatcggcgaggcattcatcaaggtggtcgccgcccatcaggtgtcggatcgtgtgcgtttcgccggcgagaacgtcgaggatgccgcgacggccactttggacgaagtcgccgcgcatcatggcgatggcggcatgatcgttctgccggcggtcggccgtggcgtggtcgcctacaacagcgagatgatgaacttcggataccgtagcgcgcaaggcggtaaggtgcagggctgattgcccccccctgtattgcggcatatatcataatggccggtgtactgcggattcttggtaaggaatccgcagcacaccggccattcatgtatgcggcaagtgccgccgatcagtgcggcagtgcgcgctacttggtgatcgtgttgtacgtgggcatgttcgtgtaatcgaactgcacgttcttcacgttctgtgcagacacggcggcgaaacgtttgaccgggaatactggggtaatacgcaacttcatcgctcctcttcctcgaatgaaactatgttccattggtttgagccagccacgtacggtattcgtgtctggcctgccacacaatgatgcagccgtatatacgggcacagcatggcgcggcagttcattgtatggaagacatgcaaactcaatgtttccttgtccaaataaaaaaacgagcgcggctgatgtgcggcaccggtccaaaaactcatgtccgccagcgcaacgcgactacgtaccttatgccggtctgcgcgtagaatagaacggctgcgatattgggttattcacggaggaatggatgcgacgctggctgatcaatgtagccaaaaatgagacgattctcatcgtcgccgcaatactcgccctgatttcgtgtttcattgtgccgccggacgccgattacaaaagctacattcacgccagcaccatcagccagctcatctgcctgatgattgtggtgtgcggattccagcgtatcggcgtgttccgcatcatcggttcgcgattgctggagaaggtcagcaccatgcgcggactggtcattacgcttgtcgctttgacgttcttttccgcgatgttcatcaccaatgacgttgcgctggtcacgtttgtgccgttcgcggtggccgtgctcatcatggctgggcaagaggataagaccatcctcgtggtcacgctgatgaccattggcgcgaacgtgggcagcatgctcaccccgatcggcaacgcgcacaacctgtatctcaaagccctgaccggcatgccgaccatggaattcctcggcatcatggcaccgtattccggcacggcggccgtgttgctggtcatcgtgatttccgtggtgtttggcggcaaaccggtcggcgacctgggcgacctcgaaaccggcgtgctggctcccgagcgcaacaaacaccagcccgacgagattcgtatcaccggctacggcgccggttatggcggctggcgcaccatcgtctactcgctgctgttcatcgtctgcctactggccgtctccgacgtgattcccctgtgggtgatgtgcgtgatcgtggtcgtcgtgttcctgttcaccgatcggcgcgtattcaaatacgtggattggggactgccgctcaccttctgcatgttcttcatcttcatcggcaacatgaagcgcgtgcccgaattctacgaactggcgcgctcgctggtcggcggccatccgctggaggtggcggtcggctccagccaggtcatcagcaatgtgcccaccacgattctgctttccggcttctgcgaccaatggcgcgatctgatcattggcaccaatttgggcggcatgggtacgctcatcgcctcgatggcctcgcttatttcttacaagaacgtcgtgcgccaatacccgcacaagaaaggccggtatctggccgtctactccgccgtcaacgttctgtttttggccgtattgctgaccttgagctggatcatcgagccgagtctctgagccgccgttgtgggttgggccggtctaccgcgcgtatacggtgggggagccggtcagtcggctcatggccgactgcgggatgtcgtggatgcggccgatggtggcatccagcgtggatacgccggctgcgccgtctgtgttggctgtgttggctgcagaggtgatgctggatacgccgactgcggacgatgatacggccgcaaccatcggctgacgataggcgttggagttgcgggccagccgggcgagcgcagggcgctgcctgcggaacagattgataaacataccgcatactccttcatcgttggccggcggtcttctggccgccgtggtttccatcctgccctcccgtgcttgtattcgctatgggggatagcccctattattccctgaatctgcacgattccccctcatccttgagggtgattctaacggcaaaggaatcggcctaatggccgatgtcaatcagcgcgaagccaccagcgtgacgctgtacggcttgatcttcatcgccagcaatgaagacggcgacggcaatgtgtaagcccgacgttccggcacaatcgcccccgaagcctcgccgcggtatccgatagtggttttcgccgtcggactggcgcttaacgtcgtcacctccaaacgcaccggtcgcgatggcgaggcgcccagcccggccagtccgcgcgcgatttccaacgtcacatccaccggggaatcggaggtattgacgattttgatgtaacggcaggcgtcatccccgtcatgcccggtggcactgacatacagatgtttggcggggcgtgacgcggtctgctcgatggacacggcatatgtcgtgtcgcccagatgcgtggaaaacagccgctccacctcataattcaccgtggggttcacatgcgccggattgagttcgataagattctgcgcccaccccttagccgggatatgcgcgagcagcggtgcataggaggtcatgcgcaccacgtcggaattgcgctcgcaaccggtcaggaacgcggcctcgccgagtgccgacttccacgtgttcgcgccctgttcggtctgcggttggccggcaaaatagccgttggctgaatattcgccgaaatagacgccggcgccgcaacgcgggtaagcgtcgaatcgtgacgcttggtatgcaaaccattcgggggagtggtaagaatgttcgtcgacgataatcgcgtcaccggtggcggaatcatgtgccccggaattggttgcggccaacgctcgcgcatggtcccagctgcgtttcatcgtcggctggaaggggaacagtccggcgctcatcacacacagcatatccgggtatcgttcgtgaatggcctcgctgatcatgtcaaacttggccacgtagtcagccccgaagttttcgttgcccacgccgatcatgtccaggccgaacggttctggatggcccatatcacgccggaccgcggcccacgagctggactccggatcgccattcgcgaattcgatgaggtccaggtagtcctgaatcacattgttgcggaaagtggccgaattgatatccatgtggcgcggatcgcggccgggcgactggcatgcgatgccggcgaacagggtaggcagcggcttggccttgaggtcctcgcacaggcagaaatactcgtagaagccgatctgatagctctgcgaatagctggaaccatccggcatcttgaacgaccacatcgaatactgttggcgtcgcgcggccagggagccgacggtatccttccagcgatattcattgccgggcgtcacaccttcgacgatgcagccgccggggaatcgcagaaacgctggatgcaacgcctgaatggtttccaccagatcgcggcgcagcttgccgtaacgccatttcgggtcgcccgcgccccaatagtccgcatccatgaactgcaccagatccagatcgaacgtggtgcgttcgccggcgtcaatggtgatacgcagcttgccgtaatcggtgttcaggccggttacgtcggcgttgaaccggtaccagccgtcacggccgatggcgatggcaccatccgacgaatccggactgatcgaaacgccggaatcctgcgcattggcgccatcgtcctgcctcagaccggtctcttccgtatcgtcaagcggatctgcgtccacgatatacgacaatcgagtggtgctggtgagcggcagaccgtacctatcgaccacgccgacggacagcttggcccgcccatgaaccggacgtaccgcgagactgacggaataggtgtggtcggcgacgatggagaacgcgggctcgcccccgttgtcgccgcctccgttatagccgaggttttccagatatgcagggccggtttcggaaggaacatcggacgtgatgcgagcgtatcggctatgtgcgtgaattggcggggcggggcagtcggtggtcacccgctggccgtgaatcccgcgtatctcactgccgaggctggcggcggaacagttgatgaaatcccagaaacgcagggaatcggcctgtgtacgccatcgttcggcgccggccatacgccacgtgtgatggtcgagatagacgccgtcaaaactgtagttgttcaccatgttggcgttcagcccgccatccgcaccatggttgatgtcctcgaagaacacgccgtacagccgcccgcttgtgtgatgggtggggcttcccacgctaatccgcaccatggttttgattgtagagggaatggagcggaaaggtaaacggaagagttcgctcaccgttcatgttgcggtcaatccaagtcgactgttcgccggtatacagccggtaccctcgaaacaggaatggaaaatacggacgactaggagcgcggctgtgcaatcctcggtgggaatacgtgagcgcatcgaccacgtgtatccgtcgctgcgtccggcggagcgcgccgtggcccagtatattcgggatcatatcgaggaggcggccgacctgaccgtcggccagatggccgacatcgcccacgtcagccagccgacggtgattcgtttcgcccgcaagctcggtttcggcggttaccgtgaactgcggtacgtgttgcgccatccggccgccgagcacaaagtgaccttcaatccgttggctggattcgatctgaatccgtgggatggcgaagatgagattcccggcaaagcggcctatggcgcgaaggcgctgatcgatgagctgcacagtgcgttggaccccaaggcctatcgcaaggcggtcgccctactcgccgaatcggagttcatcgatattttcggcgtggagaactcgttgacaccggcgatggatctgttcaccaagctcggctacctgggactgacatgccgtctcaataccgacgcttacctgcagcagatcggtgccgggcacctgccccacggcgctgtggccgtcgccttctcccattcgggcagttcggcggatacggtcaaagcgttgcgattggcgaaatcgcatggcgcgaaaaccatcgccataaccaatgccatcggcgcgccgctggccagctgggccgacgtgacgttgctgacgggtcgtgactcgcacacgatctatggcaatgcgattttctcgcgcgtggccgataccgcgctcgtggacatgctgtacatgggcgtgattctgtccgactacggccggttctccaccgcgctcgacgaatccggtcgcatgattcgcgatcgcgtattcgagaactgagctgctgctttatcgcgccttgggctgtattgctctggtcgttgccgctttgttgccgctctggtcgttaccgtcctgaggcatgtgccagcgaatacgtagtggacttggcgtgcgtatgacgttcgatcttgccgctcaactccagctggtccaagagctgcgtcatctgatccttgttcaggccaagcgctttctgcatggttttacggctgagcttcacgccgcggaacgcgaggaaattgagcgtgaactgctccaacgtttgaggcgacggttccagcgttgccgtatcgagcgggcgggtactgacctggtcgtcaccgtccgggcgctcgccgaatccgctgccgagaatcagcgtctgcaatggcgcgcagccgatgatgcgtgcgccggccaaagcatctgcggcgttatccgtcatgcgctgaatcgtggggaatgaatacattttggcgcgctgcgcttcgtcagtggtgctgggcgcggcggaagcatcggtatcggtccgatgcaaggatgcggcctcggccgagaccgggatgggcagcaccatcgccaccgaagtggggcctacgcgcagttgcggactgaccgcgctctgcgcgtaggcgtccataatgcgttgaataccggtaccgcagttctcgcagaggcccaaatcggcgaacaattcagccaaacgcggggtgcgtggctggcatacgccgttgagcagatcgttgatttccaaaccatcggtcaggccgccgagcgagacgatttccaggcgggaatcgaagatattgatcagtgtggggccggagtacgtgtaatcgcgatgttccagtgcgttgaccaatgcttcgcgcagggctatggccgggtgttggccggattcgttgatgccgttcagcagggcgctggcttggtcgagctggcgcagcaccgagccggtgaatgtgtgacgttcgcgaatggcgtttttgccattgccctcgaaaatggtggccttgataacgaacgggcattggtcggacagcagggtggcaagcgacgattcggtggtgctggtcaaagtgttgttggcgccggtgttgatgatgctgccggcgggggcattgccggcatcggcagagacggatgcagccatgttggtcacaaccgggctttcccaatccctgccttcactggcaaaacgaccctgtgcgtatgtgaaagtgagctcaccactatcgcctgcgacggtctggcccgatgcggcgtgatctacgttgctctccgttgtccccatatcgccgatggtaccggtgcaagccgacgttacgccgaggtgttttacacccctacggctagacttacacgagtttggccccgtagctcagctggatagagcatgtgacttctaatctcaaggtcgacggttcgagcccgtccggggtcacgatgcaataaacccttggtccctcatcgtctgtgggggccaggggcttttgagtattatgccggtctgggtccgtctggagcctgaactgtcgaccttgagattagaagtcacatgctcatcatcaccatccgggaacacccttaaggggtgcggctcctgcataacggctatactctgacttgagatgtgctggataataaccagctatcgcgcgtccgccaatggcgacgaacgaaggaagaagggcccgtgccgcgagcaatcatcgaggtaagaaacctacgcaaggaataccccgtcgaggatgagacggtggtggcgcttgaccgtgtcaatctcagtatcccgcaaggccagatctgctgcattttcggcgagtccggctccggcaaatccacgctgctcaaccagttggccggcatggaaaaaccgacgcgcggcggcgtgcgcatcggcggtgtgcccgtcagtaggctcgacgagcgtgagctggcggccttccgccagaagcatctcggcttcgtattccagtcgtacaacctgctacccaatctgaccgcgctcgaaaacgtggcaatgccgctgatgttccgcggagtgcccaaggaacagcgcgagcgcgcggcgcgtggcgtactcaaacgagtcgggctcggccatcgtctcagccattacccgcgccagatgtcgggcggccaacagcagcgcgtcggcatcgcccgggcgtttgtgaccaagcccgaggtggtgttcgccgatgagccgaccggcaaccttgactccaaaaccaaaaccgaggtcatgacgatgatctgcgcattcgcccatgacttcaaccagaccatcgtgctggtcacacacgatccgcagatggcctcatacgccgaccgcattgtcaccttgctcgatggccgcatcaccggcgatcggctcaacaccgacctttcccgcccaactgttccgtccacgccgtccgccccaaccacaccgtccacgccgtccacgccgtccgccccaaccacaccaactacaccgtccacgccgtccgcccatagaccccaaggaactgaccgatgaagcacctctcccaccacaccatcgccatcatcgtcgcgttgctctccacgctgtcactggcacttgccgtcatctcccttccgcatcaggcgtacgcggtcgacggcacagacggcacaagcggcacgaacagtacgtctcagggaagcgacggcgattccgcgccgatcgccggaccggtgcccaacatcatcatcaccaacttcgcgtatggaggtgattccgtggccgccggatccaaattcaatctcgacttcaccttccagaacaaggggcaggtggcggtgacgaacatggtcgtcaccgtggacggcggcgagagcttcgccatcgcgggaggcacgaacacgttctacgtcgacgcgctgtgggccggttacgccatgacgcaaagcgtgccgatgcaggcgctcgcctccgcgaaaagcggtgcccagtccgtgaccgtgaacttccgatacgagtatgtggacgccagcgcccgctcctcaagccagtctgacgtcaagatttccgtgccgatcagtcagcctgaccggttcgaaatcagtgatcccgtagtgcccgaccaggtgatcgccggccaggaaaacacggtcacgatggaatatgtgaacaagggcaaaggcgatatcgccaacgtcgaggccacgatggagggcgaaggtttcgatgccacgatgaaaacccagtacgtgggcaatgtggcttccggcgccaccggcacgattggttacgccttcacaccgcacgcgtcaggcgagctgaagaccacgctcaaagtcacgtacgaggattccgacggacagaccaagaccaaggaattcccgctcaccatacccgtaaccgatatgcagccgatggatgattccggcatggccgatccgaacatggaccagaacgccaatcagggattgccggtgctggtgtatgtggtcatcgtcgtgatcgccgtggtcattatcgtggtgattgtgctgctggtgcgtcgccggcgcaagcagaaggccaagaagaacgatattgatgaggactgggatgattggtccgaaggcaaggatgataagaccgataccggcgtgacggatggtgctgcggcagacaccgctcctatcacaccagtcaccccagcctcatcagtcgcaccagccggctcatcccacaaggcctgaaaggcccgaccatgcgattcggcgacatactgcggctctgcagacaaaacctatggcgacgtaaatcccgtacgattctgaccgtgctgggcgttatcgtcggctgctgctcgattgtgctcatggtctctttgggccaaggcattaacgagcagaacgagaagatgctcaaatcgatgggcgatctgtccatcgtcaccgtgtacaccaacggttatgccggtccgatggacgatggcggctcgtccaagatgggcgataccaagctcgacgacaaggccgtggaatccttccgcgcgatgagcggcgtatccggcgtgacgccgatgatgaacttcccttataacgtgacggccagagccggcgcgggcggccgttacatctatgattacgtgcagatcatgggcatcgacatgacccagctcgaccagatgggctacaagctcgtcggtggcgagaaaccggtcaaaaaagaccaggtgcttgccggcgaatggttcgcctatggtttcatggacaccctgaagaacggcgaacaacgcaccagcacacgtggcggtcagtattcctcatgcacgtttaaccaggccaccggccagtgcgaggaagatcaggacgaagatccgttcttcgacccgctcaccacgcaaattagtctgaccaccggcaccaattatcagggcgaccagtacagcatgaacatgtacggcggcggtggcggcggcacaggcggcgcgggcggcgcaagcggcagcgccgcgggtcagtcggaaaacgtcaccctcgatgtgcgggcttccggcattgtggcgggcgactacaacaagggctatgccacctccgacggtctggtcatggatttgcaggcgttgaaggaactggccgccaaagtcgatccagccgccgccaaaaaagccaccgcctatgatcaagtgctggtcaaggccgccgacctcaagtccgtgcccgaagtcgaatcacagatcaaagcgttgggctacgagacctcctcctatgaagacatgcgtaagtcgttggaagaacagtcgcgcgcgattcagctgattctgggcggtatcggtgcggtttcgctgttggttgcggccatcggcatcgccaacacaatggttatgtccgtaaccgagcgcacgcgcgagatcggcattatgaaggcgcttggctgctacgttcgtgacattcgcgtcatgtttcttgcggaggccggcgcgatcggattcttcggcggattgatcggctgcgtgctgagcggactgatatcgctgggcatcaacgttgtcggcgcgttgtatgcgggcggcatgagcggcggcatgagcggcggcatgtctggcggtatggtcagcggtgccggcgggggctccggcgacggtaccggtggcggaacatctatctggaccatactctggcaggcgatagttggtggcgagaatgtgacccgttattcggtgattccgtggtggctgttcctgttcgccgtgctgttttccacgctgatcggcttgctgttcggcttcggcccggccaataaagccgttaaaatcccggccctagacgccatcaaaaacaacgagtgatcgcctctgtcacctgctccaccgttagtccataacgttcgttcagttcgcccagcgacacgcggtcggtaaattccttggctgcgccgaagttcagcacacgaggattacggctgccgtccgagacatgatgattcgcatagtatgcggtcactttctcgccccagccgccttcaagctgcccgtcttcaagggtgatgacctgctggtggccatcacgcaacgactccagtacgtctgaatccagcgacgtgcactggcgcgggtcgataaccgttgccgtgatgccataatcgtcagacaatgcggcggccgtctgctccgccaacggatacgcattgcccagtccgatgatcgcgacttgcgagcccgtctgattgacccgccaatccagcatgtgacgcgcaccggcatgctgagccgttacgctaacggtcccgcggactgttgcggcagatatgcccccgctggcggagctggcggaggctggcagcgaagctgactgggggcggtcagcaatctgcccacccgtcaccggcagcagcgtcgcatcccgttccgccgccagaatcgcctcgcccggcacccgaatcaccgtcggaccagcaggggcgtccgccgaaccggccggcgcggtagcccatgccaaatcagccagatagtcgcgagccgaagtcggcaccagcatcgtaacccctggaatattggagaacatcgtcacgtcatatgcgccggaatgcgtattgtccgaaccggacaagccgcccagaaaatcaagtaccgtgactcgcgaacggttcaggctcatctcctggaagaactggtcgtacgcgcgctggaagaaggacgccgtggtggccaccaccggcgtgccacccgcccgtgcgatgccggcggcatacgccacggcatgcgattcggtgatgcccgtgtctacataatgtgcgcccgcgcgctctcggaactcatgggtgatgccgttcgagcccggcgtggcgggggagatgaccacgagtcctggctcggcggcgaaacgcggttcgagcgcggccatcgccattttgccgtaatgcttgcgcggatcgtccggcttgccgattgcggcatccggattctgccaatgcgaggcctcgcactggccttcatgtggttcatggtcggacaggttgcagtgatccgaatgccacggctcgctgtgcagcacgttgctcgtggggcgcacgccggtgtcggagactgccggatccagctcatggacgttaccggccgaggccgaggatgcgccggccgcgtgaccagcgccgtcatatcccgcacccttcagcgtgtggatatggaccaccaccggatgatcgatgccgcgcacctcttcgaaggccgagaccagcgcggcgacgtcgttgccggattccacgtaccggtaatccaggccgaacgcgttgaacaggttcggctgggcggtgccgccggatgcgcgcagacgggcgagcgggccgtacatgccgccgaaatcgccggcgatcgacatctcgttgtcgttgaacacgatgatgaggttgccgccttgctcggccgcgttgttcagcccctcgaacgccacgccagaactgagcgaaccgtccccgatcacggcgaccacattgccgatgccgctgcccggcccctccatgtcgcgggttttcgccaggccgcaggccaaggagatcgaagtgccggtgtgcccgagcacgaactggtcgtgttcgctttcgtcggggttggtgaagccggtcacctcgccgaaacggttcggatccatatacgcgccggcccgtcctgtaagcatcttatggacgtagctttggtgggacacgtcgaacacgatacggtcacgcggcgaatcgaatacgcgatgcagggccaccgtggcctccaccatgcccagattggaaccgatatgaccgccgtgttggtggccatatgccagcagcgtggcgcgaatctcgcggcacagttcggcgagctcgtcgggggcaagggccttgacatcggccgggctggcaatgcggctcagcagatgggagtcgtcgccatgggaaggggtaatgctcggggggatgtcgtgaaggcgcgcggtcccctcggcggcaccggagacggcgaaggaatcgcttgaatcaaatccgtttcctgacccgttgcgcataccctcgaatctcccttcgctaatctttccgaagttgaatgctaacgcccggcattgtccgaggtccacatgacgaagcaatgcccccaacatctccgtaaatgggtgattcgttcgctgcgcgatgtgggacaatgaatgcggtaattccttttgataccaaggagcgcgcaatgaaggccgtatacgcatccaccgtcaaccatgacgatccgcttgccgcgttggcggtgggcgagcagcccgaaccccaggcccgcccgttctggtcgaccgtttcggtgcgcgcggtgaccgtaaaccatcacgacgtctggtcgctacagggtgtgggtctcgccgccgaacagacgccgatgatcctgggcaccgatgccgtgggcattctggacgaggacatccccggcaagcatgggctcaaggccggcagcgaagtggtgctgtacacgttcgtcggcaccgatggcgcgggcgtggccccgggcgagcgccgcacgatcctctccgagaaataccccggcacgatggccgagaagactgccgtgccgtccgccaacgtgttcgccaagcccgcaaacctcaccacggctgaggcggccgcactcggcaccagctggctgaccgcctactcgctgttgttcgatgccgccggcatcaagccgggcgactccgtgctcattcagggcgcgggcggcggcgtgtccactgcggccatccagctcgcccatgccgccggtctggaagtgttcgtcacctcgcgtgacgcggacaagcgcgccaaagcgctgaaacttggcgcgaacgccgcgctggagaccggtgcgcggttgccgcgcaaggtcgatgcggtgatcgagtccgtgggggcggccacatggggccattcaatgaaatccgtgcgccccggcggcaccatcgccatctgcggcgccaccaccggcgaccagcccggtgccgaactgacccggttgttcttccaggacatccgcgtgcagggctgcaccatgggttcgcgcgaggatttcgcacgattgctgcgcttcgtggagcacgccgacctgcatccggtgatcgattccgtggtcagcgggttggaccgcgcccccgaggcgttcgccagaatgatcgccggcgacatgttcggcaagatcgttattgagctgtaagcctcacagaattatgtattgagaacgattcgctgcgtggcttaactccgctatcaggagtacagtgggccttattctcaataactagggagtaaatgataatggcaaatgaatccaagcccgaagtcgcagtggtcatgggatcggccagcgactgggagaccatgaagcgcgcctgcgatattctcgaccagttcggcgtcgcctaccacaagcaggtcatctccgcgcaccgcacgcccgagctcatggccgagttcgcgcacaacgcccgcgccaatggcctgaaggtcattatcgccggtgccggcggtgccgcccacctgccgggcatgatcgccgcgcagaccacactgcccgtaatcggcgtgcccgtgcgctcccacgccctgtccggctgggattcgctgctgtccatcgtgcagatgcccggcggcattccggtggccaccaccgccgtcggcaactccggtgccaccaacgccggcctgctcgccgtgcagatgctctcctccttcgagcccgaactggccgacaagcttgaggattaccgtaacgaactgaaagaaaaggtggctgaatccaatgcccagcttgtctgaggaaacaggcggtcgtgtttcgatgctgatgccgggatcgaccatcggcatcatcggcggcggccagctcggccgcatgatggctttgtccgcccgctacatgggcttccgcgtcggcgtgcttgacccgacgccgaactgcccgaccggtcaggtggccgacttccagatcaccgccgaatacgatgacaaaaccgccatccatgatctggccgtgcagtccgacgtgctcacctacgagttcgagaacgtggacgccgatgccatcgacgaggtgcgcggcatcaccgccaccccgcagggcaccgacctgctgcgcgtgacccagcaccgcgtgcatgagaagcggttcatcaacgaccacggcaccgccaccgcaccgtggcgcgccgtcaacaacttcgatgagcttgacgccgcattggatgatattcattatccggccgtgctgaagaccgtgtccggcggctacgacggccacggtcagctcgtgctgcgttccgacgccgacttggagaagatccgctcccgttccgaccgtggtggcggcttcccgccgagcatcctggaaggcttcgtcgacttcgcattcgaggcttcgatcctggtctccggcaacggcaaggacttcgtcaccttccccatcgtgcgtaacgagcaccgcaacaacatcctgcacatgaccatcgcccccgccgaagtgtccgaacatgtggctcgcgaagcgcatgaactggcgattcgcttggccaagggcttcgaactggctggcacgctggccatcgaactgttcatcaccaaggacgatcaggtcatcgtcaacgagctcgccccgcgcccgcacaactccggccactacaccatcgaggcctgctcgatggaccagttcgacgcccacatccgcggcatcgccggctggcccatgcccaagcccaagctgctctcgccggccgtgatggtcaacgtactcggccagcatgtggagccgacgcgcgcgctgatcgccacccacccggagtggaatgtgcacgactacggcaaggccgaagtgcgccacgaccgcaagatgggccacatcaccgtgctcaccgacaaccctgatgccacggttgctgaccttgaggccaccggctgctgggacgacctgaaaaagaaggcgtgaccttatcgatggttgaacatatcgaacgccagaccaagcagaaggacgcgattcgcgccgccttggccgactgtgaggagttcatctccgctcaggacctgcaccgcaggctggaggacgaaggctcgaaaatcggcttggccaccgtgtaccgccagctcaacgccttggccgatgccggtgccgccgacacgatccgcctggacggccagcagctgttccgcctatgcggcgacgacggacatcaccaccacttggtgtgcaagcggtgcggcaaaaccgtggaaatcgatccgcccagcgaggcttggctgcgcaaagtggccgacggccacggcttcaccgtcgaatcccacaccctggaggtcttcggactatgccctgattgccaaaaggagcagaaagcgcagaaggctcagaaagcagtgagcgaataattgaatgggatcggcttcaaagccgatcccatttgctattccgctgctattccaccgacttcagggcgccgagcatgtcgaccgtcttcaaccgccggtagaccagcacgccgagtccgccgagcaccttgatggtcggcagttcgcggatacgttcggagacgttgagattcgtcagattgtagaggatcaccacggccagcagctcagccgcgagaatcagcacttccatgatctgatccggcaagtcgacgattgtggccacctgtttcttcgaagtcgtgttctgcacaacgcccttcgcgccgtccaactttatgagcttggcgctacgcgactccacattggaggtctcatggttcttgagcctcaccatataggcgttcgactggtactgttcgccgaacacgtgcttatagccacccgaagtcatgaacatgaaatgcccgatatgcatttcggtgatgccgtccacgcgcaccttgcgctcggtaccgctcgaatcggtgacggcaatcgtgtcgcctaccttggcgtccatcatccccgccatacgttcggagatacgttcggagatgatcgcaccacggtcggtgagcacctgcggcttgtgcccggtgcgcgaacgcagggtgatgtagtcgccgaaattgtaggcgtcatcagtggcgatcagggtaatcgactgtttgtcgttctccttgccggccactttcgacatctcctcgtagtagatcggcgcggactcggagacggccccgcccttcatcgccttggccacttcggcgcgctgcgaataatgttttcgtcagctttggtcaggccataatcgctgatgacggttatgtcagcgagattgttctgattaaagaagtcggtgccggttatttgcatgtccgggccggtgacgaacaggcctacgagcgcaaaggagccaagcgtcatcaggctcacgatggaggcgaatcgacccttggatttggccatggtaacgcgggtgtctttccatagcatgcgcttatggaatgacccgttgcgtcggcggttgcgcttggccttgtgcgcgtggggcgttctgccgggcgcggtataggagtcgtttgctgaatttgcggcggaatcggctgcggagtcggtcgcgggcgtaaggttggtcgtttcggtgaaatcattgagatcggtcatactgcttaccactccagatccttgatatccatcgggtgctcgttcacttcgatcgatttgacgcgcgcgtcatgcatgtggatcacgcggtcggcaatcggcgcgatggcggaattgtgcgtcacaatgaccacggtcgcacccttcttacggctctgatcctgcagaatctgcagcacctgcttgccggtgttgtagtccagagcgccagtcggctcgtcgcacagcagaatcttcgggttcgtggccaccgctcgggcgatggccgcgcgccgctgtccgccgcccgaaagctgcgcggggaagttgttgatacggtcctgaagtcccacgtcgataagcgcttgggtcggttcctgcgcgtctttcatgatttcggaggcgagctccacgttctccttggccgtgaggttggccaccagattgtaggactggaacacgaagccgaggcgttgcgctatgtcaagcgtgagtatgcgttcttcgacgcactgtcccgttcgggcaacgatatgcagatgtatgaccgggtcaaggatgtgttgaagcagatgctgcttgggcaggcggcccgtgtgggtgccgagctgagctacggcggcattccgcgcgcctatgcgctggaaattctggtctccgccgtctcatcgattatctggctatggggccggcgcggctgcaaggaggcgcccgagcaaatctgcgccatcatcgagaaaaacaaaaccaccgcgcccgtagacatcatacggtaagcgcggtggttcgtgtcggaatctggctcccctccctgagaggagtcaatccgcaggagaaatcggaaacctaaaactcagacagccagctcggccttgagttccttgaggtcggccaggatctcatcgtggcacttctcgttggtgtcgaaggcaaggtggcagaaggcgcactcgtggccttcgcggttctcgtggcaagcgtgcaggcaagccttgcccccgcactcttcggtgtggttgtgctcgcagccggtgtcgtcgcagcagtcgccggtgaagcagcagccgcagcggccacaggcggccacgccgtgctcgtgcttggtggcgtcgaacttggccagcgtgtccttgcagacggcgaaggtgccctcttcggtaacgatctcgtaagcatgctcatcgatggtcttgatagtcattgttgttcctttcagcgtttgttcgtctgcgactgtaggacggcagacggcagcggcgaaagttggtgaaagtgattatcaggcccattgctgctattaagagcaatgagacctcatgcagttttgtgtcggtaacgggccgattgttggccgagtgtcgacgcctggtataggtggtggcggtaccaatccaaatattggtggaacgacgacgatgagcgtgtctggcgtcggtgctgcgccaagcgttggcaatctaacgatgcgagtggagcttatatcgtcgctattgcgccaaggattggaagggcaccgatgctgaaggccagtagcgtcgggactgcgccattatttgttcgagcgccgacggccagtatcgtctggcgtcgtcagtggtccatcctttggtgaggtgccgacgctgagaggcggttcgatggcatgcttcgccgcacacttggggcacaggtcgaaaatctccagttcgtgggcgatggtctggtacttcaactgcttggtggctttgtcgatccactgctcaagtccgggaatctcgatttcgatggtccgcccgcattcgtggcatacgatgtgatggtggtgatgctggtccgagcactcgcggtagagggcctcgccgttgacgtggattacgtcgagctcgccttgggaggccatcatctgcacattgcggtaggcggtggccgtgccgatgcgcgtgccgcgctcgcgcaggatgtcggtgatttcctgggccgtggcgaatcgggatagttccgccaggacctgggtgatgaggagtcggggtcgcgtcacgcgccgagtggtcgcggtttgctcgatgctcatgacgttctgcccctttctgttaacaaatgatattcattatcgttattaaagcaaatcagatgcccggcatgttgtcacatgatttgaatcaactggcagaaatcccgcgtttcaacgaggcctgcgcgggatttctgccagttttgagccctataaaggcagagcccccgcgtacctttcgttgtaacgcgggatttctgccgatatggggcgagtcatggcgcagtgcagtgctttccatttcgggagacgcgtcatttactgccagtagaagtagccggtcggggcggctgcggctttgctggccgaccggacctgcagtatcaggccttggcgctcgtggccggcggagccgtaggcgccctgcttgatgacggcgtcgacggtgacccagtcgtgattgtgcggggtgccggccttgccggagctggctatgaacccgaatggggtcatgtcgagaatgcagcaggacatgaactggcgggacagctcgaactcgttcgcgccgaacgtacgcgacttgctcacaaacccggtgacctgcacatggtaaccgacgtaacgctgcggattatggtcgatctgctcgaaccatgagccgaattcgtcgtcgctgatggtcagggtcttgttcgccgtgtcgagtccgtgcagctgcgaggcgccatcaggcttgtgcgaactgcggggaatggcgatagcgcggccgccggcgtactcgtcgaagccgccgctgccgctgctgggctggaacggcacgacgatcagcagcgccggaataatcaaggcgatcaggaaccgcaaaaccgaacgctccgtggcgtggaacagtccgagccatgctgcggtcgccagcacgaacagcagtaccgcaccgatgatgagatacggcagcgaacgcggcgtggtcagcgtggtgtatgatccgcccaccgctgcataggcgatggccgcgcccagcgccgcgaaacacagcgcctccacgcggtcggggagtgtgactttgcgcttcatggctacgctcccatcaccagatgggcggcaatcgcggcgaggaagcaggccgccgccacggtcgcgatgaaccggatgatgaaccgtggccggcattccgtggccagcatcagcgtgttcttgaggtcgagcatcgggccgaagaccaggaaggcaagcatggcggagaccggcagcgcgccaatcatgctggcggcgatcaccgcatcggaagtagagcacagcgaacacaggaacgccagtcccatcgccgccagaatcagtacgatggcaccagcgtcatcgagcgtgcttgaaccgttggtcaacgacgacaatgcggtgcgcatgatggaggcaatgatcgtgccgaacagcagaatcggcatcatccgcataaagtcgtcatgcgtatgccgaatgaaatgcgtgaaccgctccaatccgcgccccgtgcccccgccggcgggggctgtcggcaaagccgactgggggtggttctcaggcgaatcacccgtcgcccctgcacaatcctcgcaaatcaacgaccgcccaatcgtcagcggcctctcacgcaccgcaggggagcggagcggccacaccgcgaacgacacccccgcgactatcgccactaccatgcccaaccccatgcgggccgccaccatccatggtttgtcggtgaatgcgaaccatgtggaccatatcgccatcggattcatcaccggcactgcgcacagaaacgtcaccgcacacggcagcggcaggcgtttgcgcatcagattcgcgaacgtgggcaccaccatgcaatcgcacaccggtaggcacaggccggccgccaatgccgcggccagtccgccggccaacgatttcggtatgtggcgggccagagaatcggtgctgacgaacgtgctgaccacggccgacatcatcgcgcccagcagcatgaacggaatcgcctgcaggataagccccgcggcaccggtgccgatacgcaccagcggaaccggaaacccacgcgactcgagcatcgcggaagccgcaatcaggaacgccaccagcggcgtgccgataatcagaaacagatagttcgccgaatggtcctgttgcgcggtgttcacctgttccgtgcgctgcgtgcgaggttctttcatgcgaatatcacctgccatatcgccgtcatattagcaccgtacgcatgatagtggtcgagataatatgcggggaactttgcacatggttgcctgggccgatggcgaatcggtgggccagcatctcggtggccacttcctccttgctcatggatgccgggtaatacgtgggccagttgtccatttccttgagggtttcttcctgtcgttgaagtgacgttgcacggtggcggcggtggcagaaccggccccggccttgtccgcgtagacggcgttgatggcttcggcggccttcagcacggcttccgggctgaaccacaggtgcgggttcgtagcatcatggtggtgatggcggccttcttcgccctcggcgtggtcatgggaatgctcgtgctcgtcggtggcggtgacgcccatgaggccgcccacgttcacgatggtctggcgtttcttgtcaagctgcgccttttccgcccagccgtcgtagccagcgccgttgagcaccacgatgtctgccttggcgagcttggccagatcggatgcggtggcctcataaaacggcggttcgccccggcaggtgacggcatacggaaggaaatgggagaaagaacgtacgccgccggcctgtggagcggaccgtcgagttgttgttacgagacttgatggattgcggaatccacgatgttggttatggcttcatataccccttacgtacggctgcggccagattctgcggaacctgaaccacttcgccttcaggcgttctgaccgtggccagctgaggcaccttggccttccagttggctcggcgcgaatgcgtgtttgctcgggacgccttgtacttgggcagtgccatcagccttgcctcgccttccagtgggggttcttcttgttgattacatacagatggccgcgccggcggacgacataggagccatccttgcgggccaatgagcggaccgatgccttgaccttcatgtccgttcctttcttcttgtcttacggtctttgcggaatgtgcggcgaatcacttgcgcccgtaacgagcgttgaacttctgcacctgaccggcggcgtcgatcaccacattcttgccggtgtagaacgggtggctgtagctggacacctccacattgacgagcgggtaggtgttgccgtcctcccagtcgatggtcggcaggtttacggccttggccaccagtgtggacttggtgaggaagtacttgtcggcggagcggtcatagaagaccacggggccgtattcggggtggatgccctcttgcatggttatggacctttggttgtgtggtgttgtgtggtgatatggatgagaatggcgtcggacgcgcgggtggaatccggtgaattgagatggcctgagacggcctgacggccggttgtgccggcccgatcaccagctggatttcaccacgccgggcagtttgcccttgtgtgccttctcacgcagattgatacgtgacaggccgaacttgcggttgtaggcgcgcgggcggccgtcgatggaatcgcggttgcgcagacgggtggggctggcgtcgcgggggagggcctgcagcttgcgcatcgcctcggcgcgttcttcggcggtcagatgagggttgacgctgtcgcgcttgtattcggcgcggcgttcggcatacttggcgaccatgcgttcgcgctgcaattgtcggttgatcttactggttttggccatgtccggctccttgataaggctccggggcgcgggaatcgcgccggccggagctgggacgagtgcattcgttcattgggcgcatgccgcaaggttcggaagatgagttcatgaaatggtgatagaggaaaccgccggaatgccaacaaggaaacgatttcggcgggtgcttaagcctcttcctcgcctcgcgactggtgtccaatgaacgaacagatggattagcgggtctctcggaagagcaaccgtttgcggactaccggatcgaacttggtgagctcaagacggtccggcgtattacgacgattcttggtggtggtgtaggtgaatccggtgccggccgtggacttcagggtgatgaccgggcggattgcggaggatttgcttgccatgagtggtgctttctatgtgtgggtgtcacgctgttatgtcacgtatgtcgcgtacgtcgcggtgccatgtgggtgatgcagctcgttagcgcggtttgttgcgcggttacgcgccggcacagtggcgggcctactgactgcccgagcatgggggtgatgccgtggccggttcagttgacgttctgatcgcggcggatgcgggcgatcgccgcctcgatgccgatgcggtcgatggtcttgatgcccttggcgctcacggtaagcgtgacgtgccgctgcaaggacggcacccagtaccgcttggactgcaggttcggggcgaaggttcggcgtgttttcctgtgcgagtgggagacgcggttgccgaccccggcgcgtgttcccagaatttgacatgttttggacatgcctgcaactatatcataatgataaccattatcaaatcagaaaggctgtcatgattcatccggcattgcaatcacagggaaacgcggaggggcgcacgcccgtggtgctgctcaccggcgccgaccgcctgagcctggactccgtggcgttctcgttggtcgattccttcccgtccgtatgctcgattgcttatgacgtgcgcccgaacgaagccgtggaatccggtctcgatatcgtgcgcaacgtcgcgaagccccaggcaagcggggtggtgttcggcgagtccgattcgttcgggctcgaggggtgctgcatgagctgcacggtcaaacatgaccttgaacggacgctcggatcgctgcaagggcgggccggcgcgtttctggtctcgctgcctgtgggccttgaggccacgccggtcgcgcagtatctggccgattccttccgtctcaacgagtggggtgagtcgatgttcgtgggtgcggtggccaatgccgtaggccttgacgaattcgaagagcgattctttgacgacgaccgtttgtgcctgtgcggcatgggcgaggagaacggcgtctatgacgagcgttcgaccggcgtagtggtctcccgcctgatccgtgaggcctcgtgcgtgctcgaattgccggtcattggtgccggttgcctggcacgccatttggatacagacggggagtgcgcctgccgcgacatcatccgtgcaatcgccttgcgtgatgcgctggtctgtgaggatgcccacaccgtggggctcgtcgacctggtgcaggcgtcggtctgtgccgcgatgccgttgtgacatgtgcggcaaacggcagaacccccgcgtccgaacgaaggtggcgcgggatttctgtcgtttccgaggccttaaatggcagaacccccgcgcgggtatcgttcggacgcggggatactgccgtttcgtctgccgaaaacggcgggatcccgcgttgtcatcgtcggggcgcgggatttccgccggcagcgcgggtgtgcgcgtgcaacacgccgacgtaaatgcaaatgataataattctcaatacatgttattctgtcgtgttgggggccgggcgatgatgcagcaacagcagcatcgcccggccaaacagccgaattagagaggaaaatccaatcatgtccatcatgtccaacgccaagcgcgcgctcgccatcgcggccgccgcggcgaccctgttctcgatggccgcctgcggttccagcaatgccgccggcaacaagtccgattccagcagcgccgcgtcttccggcaagatcgaggtcgtcgcctccatcaaccagtggggttccgtggccgaagacctcggcggcagcaacgtcgaagtcaccaacatcatgaccaagaccaacgttgaggcgcacgattacgagcccaccagccaggatgttgccaagttcggcactgccaaggtggccgtggtcaacggcgccgattacgacccgtgggccaccaaggccgcccagtcgaccaaggccacgctggtcaccgccgccgagaccaccggcatcaaggaaggcgacaacccgcacgtctggttctccgccaaggtgcgttccaacgctgccgacgccatcaccgccgcctaccagaaggccgacccgagtcacaaggacgactacgccaagctcaacaaagaatggcacgccaaggaagaccagcttgagtccaagatcaaggagacttccgccaagaccgagaacctgccgtacgccgccaccgaatccgtggcctggcacttggccgacgacctcaagatgaccgacgccaccccgaagggctacgcccaggcttccgccaacgagagcgagccgaccccggccgacatcaaggacttccaggacaccctgaagggcggctccatcaagatgctcgtcttcaacagccaggaagccaactccaccaccgaccagatcaccggtgccgccaaggacgtcaacgtgccgatcgtggagctcaccgagcagatgccgaagcagtacaccaacctgctcgactggatgagcgcactggtcgaccagttcgccgccgccgtgaagtaatgcggcggtagccggcaatccgcaacagcaataaggggaataatcaagtcagatagcgaggcgttgcctaggggagaacagaacgcttcgctatcagggaaggctccttatatatcagggtgcttcggggatgtcccgaggcaccctttgcgttagggtgaatagttaggaaacggtaagaaaaatagtggaactatggattttccaaggttcagcggcaacaatatgcccttgaaaagtcacatacggaaacaggcgaatgagcgagaacactagtagtatcaccacagtgaaaccccatttcaagctttgggtcaaaaaggccgaagccaatgaagtcacgccccagcacccccacaagcccttccccggctgggcgtacggcgtgctcttcgttatcttcgacattattgttgtgacggcgctcgaagtgggcgtttcgtccagctccacccgtgtgcaactgtccagtccgaccgtcggattcggcttcgtgagcaagatgtggaccgacggcaatttcgtattcgtactcaacgtgatacttgtcgcgttgctgtacctcatgttgctgatgctgttcaacagattctggacggcaagcatcgtgattcttgcggtcggaatcatcgtggccgccatcgaacatttcaaggtcgagatccgttacgaggccattctgcccgccgacctcggcttccttggctcgaacaccggcaatatgctcaccttcattccggccggcgcgcacgtgaccatcctcgtggcacttggcgcgttcgccgcgctgctcgccctgattctggtgctgcgccacttcgacgggcgcaaaggtcgcatgatccgtacggacaacctgagcctgaacctcacctcccgtctgattctgctgctgctgccgattctggtgttcgcgttgtactgcattcatgtgagcaccaccgattcgctggccaacaagttctcccgcgcctttggggacacgccatccatgtgggattccgtgtatgacgcgcagcgcaacggtccgctcgtggcctttacccgtcagctcaacccgaagatcatggacaagccgagcaactactccgaggagaccatgaagaaggtcgccgctcgctaccagaaggaagcggagacaatcaacgcctcccgcaccaacaacctcactgattcgacagtggtgtacgtgctgtccgaatccttctccgacccgagccgcgtgccgggactgaagaccaataaggattcgatgcccaacatccgcaagatcaaggcgggcaccacctccggcctgatgctctcctccggctacggcggcggtacggccaacctcgaatacatgggactttccggtctgagcatggccaatttcgattcctccctgtccagcccgtaccagcagctggtcccgagccagcattggacccccaccatcaaccagatgtggggtgcgcccgccaactcgctcggctaccatccgtacgagtccagcatgtactcgcgcgctacgaactacaagaagttcgggttctcgcacttctacacgctgaccggtccggacgtgatcaagtatcaggacaagattgacgagtcgccgtacgtctctgataagtcttcctatgattctgcgctggaaggcatcaggtccggcaagacgaacaagttcattcagatcatcaccatgcagaaccacatgccctaccacgagtggtatgagaacaacgactacaccgctgaatccaccacgggtacgccgctgggtgatgatgaacagcagtcgattgagacctatcaaaagggtgtggagattaccgatcaggccactcaggagttcctgaacgaactggatgcgctggataagcccgtcaccgtagtgttctacggcgatcacttgccgggcatctactcgtccgccagcgaggatggcaacaactccttgtccctgcacctgaccgattacttcatctggtcgaataagacttccagctcccaaggcaataaggcaagcgatgcagcctactcttcgccgaacttcttcgtggcacaggccgccgatcacatgaacgccaaggtcagcccgtatctggcgttcctgaccgaaatgcattccaagattgccgctatggaaccgcctgtggtcaacaaggtccaaggctgggatcgtattcccgaaggccagaacatctatctcgaccaaaacggcaacccgatgtccaccgatgacttcgacaaggaaaccaagcagttgcttgccgactacaagctcatccaatacgacatcaccgccggcaaaaactacctcaaagacacagattttatgacgttgccgtaaagcagacagcccggccgaaccgtaaagcggatagctcagtgggctatccgtaggtgaggggagcggctgtgccgcgacggaaaatccggaggattttcggtctgtaggcaacgtgcgagccgacaggcgagccagcaaaacgcgggcgaagcccgtccaaaattgctgtaccgttgccatagtgctgtgagctccctctgatgagggagctgtcgaacgaagtgagactgagggagagatcccacagaccaatcactcccgccttacaataaagccatgaagcgcatcgatgtgaatcatggctggcggttccgttcaattggcaaggaccgcgatacggcagcgcggcagccagtcacgctcccgcacgatgcgatgattcacgagtcgcgcgaccctcgcgggccgcacctcgcgattcatcgaacgaggacatgacggcgtggccagctggtcatgggcgggctatgagggccgcgacgccatcgtgcatgtcaccgatgaccgccgcattgtggttgatgcaggcgggcatatcgccgtcggaccttctgccgaagctgtggatgtggaggtacaagtgaactctgtggccgcacaacacgacctgcctgccaatgccgaactgctcggcgtggccagcgccaatcccatcaccgtcgatgaactcgccgacaatacctgcaccacctacttcggccgagcccaagctatttggcgaataccagccgaaacgtctggtattgcctgcagcacaaacgccctcatgccatcgtcatgacggtacgataggtacagtcgatgcccggaaaaccgacccgggcatcctgcgggaaggatgtgccatggtcaatgcggatttcgctcagttgcgtcacgcctacgaatccgggtgtacgcggccattggcttggcgacgggcgcaattggatgcgctatgccgtctggtagcggacaatcgtgatgctttcgtggctgcggccatggccgatttgggcaaacccgcggcggaaaccatactgatggagctgaatctggtggccggcgaggcgcagttcgtccgcaaccggctcggactgtgggccgcgcgccatcccaaggcgatgcattggatgctgcaacccgccgccggctggacgatcgccgagcccaagggcgtggtactcatcatctcgccatggaattacccggtgctgttggctctggagccaatggccgacgcgctcgccgcaggcaacgccatctgcctgaagccctccgagctttcgcccaacacctcgcgcctcatcgccgaactcgtgccgcaatatcttgaccccgagtccgtgtgcgtggtcggaggcgggcccaaggaaaccggcgaactgctgaaatgtccgttcaaccatatcttctacaccggcggcgggcacgtcggcaaaatcgtcatgcgtgcggcggccgagcacctgacaccggtcacgttggaactcggcggcaaatcaccgtgcttcgtggaccgtacggtggatatcaatgtggccgcacgacgtatcgcatggggcaagttcaccaatgccggacagacctgcgtggcacccgactatgtgctcgccacgccggatgtggccgaggctctggccgagcgcatcgccgtagccatcaccgaattctatggcgaagatccgaaggcctcgcctgattttggtcgtattatcaacgatcgtcattttgaacgactgtgcaagctattgccggtcggcaccgtgccgtctgaggagccgagctcgccgctggtacaggtggcatcggcggtaggcgcggccatggatatggtcgggcggcgcttcaatgtcgtggctgccggacgcggaagcgcgggggagacagccggtggtggcaccggtagcgcgaacaatgcggcgaagccggcggccggttcgaatacggcagccgctgatagtgatgcgactgcctcggccgctgttgagccgagcgagattcacaaggtgcccggcgtattcgatccggccgggcgaatcgtttgcggaggcaaggtcgatcgcgccgcccgatatatcgcgcctaccgtactatacggcacgtcaccggatgcgccggtaatgaaggaggagatcttcggcccgattctgccgatcctggtggttgaggatgccgagtccgcaatccgattcatcaacaagcggtcccggccgttggctgcatatgtgttctcgcgcgatcacgaggttcggctgactttcgaacgtcagaccagctccggagctttgggatattcgttgccgttgggtcacctgctgtccagccgactgccgttcggtggcgtgggcgcgtccggcatcgacgcctaccacggcaaagcaggcttcctcaccttcagccacgtcaaaaccgtggttaccaagccgcagttccccgacactctgcgcctcgtgtacccgcccttcaatgaagccaaggccaaactgttcaacatcatcgccaaattcagctagcgtgatatcgctcgctgatattgggtgatggcgttgtcatagtgacgttcgctgtcccggcagccacgtcaatcgattgattcgtgtaccgggccagatttttctgtcctggtatttgatttcgagtcattttctgcttaccgggacaaaactgacgccgaaagtatcgtccgcgtattacgaaaatggcggaatagtgcggttttgcatggaagggaattccaaatattcctatattcgaggtgttcaactgtcctggtttgcgaaaaagagccgaaatcagctaccgggacagaaaaatctggcccggtagccacgtcaatcgattgacatggccaccgggacaaaaatatgcggcagatgcgccgcttctgttacttcagggctttgaagccgatgtcgtggcggtagaacagtccgcgcagctcgagcttgtcgatgatcgcgtagaccttgtcctgagcggacttgatgtccggggcggaggtttcgacgagcaggacacggccggagttggcaatcagaccacccttgtcgtcggaggcgacgccggcatagtagacatgcgaatcctcgtcgacctcgatctcgggcacacgggcacccttgatgacgttctccgggtagccgttggaggcgatgaccacgccgagggtggcgttggactcatcccagatgaattcgggggtttcgccgtcgagaatggcggagatgccggcaccgaggtcggaggtgagcttcgggagcacgacttcggtttccgggtcgccgaaacgagcgttgaattcgatgaccttcggtccgtcggcggtggcgatcaggccggcgtacaggatgccggtgaacggcgtgccttcctcggccatgccttcgacggtggggcgcacgattttctcgatggcctcgtcgaccacggactgcggaatctgcggcaccgggctgtaggcacccatgccaccggtgttcgggccttcgtcgccatcgtgggcgcgcttgtgatcctgggagatcggcatcggccagaaatcggtgccgttgacgaagctcatcagggagaattcctggccgtcaaggaagtcctcgataacgaccttggcaccggcggagccgaagcgatgatcgatgaagatgtcttcaagcgcacgctgggcggtgtgctcgtccatggccacggtcacgcccttgccggcggccagaccatcggccttgatgacgatcggcgcgccatgctcgtgtacgtaagcctgagccatgtccaagtctccgaacgtcttatatttggcggtcggaatgttgtgacggtccatgagctgcttggcgaaatccttggaaccctcgatctgggcggcggccttggacgggccgaacgccttgatgccggcggcggcgaaatcgtccacgatgccttcgatcagcgggacttccgggcccacgaacacccagtcatagccattgttcttcacgaattcgataagtgcggcgtggttcgactggctcagctgcgtggtgtggatgccgtccttgagcatgcccgggttgccgggagccacggtgacttcgtcaatgctcggtgccttgagcagcgtgtaggcaatggtatgctcacgcgcaccggagccgatgaccaatactttctgacccatgtttttccttcctaaagtctttggctcccctctttgaggggagccggtatctggagctacttcagtacgatttgcgtgtcggtggtgtcggtggtgatctggccgagcacgtaggcgggttcgttgttgtcggcgagcagctttagcgcctcgtccttgcgggcggggtcgatggccagcaccatgccgatgcccatgttgaagatgttgtacatctccttgtgatcgatgttgccggccttctcaagcacgtcgaagatcgggagcacaggccaggtgccaagctcgatctcggcggccagaccgtccggaatcatgcgcgggatgttctcgatgaagccaccaccggtgatgtgggccacgcccttgaccacgcccgccttgaacagcggggagagggccttgacgtagatcttggtgggggtgagcagcacgtcgccgagctttgcgccgcccagctcggcgagctcagtgtacacggtatagccagcctgctcgaacagggccttgcgcaccagggagaagccgttggagtgcacgccggtggaaggcagaccgataagcacgtcgccctcagtgatggtggaaccgtccacaatggcggacttttcggcaacgccgaccgagaaaccggccagatcgtactcgtcctcgtcgtacatgcccggcatttcagcggtctcaccgccgaccagtgcggaaccggcctgcacgcagccgtcggccacaccggccacgacctgctcaagcagggccgggtcgttcttgccgcaagcgctgtagtcaaggaagaaccgcggctcggcaccctgggcggcgatgtcgttgacgcacatggccacgcagtcgatgccgatggtgtcgtgcttgttggccagcttggcgaccatgagcttggtgcctacgccgtcggtgccggagatgaggaccggctccttgtagcccagggaggctaggtcgaacaggccgccgaagccaccgatgccgccgaccacgccgggacggttcgtgcgggccacgtgcgacttgatgcgcttgacgacttcgtacccggcttcgacgctcacgccggcgttctcatatgcttttggcatttggtggggcctttctgttctattttcaagctcccttgccggggagccacctgcaaaaagcggattttcgtttgtactaagctccccttgtcaggggagctgtcagcgaagctgactgaggggtagtcgtaaagaccaatgactgaggtgtagtcgaaggaccggccgaacctactgcacgtccggctgcacggtgttgtactcgttgccgatgtacttgctcttgtacagcgcgaattcaggcagacgcacacggtcctcgggcgtgagggacttcaggaagtcggcctcgtagtcgtcgagcgcagtggggtagtcgccgttgaagtaggcgacgcacaggccaccgtatggggcgtcggcgttcagtccgatggattcgaccagaccgtcgagcgaaaggtaggccaaggaatccgcgccgatgtattcgcggatttcctccacgctcatcttggctgcgatgagttccttggtggtggagatatcaatgccatagaagcaagggtacttcagcggcggggagctgatgcgcatatgcacttcagcggcgccggcttccttgagcagctgcacgatgcgcttggacgtggtgccgcgcacgatggaatcatcgataacgataacgcgcttgcctttaaccacgctgcgcacagcagagagcttcatacgcacaccctgctcgcgcagttcctgcgtgggctgaatgaaggtgcgggccacatactggtttttgattaggcccatttcgttgggcaggcctgctgcttccgcatagccggatgcggcggacaatgaggagttcggcacgccgataaccatatcggcctccaccggggattcggcggcgagacgtgcgcccatgcgcttgcgggcggagtgcacgttgacgccatagatatcggaatccgggcgtgcgaagtagatgtattccatcgagcagatggccagctgcgtgttgttggtgtactgcacgatcttgtagccgtgatcgttgaccaccacgatttcgcccgggcgaatgttgcgcaccagctcggcgccgacgacatccagtgcgcaggtttcggaggcgagcacgtaggcgccgttcttcatcttgccgagggagagcgggcggaagccgttcgggtcgagtgcgccgatcatggcgtcttcggtcatcagcaggtaggcgaaaccgccatgcaccgtgttgagcgcttccttgagcttgtccataaaggtgcgctgcatcgaacggcgaatcaagtgcatcagcacttcggtgtcggagttcgaatggaagatggcgccttcgtcttcaagcttgcggcgcagtgacgggcagttcgtcaggttgccgttatggcacagagccacgtcgccgtcatggaagcggaagatgaacggctggatgttgtccgtggtgcccgagccggccgttgcgtaacgcacgtggccgatggcgcaattgcccttcagtcgttcgatttcgcgctcatcgccgaacacctgggtgagcaggccgagtccgcgatgaccgatgagatgaccgttatcgttggagacgatgccggcaccttcctgaccgcgatgctgcagcgcgtgcaggccaaaataggtgagtcgtgaggcgtcggggtggccccatacgccgaagatgccacattcctcatgaatgtcttcgagttcagccgacaagccaaagctcctttttcaaacaggggattaactatctgccaaccctaccaatcggcggctacatcgcgtgttgtggggtggtggaacttgttggggttcgcggacgcggtttaagcaccagatcagttgactatgaatagtggcttaggattttggcctttcgtcgtatgaatccggtgcttgttcttcggcttcgtctcagtgcctgaaatggctgaagaactcgatggtctcgggatcctgcgactcgtccatcacctcggcgggtgtgccgttctcggcgatgacgccgtgacggagcagtacgatgcggtcggccgcgtcgtgggcgaagctcatttcgtgcgtggccatgaggattgtggtgccttgggcctttaactcggcaaccatgttgagcacttcgccgaccagcatcggatcaagagcagatgtgatctcgtcaagcagcagcagttccgggtcggtcatcagtgcgcgcgcaatcgccacgcgctgctgctggccgccagagagctgatcagggtaggcgctggctttatcgcgcatgccgatgcgttcaagcagttccatagcgcgggtttcggcgcgatccttgctccagtggtgaaccttgattgcggcaagggtcacgttcttgagcaccgacatgtgggggaagaggttgaactgctggaacaccacgccgatacgtgcgcgaatcttgtcctgatcggcacgcgggtcggtgatatcggtattgcccagccaaatctggccgtcatcgacctgctcaagcaggttgacgcatttcatcaatgtggatttgcccgaaccggaaggccccagcaaagccaccacctcatgttggtgaatgtcaaaggaaatgccacgcagcacctgcgtgtttccaaaggatttgcgcacgtcatcaagacgcagcaccgtcttgttgctcacgggggagtcactcgcctcggtgttgatattggtcatttcgctcataccgttcctccgctgagttcgcgtttacgcagacgttccgtgtaccagtcgttcagcaggatgaacggcacgctcatcaggatgaacagcaggctggcgaccacatacggcgtgaagttgtaggtgctggccacgtcgatctgtgcggcgcgcacggcatccaccgcacccagcacggaaatcaggccgacgtccttttgcatggagatgaagtcattcatcagtgcgggcgcgactttgcgcaatgcctgaggaatgacgatcagtcgggtcgtctggccggaggtcaggcccaacgagcgggccgaggctcgctgagaaggatgtacgtcgttaaaaccggcacgcagcacctcggagacgtaggcgctgtatcccattaccactgcaatggtgccgagtaccgagggatcgatacggccgaacaagcctaggccgggaatgccgaaaccgattagatacagcacgacgataataggcacgccgcgcatcacagtcgtgtagattaatgccaggatacgcagcgggaacagaataggggagcggctggtgcgcaccaatgcgatcagcgtgcttagaatcgccacgccgaccactgcgacgagcagaacgcggatgttgagccataggccgtcaagcacatggggaaacgatttgacgaagtattcgccggagaagaaggtctccttgactcgtggccagccgggggagagcttcaggccgatgacgatgaccacaatgaacacaatggtgctgatcagactggtaatcgtcgattgaatttgctgatgaacacgatattggcgtcgtttgagctcgacctgacttacctcgtgtccgtcaggggcattgtactgcctggtttcggttggtgctgcggtcatgtgatgaatgtcgctcgcttcctgaatgccggaatggccgggtgtcacaggaaaatttccgcagcgcccggccaaggtgttgtgaccttatgatgtgagcctactccacttactttttcagttcggtcaggtcggtggtgtactcggccagccacttgtcctgaagcttcttgatggtgccgtcggcgttcaggtcatccactgccttggtcacggctgcagtcagcttggaatccttcggcagcacgatgcccatgccgctcttgtcttcggagtcaggcagacggccgagcaccttggcgtccttgacctgctcggactgcaccatgtacacgcattccacggtgctggtgaccagtgcgtcgatttgaccggcgtcaagtgcctgagccagtgcggcatcatcattgaacgtctggatgtcgtccttgatgttcgccttggcgtagtcgtaggcaagggtgccgaccatgacgcccacggtcgcattcttcagatcggataccttggtggcgttggcgaacttgctgtctttcttgaccacgacggactggctgtcgttgtagtagctggacgagaagtcaacggccttcttgcgctcgtcggtgatgccgaactgctggatgttgagatcccagtccttggcgccgggagcgatggcggtgtcgaatgcggtgcgggtccacaccacgtcgctcttcttgaaaccgagcttgtcggccactgcgtaggcgacggccgcctcgtagccctcaccgctttccggcttgtcgttcataacccacggctcgtaggccggctgtccggtggcgatggtcagcttgcccggcttgtacgtctgctgggtgatgtcgttcgaatcggcggaattggatgcggtggactggccggaaccgcaggctgcggtgaacgacagagccaggatgctggcggtggacgcaatggtacggacgatgtgttgcttattgaacatgggcttcctctcctcaagtgttcgtcatacacacggttcaaagtcgtgcttgatgcatgcgcgccaattgtatggctattgggttactacaaaacagcgatattctcggatgctggttatctccattgcttatggccggctagagccgcgcaatctggcgcgtaagcgaacggatatctcatattggcgcagagcggaatggcgttcactgttcgagtgtgaagccgtcgaatacgaatcccggactgaccacacaggagaccagcgcatcgccctggccaggcactgtgcgctgccagacgccagccggtacgaccgcatgtcccgatacggttacgtcggcctgatcggtggtgatgccggaacccagggtgattacggttcgcttggattcgtcggattccggagtctcgccgctgccgccgagttccagcttgaccgatgccgggccatgccacagccagacctcatccgcatcgaccttatgccaggcgctggcatctccctcgggcagcaggaagtaaatcagtgacgatagcggtcggcttgaggcctcatccgtgtgcggggattgccagtcacgcgtgtaccagccgccttcggggtgggcttccagtccaaggcgttccactatggaccgggcgtatggactcatgtctcgcaaagcgacgctcataatgagatctcctgttcttggcgggtttgctggtttttggcttcttgatatcaggtcgggtcagcggtgtcaccagacgttgttgtaggcttcgcgcccggatatcaccgtggctcggttcgtgcctgcgccgtgcttcaccagtgtttccagcgtttcttcgatgccggccggagatgatgtgtcgacggggatgtcgaagaacgcgaaatcagccaatgcgcccgcgttgatctgtccaatgcggtttcggcccacgtgcatgcccatggaggcggcgccgcccagcgtcatcatacgaatcaggcgatgtgtcagatcgtcgctggcatagccttgttcgcgggccaggtcgtaaagcatcgacacgtcatcaagcagatcgagggtccgcgtgctggagagcgaatcggtgcccacgcttaccagattgccttcctcgaggtattcgcgcaccggtgcatctttgccggtgttggtaatgcgattcgatcgggggcacaatgccacgcccacgccgcgctgacgtagaatacgccgatcctcgccattggcccacacgccgtgtgcaatgtgcacatccgggccaagcgagccaagctgatcgacgaactggatggcggaggcacctttgcccacgtctttgagctgccggtagctttcccaatcgtggtcacgccagtcggacgccgaataagtggtgagcaccggcggataagtgccggcctcgagcggggtctccgccagatggatatgcagtcgcatgttcagttgacgagcaatgtctggaagatcaacgaacggttcggactccagcgtatacggagcatgcgggctgatgccgaggttcggcagctgctcctcgttcatccggcgcaactgccggatgagctcggtgcggcccttttccatccattcgtcgttgtgccagcccattacctcccaataagcgatgccgtgcatgccctgcgaagccagcgcgccggcggcgtccagatcggtgacgatgtctgcggcggccgtcgtgcccgattcgaccatctggcgagcaccgtcctcggcccactgcttccatggctgggtcttctgcgcctcggcgtacacctcgttgaatgccagttcccaagcgcggaaccgatcgtaggtgccttgcccgacctgcaccatgccgctgtactgcagatgagtgtgcgcgttgaccaatccgggggtgagcaccccatcccaatgccgttcacggatggtgccgtgagacgtcatttcctgcttcagcgcctccagcacccagcggcgtttacctacatgaaccacgcggtcgccatgtatggcaactgcgccatcgatgatgacggggcccgtcacggggatgatgagtttggcggaatacagtgtcacatcatcgataagctcggtatcgacggtcggccaggtgttgtcggtcatattctcctcgctgcgttgtgttcggtgccgtgtctatggctatcggtcggcgttctctcggtcgttttccgcgaatctggtcagtcgccaatcgtagccgttgtcctccacggcatggctggctcggtatccgcgcgccttgagcgcgctggcggcgatgcgctggtcggtcgctgcgtcaagtctgataagcgtgtgatccagtgtgcctcgatgttccagaagatatgcgacggcgctggcctgtacggcgaagctcagatccatgatctcgattggattgccgcctcccaccgtgtagttcacgccatcgccgtcggcgattagcgtgagcgttggtccgtcgggaacattgagttgcgcggtgtccctgttgacctgtggggtgaagtcgcttacctcgtccaaggcgatttcgttggcgatgccgccgatcactgcgagcgccgcgccctcgtgcattgcgcgcatgtgctcaagtgtgaccgtatgtctcacgccagtggcggacaccaccatatccgcgcaagggagtgcctcgtcaatgtcttgtgcggcgaagccgtcgaacaccgctttgagtgaagccactggatcgatatcgcagatggtgacttcggcgccaagcgcgcgaacacgccgtgcgaagccttggccgaccgggccgtagccgatgacggtgacgttcttgccgtcgaatgcatgctcgccgagaatgcgctgcatggtggtcacgcatgtctccccagtgccgtgggcgttgtcgaatccggttttcagcacactgtcgttaacggctacgaccgggtaggtgagggctcccgcttcctgcatctgctggaacgcgcgtacgccactggtcgtttcctcggccactccaatgagattcgccgtgagctcggggcgttcgagcgaggcgagacgggcgaagctggcaccatcgtcgatgatgatgttcggctgtatcttgtccagcaggcgcagggctgcctcgtgcgcctgttccgcggtccaggctcggctggattcgaccgtgattccttcccggcgcagctgttccgccactcggggatccgtggaatccgggccgcaatatacgccgacgattgcgccggcggccttaagcttgcgcagcagaatcgcggtttttggctccagtatcaggcagacggcaatacgaatgcctgagaaatcgacgcgggtggtgaggtcatccatggtgtcgcgtaataccggcatgtgctgttccgcgtgctccattgcctccagcccacttgccgtgcgcatgtcggcaatggaatcaatgctttgtgtgccgtcccataggaattcctcgctgtgcccgtcggtcatcgtggcatcttcgacggtcatgccccattgctgggcctgagacttgatttcggcatgctcctgcggctccggaatcgcgaggcgggctcctgccagtgatcgattcgttttctgggatcgggctgccgcccacgccgcaaaatcgctgtctgccgtaatgcttttcttcatattccccatggtacgcatgcatgccgctgctctgccgctgcgcgtgtggtgtgggtgaagagcgtgcttgggcgcgttgcgtgcgtcgacttcggcagcttcgaacaggcatgttgtatcgaacaaatgttcgaccgtattgatatgctggtcgggccggcggtggtaaggaggtgatggcgatgggcagcggaacggtatcgacgcaacgcgagcatacctatattgccattgatctcaagtccttctatgcctcggtggagtgcgcggcgcgcggactcgacccgttgaccacgcatctggtggtggccgatgaaacccgcaccgataagacaatatgtttggcggtctcaccctcgctgaagaactatggcattcccggtcgtgcgcggctattcgaggtaaaacagcgcctgaatggagtcaacatcgagcgcgcggtccatgctcccggcggccgattaatcggggagtcctgcgatgcgcgcgacctggaacgctcgccgagactcaaagcctcgatggtcatcgccaagccgcgcatggcgcactatctggaaatcagcgggcggatctacggcatctatctcaggtatgccgctcccgaacacattcatgtgtattcgattgacgaggtgttcatcgacgtcacgccatatctgcgctcgctgggtatggggccgcatgccatggcgcgaaccatcgtgcgcgaaattctcgatgaaaccggcatcaccgccactgccggcattggctccaacatgtatctggccaaagtcgccatggatatcgtcgccaagcacatgcccgccgacaaggacggcgtgcgcgtggccgaactgaatgaaatgtcatatcgtcggctgctctggagccatcgtccgctcaccgatttttggcgggttgggcgcggctatgccaagaagctcgagcatgccggactgatgaccatgggcgatatcgcccgatgctcggtgggtcgtgcttcggattactacaacgaagacctgctatatcgcatgttcggtgtcaatgccgaactgctcatcgaccatgcgtggggctgggagccgtgcgagatcgcggacatccaatcctatgagccggatgcgcacagcatcagcagcggtcaggtgctcaccggtcccgccgactatgccacggcccggctgatcaccaaggagatggccgatgcgctggccctcgatctggtcgataagggggtgatggcgaatcggctgacactggcggtcggctatgacattggcagtctcgatgcttcgaagcttgattcatgcgcagaccgggcgatgaggcgtgccgccgaacgcgcggcaaagacctatcaagggccggtgaccgttgaccgtttcggtcgtcgggtgcctaagtcggccgtggggtcgattggattgggcgattttacgtcgtctgccgcacgtattcgtgaggcgatgaccatgctgtacgagcgtattgtggatgcgcggttgctggtgcgtcgactcacagttgttgccgatgatgtggccacgcccaaagaactggcggcgggcaaacgctatgagcagcttgatttgttcggtgatgatggcgatatgcgatatgactgtgatagcacggaatccggtggcgacggaagcgggcgtatgccggcttgtggggacgatgccgccgcacagacgttggctcgagagcatgatatccagcgtgcgctgctggatgtgaaacgtaaattcggccgcaacgccgtcatcaaagccatggatatggaagacggtgccaccggtcaggctcgcaaccgtcagatcggaggccatcgcgcatgaccctgcaagaaacccatgcatacgacgacatcatcaacctgccacaccaccaatcacgcaagcatccgcatatgtctcgtcaccagcgggccgcccagttcatgccgttcgcggccttgaccggataca

SEQ ID NO: 3690 - DNA, 54781 bp, Unknown
  R150_10m  MAG No. k141_2598
caacccacttgacgttgaccttggcccagttggcaaagcctccggccttgatggcctcggtgacagacaggtaggcgtccggcagatcgatgtacttgccgacgatggcgatgttgacctcgtgcttggggtggtggacgcgctcaagcaggtctgcccattcatcccaatcgacatcgtggaacggcaggccgagctcacgcaccacgtaagcatcaaggccctcttcgaacaggatcttcggtacatcgtagatgctcggcgcatccacgcagttgaccacaccttcggcatcgacgtcgcacatcagggagatcttgtctttgatggactggttgagcgggcggtcggaacgcagcacgagggcgtccggggagatgccgagttgacgcagcatcatcacggagtgctgggtgggcttggtcttgagctcgtgggcggcggaaatgtacggcaccagggaaacgtgcacgaacatgcagttgtccgggccgagatcgcggcgcacttcgcgggcggcctcaaggaagggctgggactcgatgtcgccgacggtaccaccgatttcggtgatgatcacatccacgtcatcggaagcctgggcgcgcatacgagacttgatttcgttggtgatgtgcgggatgacctgcacgcactggccgaggtattcgccggcgcgctccttgcgcagcacttcctgatagatctgaccggtggtgacgttggccttctggctcaggaagacgtcgaggaaacgctcgtagtggccgatgtcgagatcggtttcggcaccgtcttcggtcacgtagacctcaccatgctggaacgggttcatggtgcccgggtcgacgttgatgtacggatcgagcttttgctgcagaacatggataccgcggctgcgcagcaaacgaccgagcgaagatgcggtcaggcccttgccgagagaggagacaacgccgccagtgacgaaaatatgcttggtgacgtgttcttgagaattaccatgtgttcttctaaccatggaatttcactctatcatccgtgtatgacccggcgtgttcatgacgtggccggtgtagtcgtgcgtaggcagcccatctcgttctgccttggccagcatatggtcgaatacacggcgtacttcgggtccataaggcacgcccggacgaggattcgggtccgattcgtcggaacaggaatcccgggcgcaacgtcgactgctacctgggattggctggagggcttggttctattcgctcagcaagtgcgccacagcatcgagcgcgagcttgtagccgtagaaacccatgccggtgatggtgccggtggccacagggctgattacggaacgcttgcggaactcgtcgcgggcggacgggttggaaatatggacttccataagcggcaggttctcatcaatgaccatgtgcgcggcgtcggcgagagcatacgaatagtgcgtgaaggcggcgggattcatgaccaccggggttttctcgtcggcggcttggtgcatccagtgcaccatttcggcttcgtcgtcggtctggcgcacctcgacttcgaggccgaggtccttgccccattcggcgcagagcttgcgcagggtgtcgaggtcttgacgaccgtagacgtcgggctggcggacgccgagacgtccgaggttagggccattgacaacaatgactttggtcattgggactccttttgtttgtgcttctctccctccgccccttcggggcacctccctcatcagagggaggtagaaggtaaatccgactccggggcacctccgttagaggggagccaagtactttttctgaggggatggcgaacggcacggcctacggccgttcaattactgctggatacgacggaatgcttcttctacggcttcggcgggcgggttgtcgaggtgtacgacgtgaccaatctcgtcgaggaccacgaaacgcagttcgttgccacgggctttcttgtcgcgatgcatcaatgcgagcacgtcgtcgaacgagctgccattccacgacgtcggcagacccagcgaagcgagcaacgaacggtgatagtcaaccagatcctgatcgatgtaaccgatcagatgggccagctcggcggcatacaccataccgacggccaccgcattgccatgcctccagcggaagtgctcgagcttttcgatggcatggcccatcgtgtgcccgtagttgaggaattcacgcagacccttctccttcaaatcggaggagacgtggtaggccttgacctttaccgtgcgctcaatgagctcggcaaccacgtcttcgagcggcgagccgaggaatgtagagccgtcgaaagcgcgcagttcagctgcgtggtcttcgaggatatgcaggatttcggggtcgcggatgaaaccggatttggcgacttcgccgagaccctcgatgaagatgtcattgggcagcgtagccagcgtcttggtgtcggccagcacaccggcaggcgtgtagaacgagccgacgaggttcttgccctgcggggtgttgatgccggttttgccaccggtggaggcatcgaccatggccagcagcgaggtcgggcagtttacatagcgcacgccgcgcatccacgtggcagccacaaaaccggccaaatcggttgcggcaccgcctccaagccccaccacggcatcggatcgggtgaaaccttcgttgccaaggcgttcccaaatgccgttggccacggtaatggtcttgccgggttcggcatccggaatcacgatgtcggaaacctcatagccgccctgacgcaacagggcgcgggcacgatcggagtgtcgctgcaccggctgggtatggataagcgcgattttggcgggcttgggtcccagcacgtcgaccagatgattcatggccccttcgccaatgaccacatcatacggctcaattgccgatccggtaacatgcactgctcgctcagataccatatcaatcactttcttcgctgcgccctgaggcgtaagcccccgggtatggacatgaacgttggcgacctcgcggaataccgggtcacgctgcttgaacagtttcttccaacgggagttggcattgccattgagcatgggccggcctcccccgcggttcgcgcgttccatggcctccgccggatcggcgtcaaggtagaccacacgaccgccatggtcgatgtatgaggcgagggcatgctgggtggatggcgtcatgggagcgccaccgcccagcgaaaagataccgtcgaaatcctcaagcatatcggcgatgagatcggcctcgacctcgcggaatgccggctcaccgtattcatcgaagtaggcgggaatcttcatgcccacttcacgttcgatctccacatcggcatcggcgaacggcagacgcaacatatgcgccacttccttaccgacacgtgttttgccggctcccatcatgccgatgatgacggcgcgggggcgtgcggtcataatctacgaatcctctcgacgattggcgggtacagttgctgatggttccgcggcagtcgtctcggaaccatactccacttcgttcagcgcatgtgctccggccacgaggcgagatacgactcaaggttgcgccgtgtttcggcaacactgtctccaccgaacttatccagcgcgtacttcgccaaagtcagacgcaccatggcctcggccaccacggatgccgcaggcacggcggtgctgtcggaacgctggttgatggcttgtgcggattcgccggtcagcacgtcgaccgtacgcagggccttggggatggacggaatcggcttcatggcaccgcgtacgcgaatcacctggccattggacataccgccttcaatgccgcctgcgcggttggacagacggtcgatgcggccgtcggcgttgaccacgatctcatcgtgcgcctgcgaaccggggcgggaggcttccaggaagccgtcgccgatctccacacccttgaacgcctgaatgcccataatcgcggaggccagagccgcgtccagacgacggtcggattccacatacgtgccgatgccggcaggcacgccgtaagccagcacttcaatcacgccgcccaacgtgtcggcggccttcttggcctcgttgatgcgttcgatgatgcgggcctcggcctctttatccaacgtacgcacgggagaggcatccaacgcttccagatcgtcaggcgtgggcaacggcaaatcagggttggtctgcacgccaccgagcgccaccacgtgggctacggtgcgaatgccgaacgcctgatccaggaactgcttggccacctcgcccaaggccacacgggaggcggtctcacgggcgctggagcgctccagtaccgggcgggcgtcgtcaaaaccatacttgcgcatgccggtcagatcggcgtggcccgggcgcgggcggctcagcggcgcattgcggccttcgcgcggcaggtcatggtcgagtgcatcggcgctcatgacctcggtccacttcggccattcggtgttggcgatttcgatggccaccggcgagccgagggtcaggccgtggcgtacaccggtcagcagacggaccttgtcttgctcgaacttcatgcgggcaccacggccatatccaagtcgacggcgtgccagtgcggaaacgatatcgtccgtgctaatgcgcacgccggccggtaacccttcaatcatggccaccaatgcttctccgtgagactcccctgccgtctgccaacgcagcataacttccctcgtttcatgtgtgtacgtctatgtgtacgtctaactaggggttaatgttaagccatgccatacctgttcacgctacccggtctgctatgtgggcttgcactgtccattgaggatgttcgtcatcggcgggtgccgatcgcatgggtggccgtgggcgcgttaatccagttggccgccgatttcgcgcatggagtggtggcgaacgacctgttcgtgctgttgcaggcgctgttgttcaccgtgctatgttgcctgatccagttcgcgttggcgttgctggtgccgcggtcattgggattcggcgatgtgaccgccttgatacctatgggattgtctgtcggactgtttggcctgttgcctgtggtggtctggtggctggcgatgggcgttgccggcatcacatggcttgccttgtggacgcgattcgacccgcaacgcacatcaccggcacatgcgagcaaggtgccgtatgtgccggtgatattggcgggcgcgattgtggcggtggtggttggggcttaatcccgtattactcccctcagtccgctttgcggacagctcccctcggcgaggggagccaatgaggtgactactggttttcggcttgccacttgcgtagttcggccacgttctggtcatgttcatcggcggttgcggcgaacttggtttcgccggtgtccagattgaccgtgcagaagtacagccaattgccgctttcggggtgcagtgccgcttgaatggcgctatcgccgggattgctgatcggcgtaggcggcaggccggagatcttgtacgtgttgtacgggttggactcgtcctgggtcatctcggtggtcacctgcgcgggcttgacgttattgccataggccacggtggaatccatgcccaacgacatgccctgctccaaacggttctcgatgactcgcgtcactttgccgtagtaatcggctttgttgacctcggcctcggcgatagaggcgatgatcatcacccgttcgcggtcactgccggtcggcacgcccaattcatccaacttggcgatacgcttatcgaccatggccttgaggatttccgaagcgctcttcatgctcttgacgttgtaggttcccggctccagccatccctcaaagctaccgcccgcttcattgggcagaatatccttacccttgttcttgataatcgtgtcgaattcgctttgggaaatgccggaaagcttcgcggcgtcggcgaacacatcggtggcacgttcaccgggacgaacctcaaggaagcccgacgcctggttggtgtcggagagaacggcgatcacatcggatgcggccatatgcttcttcaatgtgaacgttcccggatagagtgtcgcgctattggcgttgaccacgctggtgaacgcggcagtagacttgatgacttcggccttgagcagattatcggcgatctccgccgcgccttggccctcgctcacggtgaattcgacctcgccatagcccggtccccgatagtccgcgatgaccgtcgactggttgctccggctgtcgcgccatgcgatgagcttggttacgccgaaatagccgccgccgataagcagggcgacgatggcgatagcgatgataatgccactgacgcgcttgcgcttgcgctgtgcacgtcgcttgcgcatctccttgcgggatttcggcggttctggcggctcggtcccgcgcattggttctgacccctgttcgacccaatgcgtgttgtcatcaaagaactcgttaaaatcatcggtcataaccgatacctcactgctcccgggtacggtcgagtgccgtctgcaaaatcaccactgccgactgctggtcaaccaccggcctgtgcttgttcgaagctttatgggcctcgaacagttgacgatgcgcactgactgttgtcaatctctcatctatcaatgacacctgcggaatctgatactccgtagaatcactgtcttcactctctgcttgcagcctcttctccagattggccgcccatctgcgcgcttttttggcgcttttgccttctgtaccgtccatctgcaggggcagtccgacgattacatggtccacatgttcgtcttcgatgacgttcaggacctcgtcaatagcaaagaaatagtcgccggcaacatgaatgttgccagcagggtgtgcaaaggtaagctccgggtcggacagtgccagtccgacccgggcattacccaaatcaacgcctaaccacaccactggcggaatcaggctttctgcgcctcgtgctcgagcgcttcgagggcctcgtcgatcttggaggcatcgacaccgccaccctgggcgaagtccggcttgccgccgccaccgccgccgaggaccttggctgcgccacgcaccagatcaccggccttgatgccgaccttgcgggcggcctcgttggtggccacggcgaccatcggcttgtcatcctcgttcacgccggcgagggccaccaccacgggggcgtcttcaccgagctgggcacgcacgtcgagtacggtcttgcgcagggcgtcgaccgcgccgaagtggcccacgttcttgacggccaccttgaccggggccgcggagttcttggtgtcagcaaccagcgccggaaccgaggcggccagctgggactcgtacatggaggccaagcgacgatcggattccttgagcttggcgagcagggcgttcacacgctcggcgagctcgtccgggcgagcattgagcttgtcggacagctgggagaccaacgcgtgctcacgagcgttgaagtcataggcaccctggcccacgacggcgtcgacacgacgcacgccggagccgatggaggcttcggacaggatgttgaccatgccgatcttgccgacgtggtccacgtgggtaccaccacacagctcgcggctccagccgtcttcgccgatggagaccacgcgtacgatgtcgccgtacttctcgccgaacaggtgcatggcaccgagggcgatggcgtcgtcgaacttcatttccttggtggtcacggcgaggttgtcgcgcagcttgtcgttgacgcgctcctcgactgcggagatcacggacttggccggggccttggaccactggaagtcgaagcgcagacggttcggggcatcctcggagccgcgctgggtggcctgcgggccgagctcctcacgcagcgccttgtgcaccatgtgcgtggcggtgtgagagcgggcgatggcgccacggcgggccaggtcgatgttggcgttgacttcggcgccgacgaccagcgtgccttcggtcagacggcactggtggacgatgaggtccttgatgggcttctgcacgtcgtcgacttcgagcactgcaccgtcgtcggacaggatctcgccctgatcggcaagctggccgccggcctccgcatagaacggggtacggtcgagaatgacttcgacgttggccgggccggtgacggcgggcacggagcccttgccttcctgcatgatgccgatgaccttggcgcgggcggacatatccgtgtagccgaggaagtcgatcgggctgacgagcgtcttcttgaaatcgtcgtagacggagaggtccacgttgtggcgcttcttcagggcgtcggcgcgggcgcgggacttctgctcggccatgagttcgcggaacttggcctcgtccaccttcacgccctgatcggcggccatttcgagggtcagctcaatcgggaagccgtaagtgtcatgcagagtgaatgcgtcggaaccggagaccaccggatcggcggtcttcttggccttcttgacagccacgtcaagaatctcaatgccgttctccaacgtacgacggaacgcatcttcctcgccataggccgcttcagagacatcatggaacgtgtcgttgagctccggatagctggcgaccatggcctccttggagacgggcagcagctcgggaatcaccggatcggtcacgccaagcacgcgcatggcctgcacagtacgacgcagcagacgacgcagcacgtagccgcggccgacgttggacgggcgcacgccatcggacataatcatcagcgcggaacgcacgtggtcggccacgacacggaacttgacatccgcggcctcgtcctcgccgtacttgcggccggacaggcgctcggcggcctcgatgaccgggaagacctcgtcggtctcatagatgttctgtttgccctgcatcaggtaggccagacgttccagaccggcgccggtatcgatgttcttctgggccagctcgccgacgatgtgcaggtcggtcttggacttgacattgtcgacctcgtagttctcgaacacgagatcccaaatttcgataaagcgcgtctcgtcggccgcagggccgccatcacggccgtattcggggccgcgatccacgtagatctcggagcaggggccgccggggccagggccgccggtggtccagaagttgtcttccatgccgaaaatctgcatgtgctcgggatcgaagccctcgttcttccagatggaacgggcctcttcatcgtcggtaaaggtggtgacccacagcttttccgggtcaaagccgtaaccgccctcgctctgcggggtggtcagcagctcccaggcgtagtggatggcctcttccttgaagtagtcgccgatggagaagttgccaagcatctggaagaaggtgccatggcgggtggtcttgccgacctcatcgatatccagcgtacgcacgcacttctggttcgatgtcatgcggcgcttcggcggggtctgctcaccaagaaggtagggaatgaacggcaccatgccggcgatggtgaacagcgtggtggggttcggggaaatcagggatgccgaaggcatgacgagatgatcatgtttggcaaagtaatcgaggtatcgctttgcgatgtccgcagtgcgcatgagcggatgaactccttgtttgggtaatgggcgcagttgcgcctggtattggtggaaaaagactggattatgaggactagtttgttctagctggttcagtgactagatggcaaggcggcatgcgcgtgtcagttggcgcgctcgatgtactgacggttgagctcagcctcgcgggctcgacgggcggcattgaactcgttgaccaacccttcgagtgttttcatcggcacattgtcctgatcggggccaagcaggaactggcgtgccgcatcaggtgtattggccttgacataggcctgtgccttggtgacggcaacgattccgatggccacgccgacgccgacccagaagatgcgtttgaacatcactcccccttctcggcggtgtcgttgacggtggttttcgcggcgttcttcgcaaggaaggactgacccgtggttttcagcgcgtagaaggtggaagcgatcttgatgatgggcttaccgaggaaagagccatacagatcagtcaacgcaccaacgttgttggcggtggtggaagccgcggcggaaatcttgttcacgtcttcaagcgacttgttgacctgcttgacggtggtcacgccttcgtccagcgcggggatggcgtgttcgccggactcccggaccgtctgcgatatctgatcaaacatcttgcccagcctgatcagcggatagatcatgaaaccggccaatactgcgaacgcgatggccgcgatcaggccagcgatctctccgactcccattgtttcctccttgcggtcgcacttactcgcctaagggtagcactccttccctatttcttggcataccattgcacgcgcagggcgaaaaccgtgcgcgtggatgcatgcggctataggcgaaaggtgtcctgctgacgctttcgtttgcggcgtgccgccgtggaccgtacgtgctattcgatatgtattgcttgctatttgctacttgccgtacgaaacgatggtcacggcctcgccgaacggcttgtcggtgtcgaagtcgagcacggttaccgaaccattggccgggcgttcgttcagatcgaggtcagggccgccgaaccggtggccgaggctaagcagtgtgttgccatgcgaaatctgcagcacatcgtcgccatccttgagattcgggttgtcggcgataagacggaacgcgccttcgacgcgcgtccaatattcctcatcggattccgcatcgtggaagggatcggcttccttgagaaaatcacgcgaggcccccaacccgaacttctcgacgatttggttgtaggttttggcgccgtgaggcgctcccgcggcgtaccaggccatggccatgtcaagtccttcgtagtagccgtagaactgctcgcggaagtgcatgtccgtcacgagtgcggggcgcgggttacccgcggcttcgttgatgtcgagaattttctcggccgtctgccgggcacgcgtggtgtccgaacagtaggcggcggtgaacgtcaatcctttcagtcgctcaccggccttgacggcatcagcgacgcccgactcggtcagcggcgaattcgaccatccctgcagacggttgtatcggttgaaataggtctgtccgtgacggaccaaatgcagatgaagaatcatggttccgattatgtcaccattccggcggtttcggtgcgggctgccggaagtcataagtcataacggcataggtcactacctgagatatgcgtaatccgggtagtatacctgacgattcctgagagtacacttagggtactatgagcataacctcgaaacctgcaccatctcaatcgtctgagcctgcccatttcaggggtatcgatggactgcgcgctctggcgattcttggagtcatagcattccacacccgcccgtcgctattgcagggcggattcattggcgtgacgatgtttttcgttatcaccggttttcttgccacacgttcagtactgaacatggtggaccgcaccgggtcctttggatatggccgatatctgatccgccgcattactcgtttatggccggtgatgctggcgaccattgccgtggtgccttggctcacttggatgttcgctcccagcctgttgcagaaagtggtttccgattcgctgccgagcgccttgttcgccagcaattgggtgtacatcttccgcaaggtgccgtatttcgaggcggccggattgccttctcctctgacccatctgtggttcttgggcgtgacgatgcagttctatctgatttggccgttgctgatggtggtgctcggcaaaatcaccaagtccaaatgggtgcgctccatggcgattcttgtcatcatggctgcttccaccgccgccatggtgctgctgtttgacccggccaatacctcccgcgtgtattacggtaccgatactcgtctcgccgagctggccgccggcgcgctgttggctatctggattgcgccttcctcgcgaggtacggaagttgcggaagctggagcggcttcgcaaacagtgcagatcggacgtcaggccggcgacaagacgggcgcccgtctcactatcgtctgcaatgttcttggcaccgcggctttggcggcactgctggccggattctggttcgccaacgggtatctgtcgtacatgtaccaaggcgggtacctgattaccgcgttcatatcgttgtgcgccttggcctgtgccgtgaacaatgactcaatctggtcgcgcgtgctgggttgcgctcccctacgctatatcgggtcgcgatcgttctcgctgtacgtcatgcattatccgctgctgcagttcatgaacccggcgacacgaacgcaggcgttgccgtggtggggttgggttcttgaggccatcgtggtgttggcggcgtcggaagccttctaccagctggtcgaggcggcccgtaaatcggtgcagatgcctcgcagccaacatgccaagccgctgccgaaagccggctaccagctgcgcccgggcgcgtgggtcatgtcggttatcggattggtgaccgttgtggtgctgacgtgggcaccggtggattggaatggcatcgctcaagcgcgagccattcagctgcgccccgaactcgcggcacccgccaagccggtcaagaaaccggcgaagcccgagcccgagtcttctgccacgaatgccgcgaacggcgaaaccaataccgatgacgcgaataagaacggttcggattctcagccgcccaccatcaaaccgattgcggaaaaggtgccaaacaatcttgacatttcgaagtacgcctatgatccggcaacggaaagctgcaacgcggatatgatgatggtcggcgattcagtgacgtcgggtacttcggacgccatccaggccgcattcccgaacgcttttatcgatggcctgccgaaccgtcagatgccgcaggcggtggatgtgtatcagcaggacaccgctgccggccacagtggcagtgtggtggtgtttggcctcggcacgaacggcgtgatttcgaatgagcaggaagtgcaacagctcattgacctgaccggcggcaagccgacatacttcatcaccatccgtatgccatacccgtggcaggagaacaacaacaatacgatgctgcgtgaggccgccaagaagaacaagaacgtgggcatcatcgattggcatgggtatagcgaaggtcatagcgaatacctcaacgatgacggcattcatccgaatatgaccggtgcctatgcgtacgcgacgatgattcgtcaggcggtgtgcggccagtaatcgccctacaacgcaggaaccccgcggcttctcgaaagaagcgcggggttcgagcggtatgtcctggatttgttgaccagagggcccggatcagcgggcgtagaattcgaccacgtactggatgttgacctgcaccgggatctcttcgacctccggcttacgggtcacagtggccttcagggacggcaggttcacgtcgaggtagccggggaccgcaggcagcacgtcacggtgcacgccttcggcggcgatctggaacggaaccatggtctggctcttggccttcacctgaatggtctggccgggcttgacgcggtaggacgggcggtccacgatgttgccgtcaacgaggatgtgacggtgcaccacgaactgacgggcctgggcggtggtgcgggcgaagccggcacgcagcaccaggttgtcgagacgggtctcgaggtcggtcagcatggcgttaccggtctggccggcagtacgggtggccttctcgtaagcggcgcgaagctgcttctcggagatgccgtactgagcgcgcagacgctgcttttcgcgcatacgcaccgcgtaatcggactcggtgcggcggcggtcacggccgtgctcgccaggagcgtacggacgcttttcgaagatgcgctgagccttgggggtcagtgcgatgccgagggcgcgagacagacgcacctgacggcgagaacgctgaacgttcgtcattggattaatccttctgtcgttatctgaacggaacgcttgccttgcatatgtctggcaagcgctgagccgggcctccccagcgcttcgtcgtgaacgaacacgaacgggttggttttcttgcgatcacctaccgccgacccgctgatgggctatgactccagacggtatctacctgttggcagacaccagcagaccatattacaccgaggctatggacagcactccggcgtccatgcgatacacccggtctgcgtattcgagtgcatcgggatcatgggtgaccatgagaatcgccgtgccgttgttggcttggtctctgagcagacgcattacgatgtcggtgctctcctggtcgaggtcgccggtcggctcgtcggcgatgagcaggctcggctggttcatcagcgcgcgggcgatggagacgcgccgcatttcaccgccggacagctcgcgcgggtagctgtctgccagatcggcgacaccaagctgggtgagcagcatgcgagctcgggtggcgaacaggtccggacggctcgcagccgtgtttgacggcgtgttttcccggtctgtgattggcgcaatgacatccggcatgaacaggtcggcggctgcttcatcattggtggcagcggcttgtgccacggcatcggtcgacgcaacagcgtccacctgagcaacggcatccgttgcttctgcgttttgggcgaacggcagcggctccggaaacatcgttgcgggcagaatcacgttgtcgagcacggtcaggttgccgagcagggtctggctttgggtcacgaatccgatggtgcgattcctcagcacggacagtgctttatcgcccaagtcggccacattgcgtccagccacgctcacggttcccgaggtcgggcgaatcagcccggcgaccatgttgatcagcgtgcttttgccgttgcccgaccggccgacgatggcgatgaattcgccggcatcgacggtgaggttcacgtggctgacggcgtcgaacggcgtgccgcggcggacgaactggcgggtcaggtccgtcaaggtcagcagatggtccggggagggcgtctcggttacgtgcggcgaatccggcgcagtcggcgcgttcggctgagctggcgtggtcggctggagcttggtcggctcaaccgtggtcagctgagtcggcgtagttgtctcagtcatatcactccccctctcgcagggtcaggtaggcttcgggccggccgagacgccacatggtggccagcgaaccgatgatgccgatgaccgtagagcacacaatggtcacggcaatgaatccgatcaccgcaaccgggctggcttgcagatacggcaattgaagttgtttgccgatcagcgaactgaatgggaaaatcaccaggctggccgcgccgacgccgattacgccaccgatcagaccgatgatggcggattccttcagaatgatggcattcaacatgccgcgcgtggcacccatgatgcgcagggacgcgaattcgcgtttgcgttcgttcaccgacgaggcgaatacggcgagcagcacaatcacgcccattacccagatcaccgccacgaaaatcttgaggtaggtgacaagcgcggtcagcgaagttctggtgttggcggtgatgccgccggggtatacgtaccccaaatcggcgaaccgggagtcaagacgtttgatgttttcagccacggtctgcgcttcgtaaccccgctgcgtcttgatcatcacggtggagacggcttcgcctgcatattcggcgggcatgacctgcttggagaccttggccgaggcggcgaccatatcaggcacggtgttttggttgatgaacaccgaattgtcgaggctggtgccggtgttggcgagctgggcgacgaccggccacttatggccgtagagttcgatggtgccgtcggtggacacgttgacgtttgcgccggcaatcatctgaccgtcttcaagggggccttcgaactgggatgcgacccatggttcgatgacgaagtcagtgtccgggtcgtaaccgatgatctgcagcttttcggcacagcaggcggcggccagcgatgatatataggtctgttcggtggcctgtgcgatgccgtcggcctgcatgacctcgtcggcgatgtctttggtgaaatagaaagtgctgggattgccgctggtgagcagcgcttcagccttctgcgcggtgttttgcggcacgaccataaggtcggcgcccaggcgcttctccatactggtcatgccggtgttgaggttcatggtcagcatggtgccgccgaagaacgtcagcgcgaggatggtgacgacggcgagcagtgcgccggtgcggaacggcttgcgtttgaggttttcaatcggaaggccgcgcaatgcgatatgggatggcacgatgagtccttatgttgcttatagtgcggttgcaataagcgagaccggagtccagcgttcggaatggctgggctccggccgtctgctcgatcagttgcgcttggcggcgtgagagtcgagccagatggcgatggccgcgaacacgatggtgagcacgccgagcacgatgagcgtgggcagcataaccatgcggcagtgcatcatcgcgcccttgcagatgccgatcaggaaggtgggtacggcgagtagtagcagggcgttggctgcggcggcgatattgaggccgatgcgaatctgcggggcgacgaacaaagccacgacgcccaacacgaggacgacgacgccgatgccggtggccgcctgctgcgagtagtggcaggcacccggcatgtcatggccggtgcaggcgtgcgcaaaggtctggggcgcgatggtgatcagcgcgccgaacagaatattgggcacggatgcaaacagcttgttcttcataactactttttcctctcccctgttcccagggctcgtaggcgcaacctccgcattatgcccagatagtgatgaagaacacaagtcttgttttttgtgaatttatttggtatataactcagcccctcgtcagaggggccaatctatctacaacttctcaataggtgctacgcggagcatgaggcgtttgacgccggcggagccgaagtccacggtgattaccgaattgcggcccttgtcttgcgcgtcggtgaccttgccgagaccgtactggtcgtggctgatcatgtcacccacggcgaagtcggcgatattcaggccattgtccttggtgagcttcgagctgggcacggcagagccggtcgaaccggatttcggtgtggtgcggcgcgtggtgaccttgccgccacgggtgccgccatatgaaccggatgaagaaccggaacgggaacgcgacccgtaagacgaccccgaacgggagcgagacccgtaggaggacgagccggagcgggaatcatatgatgatgaacgggaaccgtacgaagaacctgaacgggaaccgtacgaagaacctgaacgggaaccgtacgacgaggagccggaacccgagccatacgacgacccataccgcgaccgcgacccataggacgaacccgaaccggacgaaccacgcgagccgaacgtcgacgacccgccaaacgtggcaccgccgaaatcgtcatcatcccagccgcccaaatcgtcggcgaatccatcggtctcccagttggcgcgcatacgctccacgccggcttcacggcgtttccaatcaatcagcgaatccggaatttcgtcgaggaattggctgggcatcatatcggcggcctggccccactgggagcggacggcggcacgcgtgacgtacagtctctgcttggcacgcgtgatgcccacataggcgagtcggcgttcctcctgcagttcagtggtgtcttccatcgaacgcgaatgcgggaaggtgccctgttccatgccggtcaggaacaccaccgggtattcgaggcccttggcggtgtgcaaggtcatgagcgtcaccttgccggagtcctccgcctcaccgggcagctggtcggagtcggccacgagcgcagtggtctccaggaatgcggacaacgtggcgtcaggcgtgttctgttcgaattcggctgcggtggactgcagctgggagaggttctccagacgggaggcgtcctgcggatccacggatttctcaagttcggcccttaagcccgacttctccaatacttcggccacgatctcgctgggcttggagtcgtgcgcgtgcgtgaactgcgagagcgcgcccatcagatcgcggaatgctcgtagcgaggtggcggtgcgggtcggcacctcgatctcatccaagtgcatgagtgcgtagaagaagctggtgccatgctcgcgcgcgtaggcgagcagcacgccttcggcgcggtcgccaagcccgcgcttgggcacgttgagaatacgacgtagattcacatcgtcgtccggattgacgagcgcctgcaaataggccagcgcatccttgatttcgcgacgttcgtagaacttggtgccgccgacgagctgatacggctgattcgtgttgatcagcgcctcttcgagcgagcgggattgggcgttggcgcggtacatgatcgccatgtcggagtaggagatgccctcttcggcgtgcaggcgcgcgatttcggtggccacccactgggcctcctgctgggcgttgtccgccgcgtagccgacgatcggctcgcccttgccgagcgcggtccacagtttcttgggcttgcggccctcgttgttgctgatcaccgcgttggccgcgtccagaatggtctgcgtcgaacgatagttctgttcgagcatgatggtcttggcgttcgggaagtcctgctcgaagtcctggatgttgcggatgtcggcgccacggaacgcgtagatggactggtcggaatcgcccaccacggtgatccaggcggggccggacttgccggcgttcggcgcgcccgggatggccttctcccccgtgtccacgccggccagctcgcgcacaagcacgtactgggcgtggttggtgtcctgatactcgtcgacgagaatgtaacggaagcggtgatggtagtactcggcgacggccgggtcggtgcgcagcaactcgaccgtgcggccgatcagatcgtcgaagtcgacggcgttggccagggccaagcgatgctcgtattcggcgtagatcaccgcatagatggcttcaaggtcgcccaccgtgccgaactggtagccgcgctggccaggcgtgaagtcgggcgcgtgaacggcgaggttttccttccaaccggtcagattgttcttgaggtcggagatatggccgaggatcgagcgtggagtgtagcgcttgatgtcgaggttgaattcggtggcgatgattttgacgagtcgctcggagtcggcggaatcataaatggagaagccggacttgagcccgatggacttgccgtcgcgcctcagaatgcgcacgcaggcggaatggaaggtggagacccacatgcgctgggccaccgggccgatcagcgagccgagtcgttcgcgcatttcggcggcggccttgttggtgaaggtgatggccagaatctggctcggccatgcgccgaactggctcaagatccaggcgatgcggcgggtcagcacacgggttttgccggagccggcaccggcgccgatcagtagcgcctgaccgcggtattgcacggcttccgcctgctgcgggttcagatcgcctacgagttcctgcgcgctgcgtgcgatgacttccggctcgtcgtacactgttgcctccctttgaatcgcgacattcatgtttaccacatgcacgggtcagcgcaggacaacgtacacttacaagtatccatatcattcactgacatacagcaatgggaggtctaatgcaggaacttgaggagcgaatccagagcgagggaacggtgaaggcgggtgatgtgctcaaggtggacgcgtttctgaaccaccagtgcgacgtgcgtctgttcgaccgcatgggttcggcatgggccgctcatttcgccggcaagcacatcaccaagattctgaccatcgaggcgtccggcatcggcattgcgtgtgtggcggcccagcatttcggcaatgtgccggtggtgttcgccaagaaggcgcagtccatcaaccttgacggcgaccagtacaccaccacggtctattccttcaccaagcagaaggagttcccggtgatcgtggccaagaagtatctgaacgccggcgaccatgtgctgcttattgacgattttctggccaacggcaaggcgttgcgcggtctgattgacctgtgcgaggcggccggtgtcacggtcgagggcattggcatcgccgtggagaagggcttccagggcggcggtgacgcgctgcgtgccgaaggctacgatgtggattcgctggccatcgtcgagtccatgaatcccgagaccggcgaaatcacatttaggcactgagcacattgactgctcccgccagcgggagcaacagagagaagaaaagaatcatgtcagagaagaaaaccaagaattccgtatcctttgaggcgctgtcttcgctgaacgcgccagtatccttctggaagggcattccgttcggcctgcagcatgtgatggccatgttcgtggcgaacctcgccccgatcttcatcgtcgcctcggccgcgaaaatgaccccggcccaatcggccaccatcatccaggccggccttctggtggcgggcctgggcacctgcctgcaactgtacggcgcgtggctcatcggctcgcgtctgccgatggtcaccggcatctccttcacctacgtggcggccgccgtggcgatctgcgcagacaagggctatggcgcagtggccggcgcggtaatggtcggtggcctgctggaactcgtgctgggtttgacggccaagtattggcgtcggttcgtgccgcccatcgtctccgccatcgtggtcacgtcgatcggcttctcgctgcttaacgtgggtgccacgagcttcggcggcggcagcggagccaaggacttcggaagctggcagaacctgacgctcgggcttatatctttggtcgcctgcctggcgttccagctgttgatgaagggcacggccaagcagctgtccgtgctgttcggcctggtggtcggctatgtggcggccatctgcatgggcaaggtcgatttctccggtttccagaacctcgccatcgtgtccgtgccgcagttcatgccgttcaagcctgagttcgactggggttcgatcatctccatcggcctgctctacgtcgtctcctcggtcgaggtgctgggtgacaccgccgcgctgaccagggtgggcctgaaccgtacgcccaccgaacgcgagaccgcgggcgccatcgccggcgacggcctgatctccaccgtatccggcctgttcggatgcctgccgctgacctcgttcgcacagaacatcggattggtggccatgaccaaggtcgtcaaccgcaaggtgattctctccggcggactgattctggtgctggcgagcttcgtgccggccatcgccgaggtgttcaactcgctgccgcaggcggtgctcggcggctgcacgatcatgatgttcggcaacatcattctttcgggcttccagatgatcgccgaagcgggcttcacgcagcgcaacatcacgattgcggcgctttcgctgaccatcggcatcggcttcacccaggtgagcgacatcttcgcgcagttcccggcactgttccaacaaatcttcgcctcgaactgcatcgccgtgtcgttcgtggtggccgtaatcctgaacgccgtgctgcccagcgaggagcacttcctctccgcgcccaaggaggcaccggccgcggacgccgagtgataacaacgcgacatatcagctgcgcataatcacatgctgatgccctatcgtcttgcaggatgatagggcatcattgattttgagagagactacaagttgaaccatgagttcgagccggtggcgtgtcgatcaatcgacatcttcccattcgaggatgtctccgggttggcagtcgagtgccttgcagatggcgtccaatgtggtgaagcggacggctttggcacgtccgttcttcagaatggacacgttggcgggcgtgatgccaatttgttcggcgagctcgccgacgccaatcttgcgtttggccatcatgacgtcgagattgatgcgaatcgtcatctcaaatcacctgctcaagttcgcgcccgatccggacaaggagaacagtttccatacggccacgaacgccgcttcgatgcagagcaggaacagcacgcccataatgagatatgaccagtgcatcgacgtctgtctcgggcagaggccggccagcgcgccgctcaatcccggtacggcgaatagttggccccataggcaggccagccagaccagaatcacgatggctttcaacgcgagcaacacccatcggttcatgtagtttttcatagcccggtcctttcaggtgccgacgtttttggcgacaccgcgaacatcgatatgactatatcgaaaaacgatataccttgcaaggcgtattgcgtcaaccggcattggtcgctcatatgcatataggcttcggcagactgtcagcagaccgtcagctcaacggaacgaacgccatatgagccacccattcgcgcacgagcgtgatgacggcttcgggttggtcgatgtgcgcgttgtgaccggcattatccagagtcacgaaggtggcgttgggatagtgcggcaacagggcttgctggtcttcgtatccgacgatctggtcttgcttgccggtgacgatgagcaccggaccagcatatgtgccgagcatttcctcgggattatcggccagccaataacgctgatccagtcgttcgcatgccgcacggtcgcacaacgccacgccgggcaggatgaaccgttggtagcgccgccacgcgtcgaatgactggttgacgcccatggtaatgaaatcgaacacctgttcctgtggcaaggagtgcgtcagcttgggattgggctgtgcaaccacatgttcggccacatgccggccggtatgctgcgggtccacgaccggcgcgatcaatgccataccggccactcggcgaggttcgcgcgccaatacttcgcggacaagcgcaccgcccatcgagttgccgaccatggcgaatggagccgctttaccgacaaggccgtcaatggccgtttgcagccaatccgccatttccggcagcccgcaggcatgctcgggcaatgccggcgtacggccgaaaccgggcagatccagatatatacggcgaattgaatcattgccgtcaaacgccttgtcgagcatcatcagcgaacgatggtccacacccatgccatgcacgaacacgacgggcaatccatcatcattgccctcaatcgcgcagtacggctgcaattgtgccatgtgttcctccccttcaacccggtacaaatcgcctttcacacaatagcggcagcagctcccctggtgtcggagcaatcccgaccgccattctcggtttcgaggggctgatttcgtggtttggggacatccacttccgtttcaaggggctggtcattggccaaaacccaagtacgaatggcttcatgccaacgtcatttcgccgttttggagctgtcgctactcggccatcagcccctcgaaacggaagtggatgtctcggaacgagcaaatcagccccttgaaacgcaaatagacgattgcgaatcgacttatcagccgcgtcgaacttgcaatagagatgtcggtgtatcattccccggtctgattgcgcggatgtcaggaagcgtgaagaattgtcacaaagtcgcgtgatggcgcagccgccgttcaggtggatatgccacgctgtcatgaggacggccgagccggaacacggcaaatctcgcatgctgcataggccagccggtcacggtcagccatgacaccgaaatattggaggcgcaatgggacaacaggtgcggtgcggcagacgccgctcccatggcgcgggcgcgctgattgcagccgtcatacttgttgttgcggcgctgatcgcggcatggacgctgctgccacggctattcacgcctcacgagaccgcgcgcacggccgaggaagcatattgcgcggcggtgtcgcccgacggagcccgccgcaccttgacgcctgatcaggcgcagaacgcggcgctgattgcgaacatcgccgtcacgcgcggactgccggatcacgcggcgacggtggccatcgccacggccatgcaggagtcgagactgacgaatctggactacggcgacttggattcgctcggcctgttccaacagcggcccagccaaggctggggcacggcggagcaggtgtccgacatgacctatgcgacaaacatcttctacgaccatctgctgcaggtgccggattgggagacgattccggtggaggacgccgcgcaggaggtgcagcgctcaggctacccggaactatatgccacatgggatgcgatggcacgcgcttgggcctcggggctgaccggcgaacggtcggcgggcgtcacgtgcgcgttggagccagcaacctcctcggacgcggacgggttggttgccgccataagcgctacactgccgaatgtcaaggtctcggttatgcccctaaatggcaaaaccggcacgaacaacggcgctgcgaccaatacggccagcacaacgttgacgatcacgctgccggacggcctgtccgccgacaaccgcactcgactttgctggcagacggcagggtggctggtcacacaggcgcatcaatacggcattgatgcactgcacgcggacggcatggattggaaccgcagagccggcacatggaccggcaccgaaaccgccgagcagaccgtcaccgtcacgcttgcgtgatgtgacctataccgccgttgcgaccacaaatccgactggctggagcctacgccgtcgatgctgcctgaggcacgacacggatatgttttttactcgttcgaatgagcccaatccacgacggcttcgatgttattgccatccgggtccagcacgaatgcggagtaatagccgggatggtacgggcgcggaccgggagcgccgttgtctcggccgccggcggcgagcgcggctgcatggaacgcctgcacggcttgctgactgtcagccaggaacgcgatgtgtgtgaccggcgtgaccggcgaagcctccgcctccggcccgtcaatcggcgacacgtagaaatcggagtgcagggttccgtcatccacgccgaatccgagcgtgggctcatgatgcgccttgacgatatagccgagcggtgcgagcgcctgtttgtagaatgtgatgctacggtcgatgtctttcacatgcaacgtcagatggtccagcatggtcttggtcaccctcccctggttcttgtattcgattgctgcttgcagtgtaagcccgaacgtttcccacagggccgcgcatggctatgatgagagcaatcgcacgtcgagttcgagacaatattcaaaacgaatccaaggcaatagggggaatgatgatgaccaaggcactgattgtggtggatatgcagccgacgttctgtgaaggcggcgaactgggagtcgaaggcggcaacgcggtcgccgagcggatcgccgattatgtgaacgcgcatcgcagcgagtacgcgtatatcgcaaccacgcaggactggcatatcgagccgggcgcgcactggtcggcggaaccggatttcgtggacacgtggccgaagcatggtgcggccggcacgccgaacgccgaattgcatccggcgatcaaggcgctgattatccatcatcatttcaagaagggccagtattcggcggcatattccggttttgagggcatcgaggacaataccgaccgtatccagacccgtgaggaggttgcggccgagcaatccgccggcaagacgctggccaatgcgctgaaggccgccggcgtgagtcgcgtggatgtggtgggcatcgccgaatcgcattgcgtcaaggacaccgcgctcgatgccaggaagttcggtttcgaggtcaccgtgttcgaggacctgaccgtaccggtcagcgaggagctcggtgtcgcggcccgcaaacagatgacggcggccggcatcacattggccgagtcccgctgatcaggccggatatacccagagcgagcgcacgaacacttccgtatattcaaggccgacactgccgcatagtcgcctagtcgatatgtgaagaaggcttttatggttacgatgctgctgacttcgatattccgcaacgcctcgtccgccgtgcatgaagtcgaaccgcatccgcaaggcaagcgggtcgcgttcatcccgacggcgagcgccgtggaaccgtgggggccggttcactcggcgttgagcaaacacgcgctgcaacgcctcggtttcgaggtggagcaactggatgtggaagatgtgccgagcgggtccgtcgaacgcgtcacgcgtagcatcgccgaggccgactgcatctatgtgggcggcggcaacacgttctttctcctgcaggagttgcgccgcaccggtgccgaccgggccatcatcgagcaggtgcgcgccggcacgccgtacatcggcgagtccgcgggctcggtcatcacggcacctgacatcggctatatcaagctcatggaccgcacggacaaagcccccgatctcaccgattacgcaggattgggcttggctgatttccgcgtggtcccccaccatcatgcaacggccatgggccacgccgcacaacgcattctcgaccggtatggtgccgatctcagtctcaagcccctcaccaaccggcaggccctgcttgtcaaggatggcaaaacccggctgctgcgatgatgcgggtcgtcggcccgtcgcccattcggcatcaccgtggtgtgtccggcctgacatgcctatcgagcggcatcaatcacacagcaatgtggctgggaacctcgccgaacgtcaacacctgcatacatcagcacggcaaaatctgccgaaatcgcccggcgcacgagatgccagccggccccatccgtcacctcagtgccgtaccgggccaggcatggccttgagcaacgggatgaatccggcgcacagtaccagggccacgacggcgagtatctgccagtgggcggagccgagccagccgccccacgtgccgacggcaccgccgatcgcatacgcgaacctggcacggccgctgaatttggccaggtcaccaccgctcagcagcagttgtcgcgatacgatcacgccatgcgccagcaggccatagccgaggttgttgatgagccatccgacgcacaccgcggcaaactcgggaaccagtacggcggcaagggaaatcgccgtggcgattgccccgatggcggacacggcgcgcatgccgagttttgcggagagccgcatgtagacaaacgatccgacgatgctgcccacgccgccgaatgcgtagaccacggtcagcatatcgctgccgtaccgggagccgatgcccagcaacgcatagcttgcccacagcgacggaatcagcgcaagcagcagcgatgcgatcagcagtctgacccgggtcaagcgggtgaccggagtgcgctgcggcgcgtgtgacgtgtcggccgccgtggattcgtcggcggagccgtcaccgtcatcgccgcccgcaccatcgctgccgaatcccggcatgaactcgcgggtgcggaatcgcgtcagcgcgcaggcaaatgacagtgccgacgaggtgagcagcatggccatgatggaggcgttggccaaggccgatccggcaacctggcccaacaacgtaccggccacgctggcaatcacggcgacgtagccgctgtacttgacgagcatgtcatcgtcgtcgccggccgcatccacctcgaacacttcggaggccacgtcgatgacctgcccggtcatcagcagcaggcatgacagggccagcagcagccacttccaatacgtccaaccgttgggcaccagcgcgaccgccaggcacagtacgccttccacgccctccgtggtcgcaagcgaacggaacgagccgaaccgctgcacgatccatgcggatatcggagaagcgaagtcgatgaccagattgaacgtcttgcggaacgcgatcacccatgccggcagtccgacgatcagaatcgaaggaatcaccgacccctcgaaaatcgcgttggacagcatcgaaaacgtcatacccaccaacgcccatcgcaacgccctgctcaatactgataatcctcgcataccttagttccttgtccttgccagtgtaacggaattatgacttctcaatcgtccccccccgctgtctaaatgaaagtgcaacaccctttcactggttatctggacaatctccaatctaaagggtgttgcactttcatttagacagcgccccccatatccgcatgtcactgctgccatcataatgagccagtagacgcctttaagcgttctgacaaccatggaatcgaaaatcgctatgcacatcatagaacagcactgccaaggcaagaggtctgaccagtcgctcaatgaggacgggctgatcatcaccgatggtttcgcggcagtggtggatggagtgaccagcaaaagcgtgcaccatcttgccggccttgttcttggccgcgtccagcaccggcgcgaggcctgcggcccattcgcgcaccgaacggccggcgagcatgtcgttgccgcccacgcacacgatcagcacatccggccggtcgttgatatcgccgatcatccggtagcgcacgcgccgggcggtcgcgccgagcttgccgaccgtacgccaggccaccggccgaccggtacgcttgcgacgcgcgcggcaagcagcggcataatgcctttcgactggttgtccacgccacatccggccaccaatgaatcgccgaccatgacggcacgaatcggcttcacgccgttcgcgcctttccaatcggggccgatcggctcctcgatatccaccacgcgacccttggcatcgaacaaaccgaaccgcttgcccttcggctcggacgccaacttcacccggcccttggcccacataccctcaatcggagcaacggcagcatcaatcacacgcaagattcccacggccacccaacatagtccgccctcctcgacctcgttagcggccagtagcaacccatattcgaaaactcgataaccatcgtcaattcgcataatttgaacgttttaggtgttttggtcgctttggacgttttatactgtgatagataaaaaggaggtcaccatggcagaatccgacaaactcaccattccacgaacaatccttccatccatcaacattgacgacatgacgacattggaggcattcaccgcacgatttcttgatgagcggatcttcatcaaagatgccagcggcgtggagactcccctaccttcgcagctttgcgacgccgtcaggcagacggccatccttctcgccgaaggcaaaagtgtaacgatcagtgccaccgaacaagatctgactaccgaacaggcggcggcaatgctcggcatttcgcggcaaacactgataagactgcttgataaaggacttattcctttttcacgtccgtccaatcaccgtcgcatccggctggaagacctgcttgaatacaagcgagcctcgaaacacaccaaggattgcgccctgagccaaatgatcggcgtcggggaagacgccgaattgtacgacctgcccgagccgaccccgcaggaagccatgcatgcggtatcggaggtaaggagagtacgggccgatgctgtcggtgtttcttgatgccaatgtcatctattccatcaccttgaccgatgttctgctcaccttggccgagcatgacctttttcttcccctgtggtcgcctaacgtattacaagaagcacaggaagccgcctcccgaacactgcctgacgccgcacaacaagccttccgaaaaagactgataatgatggaccaggcattccccgaatcctccatacatgttgaggaatcggaatggagccaattcgatctgcctgacccggatgatcgtcacgtacttgcggctgcggcacagggacaagcagacgcactggccacgcgcaatatcaaggattttccccagaaactgcttgactctttctccattcaggtcatcacgccagatgatttgctctgtgtattacttagacgaaatccggaagccacagctagcgccatacgtgagcttatcgattctcgacatcggccaccgataaacattcccgactttgctaaaagacttgaacgctctggcgcaacacagtttgcagccgctattgcgcatatacgacagcctctcgacaatcattcgtactttgaccagtaacccatgaattctggatgaattggggtgaaccggcgggactggaggcgagcgggcggcggattatggggcacaatggtttcaaggaggccgccatggtcgatgactatactgccaaaatgactgagctgatcgaactcatgcgtctgatcggcaacgatacgcagcagtgcgaggtcaaggaatgcaagcgcaagatctcctcgaccatcaccgatacgctgtccgcgttctccaatggctccggcggctggattatcctgggcctgtccgaaaagaacgggttcacgccggtcgagggattcgacgcgcgcgccatgcaggaggcgctgagccaggcgtgcgagaagatgacgccggtggtgcggcccgtaatcgtcacctgcccgttcgaaggcgcgaatctggtgttcgcgcgcatcgacgagatgctgccgcgcgacaagccctgcttcaccaccgcgctcggaccgcacggcggctcgttcatccgtaccggcgacggcgaccggcgcatgacctcctatgaggtcgaccggctcatcgaggagcatctgcagcccacatacgatctggatatcgtgcccggcgccacgaccgatgacctcgacccgcagcttgttgccggattgttggcgcgcgtgcgcgaacagcatccgcgcgtgttcgccgaccgagacggcatcgatgtgctgctggatctgcaggtgttgcgccatgatgattccgacgagtcggaggtcggcggaatcctgcgccccaccttggccggactgctggcgttgggccgctatccgcagaagttctatccgcggctcggcatttcgattgccgtgtttccggggacgagccgggacgatgtgttccggggtgacgaacgattggtcgcctcgaagtcggtggtcggttcgattccggtgatgatcgacgatgcggtcgactcgttgatgcgttggattggcgcgaagaagcccgactatccgccgctcgtgttgcgcgaggcgattgcgaacgcgctcacccaccgtgattattcgcccgatgcgcgcggcacgcaggtgcatatcagcgtgttcaccgatcgcatcgagatcaccaatccgggtggcctgtacggcatggtgacacatgatgtgctggcgagccctcatccggtgacgggcgcgccgttcgtctccacccgaaaccagttcctgttcacgctgctggagtccacgccgtatccgggcggcgggtttgtgaacccggaaggcggcgacggctaccagcgcatcgccgccgcgttgcgcgaggccggcatcgagccggcgaccacgcgcaacgacatcaacacgttcacgatgaccatcaccaagcagcgcacgatggcgaacagttcaccgggcgacgtggtcaaggcgattatgaccgtactggagcggcattcggccatgagcgtcaaggagatcatgcgcgaactgcagttgacgccgctggccgccacatccggtatgcgcgagctgatgaaggaagggcgggtcgcccgagtcaagttcgccgacgacccggcacagcggtatcggttgaaaggctgatttctcactcggccagctgcgtggtggcgggcgcggccagggcggggcgggatcggcggaagcggccggcggccaggccgatgcagatgaacatcacgccgaacagtgcgaccaatcccagcgagccggcccagccggcgacgcttatgccggtttcctccgccgtgccggagccgagcgcgttgtcgatcgcggtgcaataccaccagccgggcaggaacttggctatggtcaccatcacgccgggcatcatgtcaatcggcaatgcgacacccgacgtgaacatgatgagcaggccgaagatgttggcgaacccgttggccgcctcttccgagagcccgaactcgctgagcatgaatccgcaggcgacggtcatcagcgcgtacacgcaggtcgcgccgaacgtcatcagcactcccccgacgctcaggtgcaacggatcgagccccgccgccatcatcagaccgattgacagcaccaaatagccgacgcatacgacgagcgcgaatccgcccaacgtcagcaaccgctggactcccatcaggaccatgcgtcggggcgaggcggtgagacgccgccgcacctcgccggtggtgaacgcgcccaggatcatcgatccgcagatggtcatcgccagggacagcgggtacatcgcggttttcatggtgccgccgaatccgctgaccgccgtatccgcagcgcttgccgactcctcggtcggcgtatcgaccacggcgatctgatggttcacgtctgtatcgctggccgattcggcggccattttggcggcctgggacagatccttgatatccggcttgtcgacttgcccttccggcagcgagtccagcatgtcttggtccagactcgcgccatcaaaaccggcggcccctcctgtagcgttcatcatgccggcgagcgccgcctggtcgaccctcgtctgcgcgccgatcagtgcggtgcgggtgagcgagaggaacccgccgacgttcatccgcgccatcgacccggagccggatgcgtagctggtaaccgtgtccacgttcggcggattgtcgccgtccgccgccgcggcgacataatcgtcagcgaatccgtcgggaatgatgacgatcaggtccacccagttcgaggcgacggcctgttgcagcgtttcgctggtgtcgtcgaggtccaccagttcgctggaatcgcgcaggtaggcgcgcatcgacgtggcgatatcaccccggtcggagtcgcggtcgatgatggcgacgcgcgtcttggtcgattcgagcaccgcggacatggagccggatgcggaggtcagcatcgcccagctgatggacatcatcaggatgcctatgaatacgaggtagatcatcaggtagacccagtgcgcgaacagcacgcgcagcgtggctttacaggtgttcataacgttgcctcctcagcattgcgatgccggccaagaggaataccgcgctcatcgccagcagaatgatgcaggtggtgatgaacggccggtagctgtcgtagtacaggatgtcgtagaacaggttcgtcacctgctgtgcggggttgatggtgccgagtatgggcgcgttgcgggctatccagtcgctgatctgcatggcaaacccgccgtacagtccggtgaacagcgacagcgtgcaggagatgccggtcgacagcccgtatttcgtgttgtacgagagcttcggcaccgcaccgagcagggtgcctgctgagctggtcatgaacgaggcgatgatgaccgcgaggatcgccgccggttcgcgtccgccgagcgagacgttgcaggcgagccggatataggccaatgcgatggacagggcgaccgacgagcacagccagcaggagaggaagcccgcgacgagctgtttggcccggctcagcggcgctacggtccgccgtatgcccagcgcggacaggttcgcctgtgcggcggcgactgtgctgatggagtatcccatggccatcatgcaggacatggccagcagcgcgtaatagtatcgggcgatctcgtcaggctggaaatgcgtgagcgtcgtctcatgggtcatgtcgacgttctgcccgacgctgttccagaagttccggctgagcgcggcctgtggattgtcggcgatggtctgccgggtaacggcgtcggtgcggttgtacaggtcgatgacgctgcgcagggccgcgaggctaatgtccagtccgctgttttgcgtggagtccttggctgtgacggcggtttcccggctcacggtcatcgccaatcggccgttattgtcggcggtcagatagccgttggcagtgccgtcggcgagccgttgttcggcctccttcacggtgtcgactgtggtgatggtcagcagcttttggtcgatttcggcgtaggtcgtgtcgtctgaggccgattccgtttccccagccagcgcgtctacgaaggtgcgggcaccgtccgcctgctgccaacgggtgtcttcgatgacggccatcggcaccggcttgagttcgtatgcttcggccagcccgccgaacagtccgttgaacatggtcgccagcacaatcgggaacacggtcatccagaacaacgccgaccggttacgcaagttcgctttcaatgcgaccagaaatgtggtccacatgatgtctccttactcaggaactcccctcagtcacctttggcgacagctcccctcggagaggggagccaagttatttgcttgccgactgaggggagcatggtcagtccctcagtgctttgccggtgagttcgaggaacacgtcgttgagggtgggcgggcgactggtcaggtggccgatgttggcgccggagcgtttcaccgcgtcgagcacgtcggtcaggttgtgttcgccgcgccggcatcgcacgtcgagttccttgccgtcgtaggtggcttcgatcacgcacggcagcgcacggacctcggccatcgccgaatccgccagatcgagcgtttcgatggtgatgcgctcgcccgtgtcgatcatgttcttgagctcgtcggcggttccgagcgccaggtgccggccgtggtccatgatgaggatgcggtcgcagatctgctcgacctcctccatgtagtggctggtgtagatcaccgtggcgccggcctggttgagccgctggatgccttccagaatcgaattgcggctttgcgggtcgacggcgaccgtgggttcgtcgaagaagatcaggtcaggcttgtgcgcgatgccgcaggcgatgttcaggcgtcgcagcagaccgccggacagtttgccgggccggaacttgcggaagtcctggagtccgacgaattcgatggcctcctcgaccagcggcgcgcggtcagttttcttcggcacgtacagcgagcagaagtagtcgatgttttcggtgacggtcagttcgttgaacacggccacattctgcggcacgatgccgatacggcgcttcagcgcgtaggaggtcggcgtcatcggctggccgaatacgcgaatcgtgcccgaatcgtaggtgagcaatgcgaggatgcagttgatcgcggtggttttgccggacccgttcggcccgagcaggccgaaaatctcgccctggttcacgtcaaggtcaaagtagtcgagcgccaccatgtcgccgtagcgtttgaccagttggccgacgtgcacggccagagccgggttggttgtcgagtcgtgttcggaagctctgttgtcggttgccatagccactcccttccttggtgattccatcatcccaagaaggggccggacgccgccacaggcaaacgtcacgacttggccgtacaggcgtgacatttgtcattacagtccttcggcgtcggtctgcatggccttgtacaccttatcgaccggcatcaggctgatctcgtccatcgaatagttggacgccctgtggctttgcgcaatcatcggtatcatccctttacggttgtgtcgacaacatccgacgcttgtgcctcatctattcgggaagtgtgacccgttgtcttggaccgtcatgcgaataattccgcacgcccgtcaagttcgtcgtgttccgcacaccgctagactggtggtggaagagcgtcgagccggggaggtgccatgcgcgtgttggccgagaagggcttgctgctcgtgttgggcctggctttggcctggcttgtcggggtgcggctcgatggcgtgttcatcgccggcctgctgttggccgtttccgtcgccggattggtggaatggctgcgtcccgcgcaatggtcttgggtcttgtgtacggcgtatctcgtcatcgccgtggcagtgccttcatggtgcgcgttcatgccgctcatcgcctacgatgctgcacagctgccggccctcgcctcgaccggagcccgggctggggcacggactgcggcaagcggccgtttccccagtgtctcgcggaccgcggcctctcgccgttcccttgccgatgcaatacgttcggccccgtggctttcggtcgccgcgcgctggatatggctgttgccgccgatcgcgctctggttcgcccgtggcaccgaccgtctccagacgctggtgatgacgatggtcgccctgcttggattcgttctgggacgggcccgcgcctcctcggacgaggcgcggcgcgcgttgctgcacgcgcaggacagggcgcgcgaatcctcgcgggccactcgttcgcgcatcgccgacatcgatgaggaacgcgcccagtcgattcgcatggcgaccctcggcgagcgcacgcgtatcgcccgggagatccacgacaatgtgggccatctgctgacccgcgcgatcatgcaggcgcaggccggcaggacggtggccgaggcgacgaacgatacggtcgctgcgcaagggttcgccacgttgggtgcgacgttggatgatgcgatgacgatggtgcgccgttcggtgcatgatcttgaggatgacggcaccgatttcgccgcgcagatcgatgatgccgtcacgtcgttcgacggcatctcccccggtttcgccgtgacgctggccaatgatatcgccaaggcgcccgcgccggtctcgcgctgtttcacgaccgtgattcgcgaggcattgtcgaacgtggtgcatcatagtgcggcgcacgaggcgagcgtgacgttgcgcggcttccccgcgttctggcagttggtcattcaggatccggggccggccgtgtccgagtccgatgggtcccggacggccgctgtccgcccgcgtgcgatgtgtgccacgcgcgtcggctcgcgactcgccgccgacagtgttgccgatatgcgcggttcggccgatgagctgatgcgcggcatgggtttggcggatatcgaatcgcgcgtgcgcgcccttggcggcaccgcggtctgcgggccgtatgagggcggctggcgtgtgttcgtatccgtgccgaagaagcgttggatcatggaatcgagggattgatgagaatcgcaatcgtggatgatgatccgatcgtctgccagtcgttggagacgattctgacggccaccggcacggccgaggtgctatggacggcaaatgacggcgataccgccgtgcgccgttatttcgagacgccggcgagccgaccggacgtgctgctgatcgatattcagatgcccggcaccagcggtttggatgccgcgcgtgagattctggccacggacccggccgcgcgcatactgttcctgaccacgttttcggaccagtcgtatatcgcgcaggcgatggggcttggcgccaagggctatctcatcaaacaggatgtggcagcggtcgggcctgcgctgcaggcggtgatggccggtcaggtggtgctcggcgcggaagtgctcggcaagctcaccgaacggactccggatcctgccgattccgacgattccggagataccgccgattccatcgagggcctgcttggcgagcgtgagcgtgagatcaccgcactggtcgccgagggcctcgataaccgcgacatcgccgccagactgttcctgagcgaaggcacggtccgcaatcgcatcagcgcgatactggacaagctcggcctgaccaatcgcacccaactcgccatcctctggctcaacgcccatcggtgaggggcctttggtcaagtaggtctctccctccgtcatcgcttcgcgatgccacctcgaacgcgattcaggacagcttgcagctgacctcttattcgctcgttgtcactcacccttgcctaaaaacacctccggcgttttcttcacggctcggctcatcagagggaggttgtgaaaaaccaacctcagctgtttttcatgacgatactgtcgatggtgttggccacgcgctcgcagtcgtcggagcactgttcgaggtgacggtacacgtcatgccaggcgaacacctgcagcggatcggtgcaggtggtgtgcagcgtgcgcatcgactcgatgaacaggtggtcggcgtccgtttcgatcgtgttgatggcgaacaccagttcgcgcaacgtcttggaatgccggaatcgcggcagttcgttgaccagctcgcagatgctttccgtggcgcgcaccaccatatccgacatctggaccgcatcgtcgcgcatgtcggtcacattgtcgtagtacatgcggttgagtacgccttcgatgctgtcggtcacatcgtcgagcacgtggccaagctcgtcgatgtcctcacggtcgaacggcgtgatgaacgcggtcaccagttcgtccatcatgtcgtggcgcacctcgtccgccgacttctcaatcgcgtgcatgctgtccatgcgttcgcgcagctggtccggattgaagtcgtgcatgacctcggacagcagcttcgcagcctgacatgcgtagtccgcgctgcggcggaatccgtcgaagtagaacgcgtctttttgtctcgccatgatgggtggattcctttctagaacacgaccatgaacagtttggccattacgaagctgatgagaccgcaaccggggaaggtgaacacccaggtgagcatcatgtcgcgcaccacgccgaagttgatggcggagaggcggcgtaccgcgcccacgcccatgatggtgctgcacaggatcatgagccagaccggaatcatcacaccggtcacgctgggttggccgttgcagaacgccatgccgaggaacagcacgccgatgaacttctggccgtcctgtgcgccatgcatgaagctcatggccgccgcgcccacgatctgcgcgtaggtgaagaacccgttggtgcggcggcggtccatgccagcgcagatcagggtcacggccttgcacaccaaccaacggaacgggggcaggctcatactttgcttcgatatgctcgtcgacatttcccgccatctgccgaggattcggacacgtgtgtgcgaaaatggacacagtgtcaatcaggaggtgcacagtggttgtaagcacggattcgagccgcacaatgcccgattgggtgaagtacggggtgttctggcacgtgtatccgctgggcttctgcggtgccgatatcaggcccgccggcccgcgccagttccatggccgcggccttgacgcgatgatcccttggctggagtacgtgcgcgatctaggcgcgtccggcctgctgctgggtccggtgttcgagtcggcgacgcatggatacgacacgctcgaccatatgcacatcgatgtgcgattgggcggggatgccgcgttcgaccagctgattgcggcctgccgggacatgggattgcaggtggtgctggatggcgtgttcaatcatgtgagccgcgatcatccggccgtccgggcggcgcttgacgagaccgccggacgcttgaatccggccgacaacccgtggcatggtctggtccgcgcgcatgtcggtgataatgacgaacccgctttggatgtgttcgaggggcacggggatctggtggcgctcgaccattcggctgacgagaccgttgactatgtggtccatgtgatgagccattggctggatcgcggagccgccggctggcgcctcgacgccgcgtatgccgtgccgagcccgttctgggcgcgcgtgttgccgcaggtcaaagccgcacacccgtattcgtggattttcggtgaggtgatccatggcgattacccgcgcatcatcgaggaatccacgatggattcgatcacgcaatacgagctatggaagtcgatccagcatgcgctggagacggagaacttcttcgagctggattggaatctcaagcggcacaacgcgttcctgaattccttcgtgccgcagacgttcatcggcaaccatgacgtgacgcgtatcgcatcgcagattggcccggccaaggcggcgttggcattggcggtgctcatgacggtcggcggcgtgccaagcatctattacggcgacgagcagggctatgtgggcgtcaagcaggagcgtttcggcggcgatgacgacgtacgtccgaagttccccgactcccctgccgaactgtccacgctgggagagccgacataccggctgcatcaggcgctgatcgcgctgcgccgtcgcaacccatggctgatggatgcgcgtaccgaggccgtgaagctggaaaacaagcacttcgtctatcgttcgacgagcgccgacgcccagcattccctgaccgtggacctcaacatcgagcaatcccccactttcaccatccgccacgccgacggcagtgcagcgtatcaatactgagctacctcatcagagggagctcaccatttaccgccgaatgcctcggatcagcaggtcgagcaggtaaccgtacgaccggtcgacccgttcgcggcctcgtgtgcggggttgggcggaacgcagttcgaattggatgaacccgtgtatggacatccagatggaggatgcaatcaggtgggggtcatcgtcacggaacacggtcgccgcctggccgtatcgaatgatctgcgtgatggcttccaggcaatgctgggccgagtccgacgcctgccccatccagaccagcgtgtaaataccgggggcgtccagcgcgtgttcgcggtagattatgcccgccctgcgcaggcgcagcacggggtcggattcgtcaatggcgatgagctgttcgcgcagatcggtgaagtatgcgtcgatgagcgcatcggacaccgcctgcttgccgccgatgtgctggtagatgctggtgggcgacacgtcggcctgcgcggacagcgtacggatggtcagaccgtccacgccgtcttgttccacgatccgcctcgccgcgtcaaggattcttccgcggatttcaagggttggcgtgcgtctggatcggggctgcgattgcgtcatatccgttattctagggtgcgtacaggccattaccgccgttttggcatggccacgatcgcaacgaccgcggcgataagtgcaatcgtcatggccgccaggcagacgctgtgcagcccgcccatgaacgcggatgcgaccgagtcatccagcaatctgcgcggggtgcccggcagggagccggaaatggattcggcagccatcacggattccttggatgcgccaaggatgtcctggggcaggtgggatcctcgcagcgcgtccgtcaggccggtggtgtacgcaccggcctgcagcgaccccatgatgccgacgccgagcgttccaccgagttcgcggatcgtgtcgttgacggcactgcccatgccttcctcgccgaccggcacggccgtcatcagtgtgtcggtggcgggaccctggacgagggcgatgcctgcggccatcactgccatgacgaccgcgaacggcagtgtggcaatcgccgtctcgagcgccgaatacccacgcagcgcctggaaccattgggtcgtgaggaagatgaaaccgaacaggcacaggaaggcggcgcaaatggccaacatgccgatgacggtgcacacccagaacacgctatcccatgcgaaccgttgcagcaggatgccgccgatgaccgggccgagcgctatgcccaccccggatgtgccgacccgcagtccgacggccagcccacgcataggcgatccgtcgaacaacccgatgatggatggcagcgtggctcccatcaagttgtgtattaatataacatatttatgaaacaatgatacacatcatgtcgggaacaggcatccgcatcgaaaacaccgacctacaacacgatcaggcccgacgaccatcaaaggtcgtcgggcctgattcatacgcgctgtcggactaacggcgtccggacttcatacggaatggcgcattattgcgattcttcttggaatggcggcggttcgggccttccgtgttgccgtatttggcgatcatgcggcgttcgtgacgcttggcaccttctgaacgctcgtcgcgtacgatgcggttctcgttcttgcgatggatgcgcttgtcgaattttccgcccttgccgtaccgatcattgcgacggttcttgccgtactcgttgcggccatcgtcctggcgctcgtcgtaacggtttttgccgtatccgccgcgacggccgcccttacggcggtcatcgccatgctcgaacagatagtcgcggcgctcggcctcggggttgctcatgccggcgcggcgttccgcacggttgcggttcttcttcacggccttcttgctggccttgtcgccgtgcttgcgctgcggctcgccttcggcaacaaactcgccgcctgcgttctcgtgctggaatccggtctcggcaacgttctgctcggcgcggtcgcgattgcgattgtgcttgcgcctgccgctgcggccggactcatcgcccgccgcgttcttggcgcccctgttcttgcccttgcgcgggttgcccacgggctgcgacttgtcgaggctccaaccatccacgcgctcggcgcggtcgcccacaagctcaagcacttcgggcgaatcgtgggtcacttcgatcatcttggttttgatgccggcctggttcagtaagcggcgcgtctcgcggcgctgctcgggcagcacgagggtgaccacgtcgcccgccttgccggcgcgggcggtacgaccggagcggtgtacaaaggacttcgggtcagccggcggctcgacctgcaccacaagctccacgccgccgacgtctatgccacgggcggccacgtcagtggccaccatgacgcgcacgtcgccggaatcgaatgcggcgaggttgcgatcacgctggttctggttcaggttgccgtgcagctcggcggccggaatgccgttctgcgtcaggttcttggcgagcttcttggcctggaacttggtgcgggtgaacaggatgcgacggccttcgcccgaggcgagcacgcgcacgagttcgtgcttgtcgccgcgcgtggtctcgaacacgtggtgggtcatcaggtcaggttcggtggtggccgaatcgacctcgtgcaccttgggatcatgcaggaaggtgttcaccacttcatccacgccgtgatcgagcgtggcggagaacagcatgtgctgggcgtcgggcgagatctgctcaagcagtcgcttgaccggcggcaggaagcccatatcggccatttcatcggcctcatcgatgaccacgacttcgacggacgagagcgtgagcgcctgctggcgcagcaggtcctcaaggcggcccgggcaggcgaccacgatatcggcgccggccttcagatcgcggatctggtggatgtacttgacgccgccgtacaccgtggtggtgttcatgccgaacgtgtgggccagcggcatcagcacgtcgttgatctggttcgcgagctcgcgggtgggggccagcaccaggccgcgcgggtgcggcaggaaatcgtcagcgcggcgctcttccaagctggccttcttgcggcgcttgatttccttgcggaactcctccatcgcgatttcgccaagcgaatcataggagccaagccgggtgaccagcggaatggagaaggcgagggttttgccggagccggtgcgccctcggccgagaatgtcgcggccggccagtgaatcgggcagggtgtcggcctgaatggggaatgcggtcttcttgtcatctgccgcaagtacgcgcaccagcggtccgggtacgccaagttcgccaaaggtaagggggcgggattccgcgctgtcgttcatctggaaatcagcggaatcgtcacgatcatcgaaattattacggggcacagtggcctttcatgtcaaaggttacgcaaattacgcaagctttccgagcttagcgtaagccccctactttgcttgatgctcgccacgctgtcattccactctttacttatgaccccatggggcggtaacttgcccatgaggcggtaactcgcccatgaggcggtttgaagaaattgtgaaaccgcagaataaagccattttcacctaccgccccatgagggttttaccaccccatgggatgtttgccgccccatgggccaattaccgccccatgggttctaccaccacgtaaggcgagcaccgccccatggaacacgcaaatggcccctacccgtgaaggtaggagccattgtgcaaaagggctgagccacaatacggcccagtagccctaaaacacactacaaaatatccggatcgtctttggcgatagtgccggttgccttgccaatggccttcaggccgtggtaggccacaagaatcacgatcgtgccaatggcaatgccgttgaaggaaatgccaccaacagtgaacgcgaattggccaatggcaataatcatggtgatggctgccaccatgatgttcagcggcttgtcgaagttgaccttgttctcaacccagatgcggatgccgatcatgccgatcatgccgtacagcagcgtggtcacgccgccgagcactccggcggggatcgtgttgatcacggcgccgaacttcgggcacaggctcaggatcagggcgaaggcggctgcacaccagtaggcggcggtggagtacaccttggtggcagccatcacgccgatgttctcgccgtaggtggtggtgccggagccgccgccgaagccggcgagcgtggtgcccaggccgtcggccatgagggcggtgccgatctggttgtcgtagtcgcggccggtcatctgggccacggacttgacatggccgacgttctcagccacaagcacgagcacaacagggacgaacatgggaaggatggaaaaatcggcctgcggcaggtggaacttcgggaagccgatccatgcggcgtcaccgatggcggagaagtcgacctggccgcggatgcaggcatatacatagccgatgattacgccgaccaaaatgttgaggcgacccagcaagcccttgaacagcacggccacgagcagcacggccagcagggtaaccagtgcggtgtccggcgcggcttggaagttggtccacacggaaggtgccagattgaaaccgatgatggccacaatcgcgccgttgaccacgggcggcatgatgatgtcgatccatttggagccggcgtaatgcacgagcacgccaatcagggccagcagaataccggtgaccatgatgccgaagctggcgaccgcaatgcccttgttggcggtggtgaccgcggtgatcggtgcgatgaagccgaaggacgagcccaaatagctcggcagcacgttcctgttgataagcaggaacagtgcggtggacatagccgtgaagaacagggtggtggacgggtcgaagcccgtcagaatcggcaccaggaaggtggcaccgaacatggcgatgacgtgctgtgcgccgataccggcggtgcgcaccaaagtcagacgttcatcgggctcgacgacctcgccgggcgccagcgtcttgccgtcgccatgcaattgccattggaagatattggacattactactctcctcgctctcgcttggggcacggcattcacaaccagccgcactacgcgccattctagctcacgaagattttgtgaagtctctcttccgggaaaggctatttgccgtaatactccagcaggtgcggatcgacggcctgcaccacatccaccaaatcgccattggacaggtacgggcgcttgaattcgcgccacggctccaccttgacctcccagcggccggtcgtctcgtcgagcacgggccgggcggtctgctcccagcgcacacgcttggaggtgcggccggtttccgggtcgcggcgcgtgtagtgcaggcaggtgcagttggtgatcttccagtcgtccgagtcggcgcgatgcaggaattcctcgtcggccagatcctcgatggtgagcatcagggcgagcatgaagtcgccgtgggtgaccatgaccacggattccgaatcggatttgcggctcagcgaggtcaggatgttgtgcacacggtcctcggccacatcggcaatcgactcgcctgccggcggacgccagtacagcggatcggtattcttgaagttccagttgcgtgcgtagttgtttttgaattcgtccttggtgatggtgttgatttcaccccaagaacgttcgcgcagcacacggttctcctcccatttggccttgggcagggccatggtggctgcggtttcgcgggtgcgcacgtatggcgagaccatgtaacggtcgaacagctgctgctggctgaccagccaacgaccgatgcagtcggcctgcttgcgtccggtggcggtgagtctccaggagcggtcgggtacggtgacgttgtcctgcgtatacagggagttgtcgccctgttcgcccgcctggacgatgacgttcgcttcggattcgccatgccggattacgtatagatcgagcggcatgctcatatggattcctctttcgttattggttacgttgtgttgttttctgctgtttcctacttgacctgcgtaatggtgttccccttgaccatgaacgcatgccgggccatgtcgatcatcggctgatcgaacttggagtcggtgtagaactcgtcgatgacggcgtccggaccgtacagttcgcggaaccgtttggtcttgttggtgttgaagttgaggtacgtgaccttcatcgtctccacatccacctcgctggccacgagattcctcacgccgagtctgcggcaggcctcccccaccgtcagaccgaaggatgcggtgaggatcacatcgtccgactcaggctggtaccaaggcttgatatgtgcgtaatatcggtcccagaaatcgtccacgagctgttcgacgctcgccacccgtttggatcggctcagttccgtgagatagccttcggtcatcttgcccacgccgtattccatttgttcaagcgtggcccggccaagcttgtatttgaccgcgtaccgcagcacgggggcgatatagcggaacactttcgggtcgtggcgggcggaatacaggtacaagtcgaacaggctttcgccatcatagatggttccgtcgaaatcgaatacgcgcataccttctgcttctactctgttattccttgtctaaggctaatctcggtaagccggcgaaagcgcaaatacgcagtgaatttcacatgaacactgttttttggattgatttcggtacaggtaacgtacactggtgacagcgtggaaggaggtgcgtaatggcggcgtctgaaatcgaacaatggtggattgataagtttcaggagaacctgggtccgattcgcaaggtagccggatggacgactcagcaactggccgacgagctgggagtcgcgcgacagacggtgtctaacttggagaccggcaaaagcccgatgaccaaactgcagtatctcgctttacgtacggtgttcagcgccgagatcgcacgtcgtgaagaccgcgatctggcacgcatcatcaagactttggtcgacgatcccattgagcaacgcattcgcgaacggcgcgcccaagagcaggacggcgaggccgttgccgacaatgccccagtcaatacggacggtggcaacgttgccgacaacgccgccaccgagaaacgcaagcccagtgccgccacattgaaggcttcaaagactgccgcaacgggcaagcccacgctcagcacggcgatgcaggctctcgccgtcatcaccggcgcattggccagtggaaccgccgccggcatcatcacttacttgatgttcccggacggcggtccgaacaagcgctgagtcgccgaaatatcgaatccgttactcgcaggccacgccatcgtgatcacggtccaacttgccgttgtatccaggctgcccttgatacaacggagcagcaccagccgcacgaacttcagagcaattcgcataatgcacattttgctgcgcttgctgttgctgttgtgcctgtcgagcggcctcctcagcttgccgctgggcctcggcctgcgcggcagcctgttcttcagcggcctttcttgcagcctcttcttcagctgccttcttggcggctgcctcttcagctgccttcttggcggctgcctcttcagctgctttcttctcctcagctaccttcttcgcttcttcctcctgcgctatatcgctggctttacgaacattgataacaggcttgtccccatcttccacggattggacaacccagttcgaagctctgagcaccattttgtccgtgtcgcttttcacctcataatcagaggaggaaaaaccggcatccttgagctcgtctttcacatcggccagcgaacgccctttcttggcgatggcgacaattttcgaatatgtggattcctccttgccgtccgcaccgtcagaagaccccgagcatccagcaagcacaagacccagaaccatcataagaatcacggtcaacgcccaaaccgcacgattgacacgcttcatgttcccgaaacgaaccctgttgttcaacattattctctcccttgtagtcgcagatctgcggatggtcggaaccacgtcaatgtgaatccaaccatcctgataattactgcttattcaatgatatattcatccattgttttcgccgatatatcgcaccagcgtttccctcattatcaactatttcgagttgcatgaatgcgccgtttataggccaagaatttcgtgcttttttgcatcaaattcttcttgggagagaatgccgatatcaaccaattccttcaattttttcatcgcctcgacttgttcttccacagacatggatgccgtgtgagaggcgggagcagcggcttccggtgccggcgcaggcgccggcgcttgaaccggggcggccgtcataggattaatggcttgtgccatattcatgcccagcaacatgccaccatcgccaaagccgttgtcttggatgccttgcgcaatgcgctgctgggcagccatattgccagcttgctgggaaacgccctcgtatgcggcaacattcatcttattcgaggcgaactgctgcacgagttgacgtgattgctcggtgaactcgatactttcgatgcccacactggacacttcaaagccaaaacgatcattccacgtacccgcattggcccgatcgccacgcacgcatgccgcgatgtcattcgtcttgccgggcaattgcgaaatacgatattcattggacaacgaattgatggccacaataaacgactgtacgaattcagacagaatctgcctacgtggcccttcatcatcgaatgaatacgacacggtagtggcaggcacaaagttacgaacgaatcgaactggatcagtgacctttagcgacatggatccgcgtgcgcgaatttccaaatcgacgccatagaaccggtcgttatacaccagcggcgcagaagtgccgaatttgatgccacgaatctcacgcaggttgacgaaggccacatatttggtgcggccaggctgacctccgaaggtgaatcgatcggcaacctgattgaagaacgatccgatgccgtctccggcgagcacgctctgctccccgttgcgatattcataaccgcccgactcggtgatgacgttttcgatacctgtttcagagaaaatgaacgccgcagtattctctggcacatagatacgcgaaccattggtgattattccctcggaaccgtattcattcgaaccgcgatcgttgttgcttccgcggggaatgcccggcacaacgacggtgtgttccgtgaacggaccagcggtgatgatatcacgccacaggtccgcgaatgtaccgccgagcgcgccggcgaacgccttaataactgccatctgttttttcctcgatatctcatgcatatggccgatcttgcgactatgcaatcgcaagaccggccgttatgctggcatgttggttatagctgcgtttcgcgatcgcagtattcgcatcgaacgacttctttgcgatgaccggaaagcggagcgccacaaccttcgcaattcaccgaaaccacgggttcggtaataccaagcccactacggaatgcgccaaaagtgtccttcagcgccccggccagagcctccgttccggggatggccttgttgaaggccggctcatccattggcgtatactgtctgccgcgtatacccatataccgtcatcgttcctttcttggaaaaccgttacctcgatacgccagtctgatcactggcccaccgatgcgagcttctgcatgcatcgagtcatgacctcggtgtagtaggccgaatcctcactgctgagggagttttcgtcaatggcgtctaccttctgggagaactcagagtaacgcttcatcatgctggcatagtcggtagccatgctgaccacgttgtcggatttctgatatttgttcatgaaggcaacatactcatcgataaaggcctcgtagctgtccatcgtggccttgaagtcagcactgtcattggtgttctgctgcgccttctgatccgaagactggtcgctctgcttgttggcatcgctggaatcagtgcccgtatcagtgctcttatcatcctgcttcgcggcgtcgccgtccgtagacgtatcttccttcttttccggaacctggatagtgatggacatgatggtctcatcgtcagtgttacgagaaacgctcacactgtatccatcggcgttcttggcattgaaactgtcagcggacttgctatagtccacggtgaaaccgttgtcttgcacggacttgacgtagtcggcatactgcttggcgtcggtaccgcacacctcgatggagaaatagtccgaagactcgcttctaatttcaccctttgtggatttcggctgcggcagcagcgccgcgatatccgactccggccatgaatatgcttcgcacttggtggcgagcgatgcttccaattccgcccgatcagccttggccttcgcatcgtcacgaattacgaacacgccaccgattaccagacccacaacggtgataccgactgccacccaggccagcactcggccttgcaccttgccactcgggcgggtcacgtatacggcgaagcctgagagcagtgccggaatcaccgtggcgaacagcagtccgccccaggatcggccagaaacatccacaaattgggcgagtacgaacaacactccccaaataatggcgaacacagccagcttggaagtcttcttcaccccttgtgcattcggagcaagcacggcaggcgcagcggcaccagcaaaaccagtggcagcaccggcaccatgtgtggcgggtgcaggagccacaccaatacgcttgtccagagcggcgaggaactcatcaacgcgcttggcgctttcgtttccagtcgcctccagacgaatggcggcccctgccgcaccctgcgggactacggttagcgtgcagttcaccccatcataggagtggaaggaaaacgctccggtctgggtgttttcgttatccaaggtaaacgtggcgccagtagtcagctggtcgtgaataacttggaacagctgttgcggactgaccgcatatacacgatcaaatggcgcgccggcgggccgctgcgatgccgtagccggagtcatcggagtggtggtagcaccatcagacgctacgttcggttggccagccggtacagtattcggcacggtaggcgcattcgcgcgatcttccggtgcgtcattcgtgccttcggacggtggaaccggctgaggttgttgatcaaatggcgttgtcatgatgcccttctttccttaagcagcagcattaccagcacagaagaggcaagcccggcaaccgttacggtcaatccgactgccatggcaagccggtatcgttcgctcatcattgcgtcccttcttattgctcgctttgctctgcgatacatcgaaccagtgtatggcgttgttattatgtacgcaaattagcattttgtatgcatgttagctttattgtcgatgcttgataccgcgcatgaacatcctttccgccaccgcacctacacggatggcatcgaccattgtcggcgacacgcgcgggccatacatcagctgacaactgaatttttcggcgtgtttccgaaaagtcggcgtcctgtacgctgggaatcgagcaaccgcgtacgatggcgcagcacagcacccgcaacacagcgacaaggagcatgggcaatggcagatatccccgaagaacatttgaccgaggaactgttggatcggctgctcgccagcgccagcattgagcagtatctcgatgagggactcgtcagcgcacgcacgctgaccgactatctgttcgaccgtatggaagcccatgacctgagacgagccgacgtggtgcgggcatccggcctcaacgccacagtggtttatgacattttctccggcaaaagccgccccggccgagatcacgccattatgctggcttttggtctcaagtgcacattacgtgaaacccaacggctacttcgtcttgcaggcgtttctgaactgtggtgcaaacaacggcgtgacgcgattatcatctggtgtatacgcaacggattcgaccgcatcgccacggacgacgagttgtatcgtatgggagaggcgacgttgctaccggccgattgacgacattcggcccaacaacactcaccagtgagacgcaagtaagagcgcatcaaggagagacatggacgataagcaggcgatgcatgcgatgagcatcgacgatgcgtaccatgtcgagcgtacgctcgctcgcggaccttccggcgtcaccgaactggtgagcattgacggcaacggcccgttcgtacgcaagaagattccctctcccctagcgcaacgcaatgtgtgggcggcgctcagcgcctgccagagtaatcgtctgccgcgtgtggaagcgacgtacgagctgcccgaccggttcgtcatcgtctacgattacgtgccgggcagcacgcttgcgcaaattgtggaggaaaacgggcggcttgcgccgaatgtggccgtgcagcttatcgaccaaatttgcgaagccgtgcaggagcttcaccagcacggcgttatccaccgcgacatcacgccggccaatatcatcctggctcgggatggcgcgcatctcatcgatttcggcattgcgcgcatatggtcagcgtcaagcaatcgctcgcgggacaccacggcgcttggcacttatggtttcgcctcgcccgagcaatatggcttcgccaaaaccgacgcgcgttccgacgtgttctcgcttggtcgactgctcggattcatgctgaccggcgtatatcccgatgccagcgactacgagcagcgacttgccgatgatgccgcagtaccggcacgactgcgcgccgtcatcggctatgcgtgcgcattcgagcccagcaaacggccacagagcgtccaggagtttcgccaggcgctgttctcccagtccaatccgcctatgccgaacgcatcatcggcaaatccgccatcaacgagaacaacgaacggcagcgcgtcggcgtctcgactattccggcgtctgcacttgagcaaacgcgccatcgtgctgtggtccattgccggagcggcactgataatcgccgccattgcgggaggcattgtgttggcaggccaacttggcattatcgggtcggcaacatcacccgattcctcgacacaatccagcagccaatcaaccgataaggccgatggcgggcactcctcgaacgggtcaggaaccgacaatgccaatggcacgggcggagtaggcggcactgacggcgctgatggagacaatcaagacaccgtcaccgacaatcctctgaaaatagtggaatccggctggtcggcggaccagcaagggtatgtccactacgctttcgccctgcgcaacaccagtaagacccagcaggtgcagtatccgcagattaccattacggggcgggccaaagacggttccatcgtgttctcgcagacgcaagcactgaatatggcattcccgaatcagactgtatatgacgccggtcaagcaggcgaaggcaccgccccagaaacggttgattttactgtgctcaatccggatacatacaacgtcgccaaggctcagggaaccgccgccttccccatcagtggaatatccaaaatagacaacagggacggctgcacgacgttcaatggcgaggtccg

SEQ ID NO: 3691 - DNA, 12585 bp, Unknown
  R150_10m  MAG No. k141_2863
cggcgacctgttctccaccatctgggagtccggcctgcttgacgtattggaggagcgcggcttcaagtacctgttcatctccaattccgacaatctcggtgcacgcccctcgcgtacgttggcccagcacttcgaaaacacaggtgccccgttcatggccgaagtggctatccgcaccaaggccgatcgcaagggaggccatatcgtgcgagacaaggccactggtcgcctgatactgcgtgaaatgagccaggtccatccggatgataaggaagcggcccaagacatcgccaagcatccttacttcaacaccaactcgatctggattcgcatcgacgctttgaaagacaagctcgccgaatgcgatggtgtgttgccgttgccggtgattcgtaacaaaaagaccgtgaatcccacggacccgaactccgaacaggtgattcagctggaaaccgccatgggtgccgcaatcggtctgttcaacggttctatctgcgtccaagtggatcgtatgcgcttccttccggtgaaaaccaccaatgatttgttcattatgcgttccgatcgcttccacctgacggacacgtatgagatggaagacggcaattacatcttcccgaacgtcgaacttgatccgcgatactacaagaacatccgcgatttcgacgaacggttcccctacgccgtgccatctttggccgcagccaactcggtttccattcagggcgactggacattcggacgtgacgtcatgatgttcgccgacgccaaacttgaagataagggtgagccgagctacgtgccgaacggcgaatacgttggcccgcaaggcatcgaaccggacgattgggtgtgatttacaacacggtcgaacgataaaaaagatattatttttgtgaaatggcgctcaactgtggaaaaagcctctaagatagagtgagtgtggggaaactcatacgcacttataacgaaacaataactatacgtgaggactaatggcagagggcacaagcggacgtcggcgtttttccgacaaatggggcaagcacgagctggacgtactggctgtgttgtcatccgcgttcccgcaatggctcacatcccgccaaattgcgcagcgcgtcaaggcttacgccgactcgtatggagagctggcagatcaggccgccaaggccgcgttcgccaagcagttccagcgtgatcgcgccaagctcgctgcgatgggcattgccatcgaatcacggcagcctgagtactcgtccaagtcggaaggccaggacttcgcgtcctatcgtctgcagttgggcgacgaaccgcgcatccgcctgatgttcgagccggaagatatgccggtgcttgccgccgccaactatctggctcgttcgatgtcgatttcttccgagccggatcagtcccagctcacccagcatgtgtcgcgcactacgccgcgtgtgccgcagaccccgattcccgggcttggcttggattcgattgcgcctggcttggggacgcagcccattccggattcactggtcaaggttattgattcgcgtcgtttcgccgccaccgttgacgtggatggcgaacacctgaacgtggcatacaccgattccgacgatttggccatgtttgtgcttgagcatccgggggccacgattgtcagcccgcaagaggctgtggacgcttatcatcgccgtttgcacgccgccagccggttcactctggccgacgaatccgccagtcctgtgagcgcttcggtggtttccccgtcgattagtcgcgatgtgcgagagccgggtgatcccgagtctatcaaggctcagaacaagaagaacggctccgctttccaaacgggcagtgaggttgatcgtcgcctgcgtctgatgctgttcctctccgctcatctgggtgaggaattctcgatgagcgagctgggcgaacgctttatcggcaagccaaagaacgatgatgaactcaagaaattcgtcaacatcatccataaggacatcaacaccctgaccaccgtttccgacgatggtgagatggccggcagccagttcttcgatattgactggccgctgctggatgccgagggtattgtttccgccaccaattcgctgggccttgaacgtcttgccggcatttcgccgcaatacctcagcatgctcaccgcctcggtcagctacctggcgcattcgccgttgctgccggacaagcagcgtgggcaggccgaatccctgtatgagcgtttgcgccgtcatgtcagtcccggtcagaccccgtggctgagcctgaccggctatgagctggagccccgaagcttctccatcgtcaagcgtgcgatcaacaccgattcgctgttggacatggagtacaccgacggtacaggtcgtacccgccgcaagctggtggcccccgccaagatcttcattgacgaaggcgtgtattatgccgccgtctacacggacgttggttccgccgcacccaaggacaaaaaggcctacgtctccaaagacaagaccctcgacaaagccaacggcaaaccgcgcatctggcaggtactgcgattggcccgtatcgaaaaggcggaactggtcaagcccaccaagcagatcaacatcccgaacatgccggtgagcgaactgcgcaagtggagtttcgacaacggtaccgacgcggtgttcatcaccgatcagcgcgatctggcattcatcaagacattgccgggcgctaccgtcgaacaatgcggtgccggtgaaaaggtgcatctgaccgtttcctccgattcctggttcgtggccttctgcatcgcccacgcgcgtcatatcacggcggtcgccccggaaacgttgcgcaccatgatcgtggcacgcgccgaacgcgaactgagcatcagcgagaacaagtaaggagcctttcatgccttggtggatatggctgattctggccctgttcatactggccatgattgttgccggactcatctatgcagcccttcatggactccgtgccttgaaagacatgtccgacatcggcggccaactcggtgaacgcgtggccgcgatgggggagcccggcacctctgccgacaccagcgagccgcctctgttcactcagccgctcagcgtggcacagaatcgttatgccgaggcccacgcgaacgtgattcgcagcaaggccgccaagcgcgaacgccacacccaggcatgggcccgctggaagcgattcaacaactaacggaaagcagcaatggcacgtcaccaacaccataagggcaatgccgattcccagacgctgagcccttcgcagcggtacgcatcattccaaaaggtccaacgccatcgggcgtccgcagcagcgcgattcgccgaatccctgcctttcgaactggacgacttccagaccgaagccaatgacgcgctcgaagccggcagcaacgtactggtcgcggccccaaccggtgccggcaaaaccgtagtggcggattttgccatttacctcgcccaggaacgcaacgtcaaagccttctacaccacaccgatcaaggcgttgagcaatcagaaataccatgatctggtcgacgtgtacggcccggacaaggtaggcctgctcaccggcgacacctcgatcaattccgaggcggacatcgtggtcatgaccaccgaagtgctgcgcaacatgctctacgagcgttccaccacgctgaacgcactgcgctacgtgattctcgacgaagtgcactatctggccgaccgattccgcgggcccgtgtgggaggaagtcatcatccacctgcccaagacggtcaagatcgtcggcctgtccgccaccgtgtccaacgtggaggatttctccaactggattgcctcggtgcgaggcgacacaaaactggtgatcagcgaacaccgccccgtgcctttggaacagcacgtcatcgtgcaggcggacgaacacaccgagcccgaggtgctggacctctatcgccgcgacggcaacggcgagcagaccaccaaactcaacgccgaactcatcaaccggctcgaccagttggaccgcaaggccgcacgccggcgcggcgaggaacgccccgataagcgcaagggcttcggcagaggccgcggcggcaaaggcgccaaagaccgtgccccgaaagcggaacgccacaccccgcgccgctgggccgtggtggacgagcttaacttcctgggaatgttgcccggcatctacttcatcttctcgcgcaacggctgtgaccaggccgtggaacagtgtatcaacgctggactggagctcaccaccgatgaggaagtgaccaggattcgccgcatcgtggatgagatggtggaggggcaactcactcaggaagacctgaaagccctgcagttctccaagttccgctttgcattggaagaaggcttcgcttcgcatcatgccggcatgattgccctgttccgtcagatagtcgaacgattgttcgaagaaggtctggtcaaaatggtgttcgccacggaaacactggcattgggcatcaatatgccggcccgctgcgtggtggtagagaaactcgaaaagttcgacggtaccggtcatgtgggcctgacgcccggcgaattcacgcagctcaccggtcgtgccggtcggcgtggcatcgacaccatcggccacgccatcgtggtcgaccatcacggttttgtgcccgccacggccgcctcgctgtcatccaagcgtgtctacccgctgcactcgagcttccgacccacgttcaacatggccgtgaacctgctcaactccagcgactacgagaccgcgcgcgtcaccctggaccagtcgtttgcccagtgggaggccaacgaatcggcctggcagctggaatcgcagattaacacactgaagaacgcgctggccggatacgaacaggcgttcgcatgcgaacacggcgacttcaaacagttcatgaccctgcgtatggagctgagcgacatcgaaaaggaaggccgccgcaaactgaagcacgaagtgttcctgaccgatcaggagcgttcacgcgctttccagaacctcgaccagcgcattcgcgatttgcgcaaggcggaacacgagcatccatgccgcaactgcccggacctccagcaacacctcaaatggggccaccgctgggcccgcgagactcgagaactgcagcgcgtcaccgatcgctacgactcccgcaccgggtccgtggcacgccagttcgattgcatctgcgatgttctcaccgggcttggttacctcgaacgtcatgtcaatgcggccggccacattgacatgacgttgactgaaaaaggtctgctgctgcgccgcatctacagtgaacatgacctggaactgtgcgaggcgctgctcgccggcacgttcgacaagctcgacgccaacggactggccgctgtgctctcttcactggtatacgaggccagacgcgggggagacggcgaaccgaggcactacccgggcggcatctccgggcccatcgccatcgcttcgtccaagctcaagggcatttgtgaagacatcgatatcctgtgcgaggatcacggtctggacgagatgcagcggccggatttcggcattctcgacatcatgtatgaatgggcggatggcggttcgctgggatcgtgcctgtacggcaccgacatgaccggcggcgacttcgtgcgcactgccaaacgactggctgacgtgctgcagcagattgctgtcgcccagccgctgccgttcgacgggggagagcggctggcaggcctcgcccacgaagcggccgaccgggtcaatcgtggcgtggtggcctactccggcgtggactgacggggctgtttgacgggagtttgtcagccgacgtcggaagcttggaatagcggccaagtccgaactgttgcgtaaattagtagggttaaagatctttcaaggaggatgccgatatggcagaacgtagcctcaggggcatgagcatcggagcgaaatcgctggagtccgacgacaacgtcgatttcgccgcgcgaaacgatgtggcgtatgtatgcccgaagggccaccgcaccatcctgccgtttgccgagggtgccgaaatcccggacgagtgggagtgccgttgtggttccgtggcccaccgtgagggcgacgccgaccgtgagggcgacgaaatcagcaaacccacccgcacccactgggacatgctgctggaacgccgtagcgaagaggaactggccaccctgctcgaaaagcgcctgcaaatgcaccgtgacggttggattcccgactacgagtgatctcctactgaacaacacgtgaacttgatgcccagtcatcccgactgggcataatcattgttggaacaagtcgcatcgtttgacgaccattcaaagcagtcgacatgaacaagggggagtggaatctcaatggcacagcatccgatgaaagtggtcctgttggatcttgacggcacgcttaccaagtccgacggcggcattatcggctccgtcatcaagaccttcgaagagatcggtcgaccggttccggacgccgccgaactgcgacgcttcatcggaccggcgattattgaatctctgcgtcgcaatcatgtgcctgcggaagatctggatcgggccgtggacatctaccgcagctactacggagaccgtgccgtgttcgacgatccgaacgagcccggcaacaaggtgcccggacgactggtgaacgtcgtattcccaggcatccgtgaacagctgctcaaactgcatgccgacggttactacctggcactggccagctgcaagcccgaataccagtgcatgcctatctgcgaccatttccacctgaccgaactgttggacggcatctatggtgcttccaaagacaattcccgtctggacaaagatcaggtgattcggtactgcttcgacaaaatcggttttgatgctgcagcgggggacagggccgtgatgatcggcgaccgctacaccgacattgacggcgcccacgcctgcaatttggacgctatcggctgccgctggggctacgctccggccggtgagatggaggaacacggtgcctacgaaattattgagcaacctgagcagctcgaagacgccgtaaaccgttatttccaaacgcactgaaacacaacggcgaggacttcttcatgatgggatgcgatggagcctgcgccgcgggcttcgacctggttttcatcggtttgccgttgctgtcgctgtatgagattcccatgctgatatggttcatttggcgagcattccactggaaacgaaatgacaaggattggctgaaaggcacggcgattcttgcaattgcggtggtcgctccggtgctcctttggctgtcggccttttggctgtcggcctggtatgcgtggactagttgatacaggcgactgaatcctcgtcaaggataactaatctgacataacgtacattatcggctaactattcgggaatcttagaaacggcttaatttcaacggtcttcatttcgcacaggtaactgtggatgcctctgggtggcccgttgtggctacgcatttggctacgcatttcacacgacgggagaccaacgatggcaatgggtggcggcggttcgacatacaggagcgccgatggaatctggcacgccgcgatagacatagagcccgacagggccaccgggcgcaggcggcggctcacggcccaaggcaagaccaaggcggtggcgaacgcgaggctcgggatgaagctggacacatacgtgcgcaagggcttcacgccgaattcgccgtcgccgcgcctcatggactggctggagacttggtaccacgagcgggccgaggccaacctgcgtctgaacagcaggcgaagctacgagaacgccatcgtgcgactgaacaggatagccggcgcgaggcgcatcaactcgctgggccacaaggacatggccgacattcaggacggtctgaagtgctacagcccgaagacggccacgatcacttggtccgtctcctgaagaacgcgcttgaggccgcgcgtgacgaaaacctcatacggaggaacccggccaagatggtccgcccggtgttgggcaggcgcaggccgatgaaggtcctgtcccccgcgcaggcggcggagctgataaggaacgagcccgacccgatgtggcgtctcaactggctgctcgccttcgccaccggactgaggcagggcgaacggctcggactgacgatggacgagctgacgacgctgaacggcagacgcgccttggtgatcgaccaccagttgcagcgggtcccggactctgggagggcggactggcctctgggcgaagacgtgaccgatctgggcaacggcttctggctgtgcccgcccaagacggacagcggcgagagaatcgtggtcttggacgatgtgatgtgcggggcgctggacgaatggctcgccatacgcaagcaaaaaggcgtggactcccccatgctgttcgtcaccttgtaatgcagccgctccccctgcacgtcgatctcgaacaggtcgcctttcttggcgagcccaaggttcgtgaacatcagcctgtccgccagaccccggtgggccgcgatggccgcgtgcgtggattcgtctcccaccggcagcgacgtcccgtagaggtgccctgctgacttctccagcgtggcggagtccgtgccgtggcgcaccggcaggctatgtgcagcctcggatagcggaccgcccccattgtgcccttgccgtccacgtcgagcagcccacggtactccttgtcccccgctgtatgaggtccttgagaaggtgtccccggcctcgccaagcaccgactgcggccttgccgaaaggccctcgttgtatgccttgtcttcctcgatcatcccctgccgtctggtgtgggcaaggctgcggcctcggcgctcgcggtctgcccggcggagtcgatggcttgcaggacgaatggtgcgctgagcgtcagcccgccgagcagcaggaggacgacgccgagccatccggagatgtcacgtttcataatccgccttccaagcgagcgatggaaaaggccacggccggaggaacccggaaccgtggccttggcttccgaaggggtctgtgccccgaaggccgtttacgcgtggcgcctacgctaccaaatcattaccgctcacaataccatcctgccaacattagtcagcgcgacgccgacgatgaacgaagatcaatgcaatcaccactccggcgattagggcggtcacaccaccagcaatcatgtaagccagccacgtcgagacaaggaacgtaccctttcttcccagcgtcttggttgacgtggtcgcaccattggcggtgttcgtcgcggagtattgcatgcagtcggagccgccatcggaacggcactgctccaccttcttccacgccgcctgctgacgctcatactcccgcccgatgagcccggcctcacatgggacattatccgccgcggtgccaacgccgtccgggttcgtcttgcaatcctgcgtgtaccagtccttcagatccgggtattgggcggctgctttcatctggtactccagaatcggattcacatccttgtactgggccgggtcaaccgtcagcaacgcattcaggtccacctcaccgaaccctcgcttgcgttcagggtcaatgaccggcttgcccttgccgctcttcgtgttgcgtatcaaagactggatgatctggttgcccgtcgcgtcgggccacttctgcatggccagcgccaagtacgatgacaacaccgctgccgcggttgacgtgccgccattgcccgcgatatcgtagacattcgaaagaggattgaccgagtctaatacgttcatgccataggacagcaccgccacattgccgtccataacatccgaggtgggagctaggttcccagactcgtccacgctgttcaccatcaccacaccggggaaggtctccatgctgcgcgggtcgccggtcagatcatccaagccgggattcatgtcattcgcacgtccttcgaccatgacgaccccatgacgcagggcatccacatacccagcataatccgtgctgacgagagcacctccctgagaacggttgaggatgcgagcgccccagtccaccgccgtcttgacatctgcaccactgtcgcttgtcgcatcacccgcgagtttctgatcgcaaggtgtcacagcaggccccgcattaaccgccccatccgtaatatgcaacacgtccgctttgggcgccgaccccatgattccgggccacttcgaggtgtagttgcttccatcacccacgatccatgccagcatgtcggtgccgtgcgaggagtagtagccgccttcaccggacttgatcgtcgcggtcaacggcttgccgtccaccttgcactcgaccgtcttgtcatccacgttatggaatcgtcccagcttgtatgtgatcgaggcatgcttcaacgcgggataatcctccaccgcctgcgaatccagcaccgccaccttcacaccggaaccatcaatgccctgcttccacgcggcagccaccacatcgttcgccaccggccaacgcccgtcatccgccgcgaacgcgccgggcgtccacgcgcaaggcaacacacacgccagcgcgaacgcgcacccggccttcaccctcgaccaacgagaaaccatgtaaccactcacctctccactggcctgcatctgaacgccatcttcgaacatctcctgatattcgaagatggcgtccagcatacgctacttcgtctcttcgtaccaatcccttgtactgccatcagacaaaatcacgtggccagtctcaccactcatatgcttgacgcggtgcgcaatctcctcatggcgaccatgaaccatcgggcgctgaactgggttacccaaatacccgcaagtacgcttcgtcacgttgcacttgcttggatcggaattgccacactcagggcacttgaaccctccgccccggcgctttgacacatagatgtcccacggctcgcacttgaacccgttgctcgccagcaaccccctcgccgtggcgaccttgccgtccagcggctcgaacacggcctcgccctcgtatggcctgaactcggtcatcctccaattgccgccgaactggtcctcgtagtatgcggcgaccttcctcgcggcggcgctggaggcgaccctctgcgacgcggacagggcgaccaccttcctgtcgccgctgagcgtcttcaccacgtccacgtcctgcggcttgctcaatagcgcgaaggggccgtccgggtcgtcgcggtcgaagccggccagcacgaggcccgacctgctctggtcctcgttaatccatttgtcgagcttgacttgcagcttcgcgttgtgcgtggcgttgctccacggctcgaacggtatgagggcaccgatcggtcttggtttccggctcccactggcggcatgaggcttcacggtagagtccgcaggtggctagggtgtgtttacgctagttgggttttggctgtgttttttcaggtagatgtgtcgatgaggatgagccggaggtcggcgaggaaggcctcgtcgagcctgtcgtagcgggtggcggccttgcggtagcgcttcatgcggttgaagacgcgttcgaccatgttccgccccttgtgcgcctccctgtcgcaatcccatggggccgtacggttcctcttgggcggcgcaaccggcgtcaggccgaacgactcggccggcggccgggtgggatccccctcgtgcgcgcggtccatgagcaggtgctccatcgcgccgtccccgggccagcggttgaaccgccggtagacggtgacccacttgccgtggcgctccggcaggtccctccacggggctcccgtgcggcacatccacggcagggcgttgacgaacgtgtggttgtcggccacggcgggctccggcgcgggcgcggcaacggatgcgcgaccctcatgaactcatgaaccggtcaagcgtgatgtcatacctcggcgtacacatacgacaattatcacgcaaaacttcaccctaattatttaaataaatatatggaatgtcgtcatcgccgatcgaagcgaggtccggcccaccgcccccgccgtccttcacggaaaacggacgcgatccgaaacatggcgggccgccattccaccccacgacgtattcggccgaagtcggcgtttcgtggccgaaccattgccttcgcattgaacgcagacacttcgacgggccttacagatcgcccgccccgccttcgggcgcggcaggtgatcgtcgaacatgatcagcggcccacgctcgcgcgacccgacggaacagcgcggctggaaccggaggaacagacatccgggggcgggcatgcggcgggaagacgccggcgcgtcctttccgccgcatggtcgaatgaacccgtacggcgccaccgccggatccggacggcatgggcgttcccaccggacaccggccgcggcggcggaacccgccgaacggtcgtcggagacgggacccctccatcacggcgcggggcatgggcgtccatcgtccggc

SEQ ID NO: 3692 - DNA, 23508 bp, Unknown
  R150_10m  MAG No. k141_2948
gcccccggcccaccccggggccacgccccacacgctaatgaaaggaagaaaaggagaaagaaagctttggcgggcagtgccggctgctgtgaccttgccatcacagcagccgggctgatcccgcctattcagttatggtgtgtgtcgtattcggtgcggagaccgagcgggcaagcccgctattttttatctccgccgaccgccatcaccgcgcgctgaagcacaacgaagacgaggatcatgagaccgataacgatggtggtccattcggccggcacaccgaagtcagaggtgagcggatcgaggatggagcggaccagagagccgagcacggagccgagcacgtagccgaagccaccggtgatgatcgtaccgccgatgaccacggaggcaacggcgtcgagctcccagccaatacccacagtgttcttggcagagccgatgtttgcggtgtacacgatcgaggccagggcggcgagagtcgcagaggtcaagtagatgatgtactgcgtgcgcttgaccggcagacccataagttccgcggaggaacgggagccgccgatggcgtagatggtgcgtccggtgcgggtatggtgcaggaagacgtagccgaagaccacaaccaccagtgcgatgatcacgccgacgttgaaggacagatcgttggagatcttcggattgtcgatgatcttgatctcgttggagatgaacgagaagtcattgccctgcgggaaggtcagcgagtcggtggagatgatggaggcaagaccacgggccaggaacatcgtcgacagggtcgcgatgaacggctgcatgttgaattcctcgatcaaggtgccggccagcaggccgaacacagcgccgatgagcagcatgatgatcatgaccaggaaggcgggcacgccggcgttcgccagcttcaggccgacgactgcggtgatggccacgatagcaccgacagacaaatcgataccaccggtcagaatcggcagggtcatggccacagccagaataatcaggtaggcgtggtcaatgaacagggaggagatgaagcccagtcgaatgtaggtgccgaacaacgcctgacccatgatgatcatcaggatgaagatcaccacggccgcgagggtcgggatcatctgacgatcgagcttgaagcccttcttgggagccttcactttgtttgccgtagctgttgtcatgctgccaccgccttagcttgagccttgagcgcgcgcttgcgtttcatattcgcgctcaggttgtgaatcttcggagcctgcatcacgcagatcacaatcacaacgacggcgaagaaggccggagttgcctcggcgttgacgcccagggtgatgatggtcttgcggatcatggcgataattacagcaccgacagcagagccggcgagggagaacttaccacccagcagtgaagtaccgccgatgacgactgccagaatggcgtacatttcgaggtcctgaccggtcttaaccacgtcgacacgcatcacggatgcggtggcgaacagaccagcgatggccgcgaggaagccggaaatcgcgtagacgaggaagaggatcttcttcggcttgataccggtcatacgggaggcttcctggttgatgcccacggcctcaatcatcatgcccatagcggtcttgcggcacagcaggccaacgagaatcacaatgataacggcgatgacgaagttggcgggaatgcccagaatgaagccgttggcgaaccacttcagcggttcgttgccagcaactgcggaggcgtcggtgttctcaccggaggtgatgaccttggccataccacggccggcgagcatcataatcagggtggtgatgaacggctgtaggcccaggaaggaaaccagagcgccgttgacgcagccaatggccagaccaacagccaaggcgatgaggatggagagccacacgttcatgccattggacagggtctgcatggcggcggcacctgccactgccataacggaaccgaccgaaaggtcgataccggcggtggagataaccaaggtcataccggttgcaatcatcaggtatcgggcagattcctggagcatggtgatcagcgggccggccagaccaccggtgttgctgttccagctcagagccaggaagtcatgctggaagatggtgcagatgatgaccagaagaatgaatgcgacgatcgaccaggtcaggttgctgctcagcagcttcttgacaaagttgttgccctgggcttttgccttttcagccatctcatgcctcctttccggtgtttacgttggtgttagcgatggtttcgacgatggtcgcctgagagacggtgtcgtcgttttcgatttctgcgatcttgtggcggtccttgagaacctcgatgtcgtcggacagacgcacgacctcttcaagctcggaggagatgaagacaacgcccatgccctgagaagccaggtcaagcacgacctgctgaatttcagccttggcaccgatatcgataccacgggtcggctcgtccagaatcagcagctcggggtgcgtggccagccaacggccaatgagcaccttctgctggttgccgccggagagattcttgaccgggcgatccgggtcggcgggacgaacgttgagttccttcatgtacttgtcaacgatggcgtccgcttccttcttgggaatcggcttgaacataccgcgcgttgcctgcagggcgataaggatgttctggcggacggtcaggtcgccgatgatgccctcatcacgacggttttcggtggagtacgcgattttgttcttcaaagccgtgtacggatcggagatgttgaccttcttgccgttgagcgtgtaggtacccgaatccggcttgtcggcaccatacaggagtcgaccaagctcggtacgaccggagcccagcaggccagcgaagccaacgacctcacccttgtagatgtcaacatcaaccgggttgatggtgcccttcttgccgaggcccttgacatcgacgatcggcttctcgccaggggtgatttcacggcgagccttcttggcaccaatctgggacagctcggcggcggacttaccaatcatcatgccgatgagttcgtcgcgcggggtgtccttggtcatgacctccttgatgaactggccgttacgcagaatggtcagacgatcggtaatctcataaatctgatcgaggaagtgggagacgaagaggatggccacgcccgagtcacgcaccttgcgcatgatcgcgaacaggtccctgacctcgttggcatccagcgaagaggtcggctcatcgagaatcagcaccttggcgttgataaccatagcgcgggcgatggcgaccagctgctgcatagcgatggagatggagctcagcggagtgtgcgggtcaatggattcgaggcccatctgtgccaaatacttcttggcggcctcgtgggtcttcttccagtcgatgccgaaggggccgcgcttttcgtggcccagcatcacgttctcaccgacggaaaggttggtgcacaggttcacttcctgatacacggtggcgataccggcgttttgtgcgtcgagggtgccgttgaactgctgaggcttgccgtccaccataatggagccggcgttgatcttgtacacaccggtcagagccttaatcatggtggacttgcctgcaccgttctcacccatcagggcgtgaacttcacccgggtagagagtcaaatcaacaccatccaaggccttgacgcccgggaattcaatcgtaatgcccttcattacgacgatggggtttttatctgtcatgtctttgccttaaacgagaatgagatgttatcgttttgtgatatttgagccacacatgagtgatggtgtggaaggaacatccttctcacaccatcacaccaattatttggtccagttatcaatgagtcgcagcagacttatcagtaggcgcgggtgttgttgtccagggcttccttggcggaggcggcgtcgaaggtcttggactcgatctcgatgtccttctcaacggtcttgccatccagatagtccttgacggcctgagcggtttccttaccgaagatcgggttgtactcgatcacgtaggagaggtcgccatcaacaagagcctgcagagcgttcttggtaccgtcgatggtgatgatcttgaccttgcccttgaggccggcggcgtcaacagcctgagcggcaccgaggcccatctcgtcgttctgagcgaagatgaactgcgggttgtcggacttgtacttgtcgagcagaccagcggtcacggtcttggcctcatcagtggaccagttagcggactgggactcaagaaccttgacgttggaggcaaccttgttgtcccaaccagtgccacgatccttcaccacggacaggccggcagggccttcgaggatgaagccgttggcgccatccgggaagttcttgttcacgaactcggcagcctgctcgccgcaccagacgttggacggtccgatgtgagcaacgatggccttcttggcctcggcgtccttgacgtccacgttacggtcaacggtgaagaccggaatctcagcctcagcggccttcttcagggagtcatcccaaccggaatcctcggtggaggacaggatgatggcgtcgacttcgtcgttaacgaacttgttgaacgcctgaatctgcttctgctgatcgttgttctgggtcggagagtaggtcaggtcaaagccggcatcctcgaatgcctgctgaatgtccttctcgttggcggtacggaagccgccctcagggcccacagcaacgaagccaaccgtcttcttgccggagtccgagctgccacctgcgttgctggaaccgcatgcggcaacgctgacaagcgcagcagcagaagcaacgagggcaatggccttcttccaattcttcataaatactcctcctcgagcagtgtttatttttttggatgatcttccatcctgtttggtgactgttcgtcatcgacaatctctagtgtgacgctcacaggccaaatgttcaatcgcatgcgataacagtttgataacaggtttataacagtttgataacagtagttcaaaaaacggcttcacagcgccgttttgccttgtcattaagccataataagaggtggttgcacggcggcaatgccgctcgtcagccgagcgacaaagccgccgcatcacaacacaagaaaagttattatgaacaccgtttttcttataccatctactgcgcaccgagggcagtgacctggctatcggcgatggtccaggaaccgtcgagtgagccggaaacggagcgcacaatacccaaatcgtccacaatggccaggcgacgggacaggctgatctgccccgatgccatcgacgttatgattccattgggtaaacgctgcgcattggccgggcctggtgccatttgacgccatgcctcttgttgttcgctgtttccctcaggaggtgtggtggcgtacaccagattcagatcattgtagaacgtgagcatggtgacgtgcctgagcacactcacttgggtggccgctttgctcagaccgctcagtgttttatcaccgttgcgcgccacaccggtcatcatcacgccgttcgtgtcctcgcccctgactgccaacgccaatcggcacccttccggagaaaccgccaatgccacaatgctgtcggcagcaccaagccaatcaagcttcagatcggtttccttgcccccatctgacacatgcaattcgcgcccgttctcggatacagcccatacttcgccatccagaccttcggtaatcgatcgcatcggctcgccggagaacatcaccccacaggacgcaccatcagatttcaggcattcgaccacgccgtccgcacgcaacaccgcgccgccggatgaggaaaaaacgaagccccgagcatcgtcatatccgggggcctcccctacacgcaacggactggagctggccagggaaacgatatgaccaccggtcagcgtgtatacgcccgctgtcggctgctcggtagtaagtttcacatttgcgtcggcatcggaatagtccactccatcgccggtaatcctcagcgcgtattcggcattgccgtcgcccatagtcagacggatgcgacgtaccagcaggcctcgttcttcctcgttcaacgcattgataccgctgttgaggtgtatctccaccacattgttcttcaccggcacgctgtcgaccgcgagtttgatgttagacaagccggcgcctcgcagcactccttccaaccaggagggtgcatccgagagcacttcaccgactgcctgggtgcgccagttgcgccagctcaaccaacgaatatccgggataagttgcttgccggaagtactcacctgatacacggatacttggcggaacacctgttcaaaatctgcggtggaaatcaccacgccgctttccaatgacgagatgcgccattggccgcttttcttcatcagcgtatagggaagcctgcgcgtttgggtgctgtttgacggcgtgtatacgccatgcgaatccaaggaacccaccacctgaagttccacttccacaatcagtgagctttccgcaccttgtggcgcgcttatggtgttggcgcgtcggcggaaatcaggggtgccgctgtataccagtgccgcagaatctccattccacccggcagaagccgagccagtcaggaattcgcgagccacgcgatagccatcggactgcacgccagcaggcatagcgtcatagaaccctttgacaatggtttccggctgtgcatcgtccgcaggcccctgaggattggtgtaaacacgctgggtctgctgttccaccggtgccagagtctgcaccgagccgctaatcggcaaaccgaacggacttgagcatgccgtcatcgtgatgcaacaggctatggccgcgcctgcggcggcaatcgttctggtcactcgtctcatagtggcctccccatcatcgtgtcgcggcgaacctcatgataatcatgtgtgacttggctggtggccacaccaaacccaccggtaacacgcaggtcatccggcgtttcagaagcaaaattcaccggcagttcagcgtccgccacctcaccttggtcggggtcacgcggcagcaataccaagaaccaggtgccctcccccactgccgaacgtacacggatactaccgtggtgcagcaaggcatcagtcatggcgatggccaggcccaatccggtgccgccggtaacgcgtgaacgtgaaaggtcgcctctccagaatcgatcgaatacatgagcgactttgtcttcgtcgataccaacgccatagtcgcgaacgctgatggccacggctttgcggttggccgcgacgcgcacttcgatcggccggtcctcagcgaaatcgacggcattggccaacagatttctgacgatgcgaatcactcgacgcgaatcgatacgagtcaaaacctgcacattgggcagatacgtgtgaatcggcacccgtttggcttgggcgatgccgtcaacttggtccactgccgtttcaattggttcgcataaatcggtttccacaaggtcgagtgccgcataaccggcatcgtagcgggagatttccaacagatcggcgagcatgtcttggaatcgactgatctggccggccaacagttcgaccgtacgcttggtggaggggtcgaagccgtcttttttcatttcgagcaggtcggaagccatacgcatggtggtcaccggggtacgcaattcatgactgacgtcggacacaaatcgtttctggaaaacgcttgcttcctccagctcatcgatcttctggttgagcgcatcagccatcgtattgaaggattgctgcagcacaccaagctcatccttacgatccacggtaacgcgcatatcgagattgccggaggccagtgtttccgaggccgctgccactcgtccaatcgggcgcacgatgccacgaatcaccagccagattactacgcccaccacgatggacagcaacgcacagatgaccaccagactgagctgaatctgcgtcaaggactgctgctggaacgtgtacgaataaatggcgaagaattcgaggttgccggccacgccaaagtccaatacggtgccgagcaccgctgcaggcgtcccgctgcccggcatgccggaatcaccgggaatttcgaccggctgatagaacacgctgtcatccaagtcggaagccacggacgaacggatgtcgtcagaaatcagactttgatagctgggttcggtggatacggggatgatggcacgcgagttggtatcacgactccacaaatacacacctatcaggttggaggacccctcggattgcaacgaggacgccaagtcattgaccagctgttggatctgcactacggcggagacatcggccgcgtccagactggtttgggcctgctgcaccatgtttgaatagtcggcacgcgactgcgaagtgatttgggtaagcagcgaggcgcgcactgataccatcgatacgccagagaagacgatggccacggccagcgtaagaatcacggtgagggccacggtgcgggcctgcagtgagcgacgaacttcagcgcgtccgtggcgcagcaagcgtttgaggctgaatcgagggcgcaggttcattgttcaggagtgacgaacttgtagccgataccgcgtacggtctgcacgatttgcgggttctcggggtcgtcctccactttggccctaaggcgttgaacatgcacattgaccaggcgcgtatcgccggaattctcgtatccccagacattcttgagcaggctggaacgactgatggcctcgccggcggcggccgcaagcatgaacagcagctcgaattccatcggagtgagattcaggtccttgccatccttggtggcggtgtgttccaaacggtcgatgacgatgggtccgcgttccagatggttgacgtttgcattgccaccgcttgcgccaccggtggcaccgtcttcggcggccggcttggcgatgcggaagcgtgcacggatacgcgccagcagttcggctactttgaagggcttgggcacgtagtcgtcggcaccggcttccaagccggccacgacgtcaagtgtgtctgatttggcggtgagcatgataatcggcacattagaggtagctctgatgcggcgggccacctccgtgccgtccagcccggggagcataacgtcaagcagaatcaaatcgggcttgacgatggggaacatttccacagccctcagcccgtccaggcaggtcacagtctggaatccctcgttttccaaaacaagactaagcatttcgccgatggcctgatcatcgtccacgatgaagatggtcgccatggtgtttgcctcccctttttccactgttattgttgcgttacactttactcccctatgttcatttctgttcgggttccccaccatgcagtatcgggcgaatcttggcaagacgctggctgacttcgtgttcatagccgcgatcgttgggatggtagtactcggtgccacgcagctcttcgggcatatattcctgtggcgccacggcaccgggccaatcgtgcgcatacttgtagccctcgtggttgccccactctttcataagcttggtgggggcgttcctcaaatacagcggaacagcgccgatcttgccggtatccacgtccgcgagcgcctggttaatggcgttatagctggcatttgatttgggcgcggtggccacggcaatcgtggcttcggccaaaataatacgtgcctcgggcatgccgaccagcgccacggcctgcgccgcggccacggtgacctgcaaaatctgcggggcggccatgccgacttcctcgctggcggcaatcatgatgcgacgggcgatgaagcgcggatcttcacccgctttcagcatgcgcgccagataatggatggcggcatccggatcggagccccgcatggatttgatgaatgcggaaatcacgtcgtaatggtcatcgccgtctttgtcgtagcgcacggtggcggtgtccattaccgtagccacgatttcggaggtgatgatgggtcggcgtgcgccctttttgcgggcttcgtcgccggtgaccgcgccagccgcggcctccagaatcgtgagactcttgcgtgcgtcgccaccggccatgcgcacgatatcggcgatggcttcgtccgtggctttgacctcgtccctgagaccgcggtcatcagtcagcgcgcgctgcaccagttcggtgagctgatcaggctccaatgactcaagcttgacgaccaccgaacgggagagcaacggtttgatgatggaaaagctcgggttctcggtggtggcgccgataaaggtcacgtcgcggttttcgacggcgggaagcagcgcatcctgctgggatttggagaagcgatgcacctcgtcgatgaacagtacggtttcccggccgcgtgacacgagccgttcgtgagcgcgggtgagtacgtcgcgcacgtctttgacgccggaggtcacggcggagagttcctcaaacacgcggccggattggccggccacgatggtggcgagcgtggtcttgccgacgcctggagggccgaacaggattacggagctcggcgcggtgagactgcctttgctggccggattggcgaggcggcgcagcggcgagccctggcccaacacctgcgtttggccaatcacctcgtccaaagtgcgtggacgcatgcgcaccgccaacggccgtgtcatcgactccggcgcatcagccgccccaaacaaatcgttctcactcataacgtcctatagtaccccagtgttcgaacagacgttcgagctgcaccttggcttccctcagagaggggagccaggaatcagttactcaccttgtagtcgtggaagactacttcgccggtgtcttgggtggcgtcaaggtccacgatgccttcgatggcccagtcgtggtcgccatcggaatcatcgataatctgacgcaccttccacgtatgctcgtcgttctcgtgcttgtcatccaacatgaacagttcgggcgagcgcgcttcggcgccgatgcccacgtactcgtgctcgtcgtagtagtcgtcgagcacatcttcccattcgtgcacgccgtagccccagtccttgtcgagcgcgccgagcttgtccggctggtcaaggtccataagccgcacacggcggaacaaggcattgcgcaccagcacggtaagaccacgacggtcctcgaccaccgcgttcttcttgcccggcgccgccaaggaggccgccgcctcggactggtcggcggagtcaccggcgttctcccattcgtccaccagcgaggagtcgatggagcgcacgagcacgcgcagccacgagatgatgtcttcgagttgctcgtcacgcttttcgggcggcacggtgcgcgccagcgtgcggtaggcgtccgagaggtagcgcaacagggtgccttcggagcgggcgatgttgtatcgggtgatgtatccggtgaagtcggaggcggtttccaccatgtcgcgcaccacggatttcggcgacagccagtagtcgttggcccacggcacatcgtggcggtactgatcgaacgcggcttcgagcatgtcttccagtggcttcggatacgtaatctcctgcagcttatccatacgctcgtcatagtcgagtccgtcggccttcatatcggccatcgccttgtctcgggcctgacgctcctgggcacgcagcacctgcttggggtcttcgagcgtggcctcggccatggagatcacgtccagcgcataggtgtcggactcggggtcgagcagttcgagcgcggccagcaggaacggggagagcggctggtcgagggcgaagtcgtccggcatatcaagggtcatgtagtagtccttgccgccgtccttgcggccctcggtttcgatgacttcggtatcgaacagggtttggaaaatctcgtcggcccgctggtgcagatgctccttctggtcgggggtctgcgcggaatcgtcgatgagatcgtcgatacgggcacgggcgtcaccgccctgcgccacttcattgagcaccatcgaatgcgtgattttcaggtgcgggaccagggtctccggttcagcgtcgatgagcttatcaaacgtgctctggttccaggtcacaaaaccttccggcgccttcttgcgcttgaccttcttgagtttcttcggatctcccccggccttggcgatggctttctggttttcgatttcatattcgggagcctcggcgatcaccagtccctcggtatcgaatcccatacggccagctcgtccggcaatctggtggaattcgcgggcgcgcaggcggcgcatcttggtgccgtcgaacttggtcagggccgtaagcaccacggagtgaatcggcacattgatgccgacgcccaatgtatcggtgccgcaaatcaccggcagcagaccctgctgggcgagctgttcgaccaggcggcggtagcgaggcagcatgccggcatgatggatgccgacaccggtgcgcagcagtcgctgcagaatcttgccgaaggctgtggtgaacttgacgcctttgatggcttctgcgatggcttggcgctgttccttgctggatacaccggtggaggcgagcgcttgcgcggtctccaatgcggcgtcctgcgaaaagtggaccacgtaaatcggggtttcgccgttgcggaaggcgagttccacggttttttccatcgggtcgagcgtgtattcgtagctcaacggcaccggtcgcggcgcgtcggcgattacatccacgtccggggtgtcgttcagatcggagagcttgtcggcgatggcgtccacattgccgagtgtggcgctcatcagcaggaactgggtctgcggcagcgtgagcagtggcacctgccacgcccagccgcgctccggatcaccgtaataatggaattcgtccatcgccacgaggcccacatcggcatgggtgccttcgcgcaaagcctgattggcgaggatttcggcggtgcagcagatgatcggcgcgtccgcgttgatgtggctgtcgccggtgatcatgccgacattgtcgcggccgaacacttcgaccaagtcgaagaatttctccgacaccagcgccttgatcggagcggtgtaataggagcggcggccagtgcatagggcggcgaagtgcatgccgagcgccaccagcgatttgcccgaaccggtcggggtattcagaatcacatggtcgccggccaagaggtccataatggcctcttcctgatgcggccacggctcgatgcccttgacgtcttccacccagccgaagaaccgttcgtagatgtcgtcggccgtaagattccgttcgcgtccgtcgccgtcccattcgggggccagccgccccagggatccgtattccttctcgtcagtcataatgctcagtctacctagtggcctattccgacggcacgagccgccctccgtcgctatgcgacgcctcccgccagcgggcggagccatgcgaagagctgtgccatgcgcttggctccgccaatgggaggatcgctcacgccaaccggcggcgcacctcgtcggggtccacctcgggttcgaggggaggccaggtcatgttcatgttcttcaaggtggtgcgcagcagttcggagaccacggctcgcgaataccagcggttatcggccggaacgaggtaccacggtgcggcggccgtgctggttttctcgaacacttcctgccaagcgaacatgtactcatcccatcggtcgcgggcctcgaggtcggagatatcgaatttccagaacttggtgggatcatccagcctcccaagaaagtgttttttctgttcttcctggcttaccacgaggaagatcttgaggatggcgcatccgctggcggccagttcacgttcgaaatcgttgatctggtcgtagcgggcacgccatacgtcttcgggataggtgccatagacgtgcggcatgaccacatcttcataatgggagcggtcgaatacggcaatccaccccggcttgggcaattcacgcttcacacgccagaggaagtcgtggtcgagctcctcggccgtaggcttgccgaagccatggtaatggatgcccatcgggtcgccttggctgaacacgtgacgcacaatgccgcccttgccggaggcatccatgccttgcagcacgatgagcagccgccgtgtcgagcctttgacgccattcgcgtacatgagccgctggtatcgggcgatttcggaggagctgatcgaaatgaacttctcggcgtcctctttattgccgtcgaatccgggagtggaatcgccttcgacatcagtgacctgcatgccgtggtggaacataagacgttgagcgggcggcaacgaccatacggcgctgagcagttcactggatttcgccgcacgcgccagtcgttcaggcacgctggcactggagtcgatggtgtctatgcgatccaccgcgagctgtaataccttgtcgatccgtcgatcggttttggattcctttcccttgccgttcttgttgttctttcctgaggattttccggccgtaccccacttgccggcctcttcaggctcgttggttctgtcgtcgtccttggtcatgctcccgattgtacgtcttgtaactcaggagacctagcaacgtagcgacattcacatttcgcctgttactgcaaatctataggcatgcagtcgttcggaccgtaattgttggctttgcaccaattccaagcctcatctgtcgagtcgaagccctcaccggcaagaatcacatagtatttgtcggaattgctgctgtaggcgggccagtcacccgaccagataagcagtacgtttgaattcttgttgtgcatcgtgatgaattgcgcaagaatatcgcggtagttccaggtcttgccttcagcctccatacccttacgcttgctggacagctgtgcggtatacgtggaatagaacagctctgcggagtccttgtcgtgctcgacctgccaatccaatgccttgcttgcattattttcggcttcgtcatccgtaacgttgctgccgcttatcacgcctggatcagacgatccccagcaatatcttctttccggcagacccaccggaacgcggctgcgcagcgccaccgttgcctggcgccgtcgacaatgtcgaagtaggtgcggtcgccgtgttgaaacttgggggcagcggcatcgaacccgctggcacctgctggggagcagccggtaccagcgttgggccatccatcgactgaggacttgggcttggcgcagactgtgccatcggcgcaccgcattccgtgcagaatcggcttccctccggcatctccgttccgcaaacctggcacttcatactctctccgttctctctcatccctatcggccaatcccccgtccgtttgcagtacataaagaagcggcaaacggcccgaaacatacctgagccatcaggaagacggcacgatctgctacgagaaagagatcatcaccgaccggcaaatcgtcggcatcatgctgaagcatccgaccagcgcacgcggcttcaagcgctacttgcgcgccgcatcatgacgcttgaccacgatggtgacgccacccgcagcgaacagcgtcgccagaaccacaaccaacgcaaccgaggcaccggtattggccgtatgttcggtctgctgtggcttggtgctgccattggcattgacgctaccgctatggttgccgttatccttgtcgtccgtcccggtggacactccggtaacggcaacgggcagagcgaccatggtcttattggtcgcaccggtcacggtcaggctgatatcaccggtcttggttccggcgggaatcgtgaccttgagctcggcggtatcgccattcgcaacctgtgcttcgccgaccatctgctcgccgatggtggcggtcagcttcgtctcgtcaggcacgcccagcgaggtgagcgtgagcttcgagaagtgcagggtgaacgagccaccggccttgaccgcaccggtcgggataccggtgacggccactgcgcggcggtcgtagcgcggagcaaccggatcgttgtccttgagatagtcaatccaggcgtcgcggtccaccaaaccggtgtccttggtgttcgtgccttgggcgaaggcgcggaagttatcgccgccctccaacaggaagctgaacgaaccgatacggtagttgcgtttcagatccaaaggctcaccgttgacggtcaccgaggtgatgtgatggccttgcgcggcatccggatcatacgtgtagctcacgttgtgggacagtccgagttgcagatacgcgcgcgatggcgtgctgccgtccgcgttcgtctgccactgctgttccagcgcttccttgaactgcgcgccggtaagcgtggtggtccacaggttgttcaggaacggcagtacagcgttggcctgggcgtaggtgatattgccgtcggcatcgagcgtgcaggcgtcattggtgccggacttgcagaattcggcacgcagaccgccggggttgaccacaccgatttcggccgcgccgcggtcctcgcttttgagcgaatcgagcagcgcatcggccaccagattgcccatggtcgattcggaggcgcggtcgtcacgcttgccgtccttgaatgcggtggtgatatccgcagacaccttgccgaccttctcgccgcccttttcatcggccaccttaagggcctggtacacgatgtccttcaccttggcgacagtcggattcgcggcggcgagcaggccatcgttgtattcggcgtaatcgttgtagtgcggatcatttttgtcggcgggctgcgaagccacctgcacggccgtgttgccggacttgtcgtaagacaccgcaccggtggccgtgttgtaggtgagcaccacttggccgatgttggcggcatagctaccggtctggatgatcggccggttgttgtgcgcgggatcggtgtacgaatacttcatgtgggtatgtgcagtgaagatcacgttcactgccgcatcggtatcgtccacaatcttctggaatacggggctggcggccttctgctcgtcaagcgtgggcttggccgtggcgtcatcttcattggaggctgcaccctcatggtattcggccacaatcacgtcagcctcgccattggattcgtcgccgtcggtgagttgcttggccacacggttcacggcttccaccggatcgccgaattcgatgtccttgacaccaccgggagcaaccaacgtgccggtttcctgagtgaccgcaccgatgatgccgaccttcacgccgttcacctcctgaatgctgtactcgggcagagccggggttgtggtgcccttcttgtacacgttggcaccgaggtaatcccattgggcattgcgcgcgccctccttgccgatcacacgatcggtaaggtcggcatagccttggtcgaactcgtggttgcccaccgtcgaagccttgacgcccaaagcattgagcacatcgatggtcggctggtcctgctgcacagaagagttgaacagcgaagcaccgatattatcgccggcggacagcagcagtgatgagtcagggtattcgcccttgagctgctcgatggtggcggcgaacggcacggtgaggttcttgtcgatacggccgtggaaatcgttgaagttcagcagattgatggtggtgctggcgggaaccggctgattggttgccatatagcccatacgcaatgaatggccattggtcacgccgtcgtctgcccagaacaccggcttgtacaccttgccatttaccaccttggtggcttcggtatcaggggtgatggcaaaaccttcggtgttctgcgtacggatttcatccggagtgtcggtcagcttggtcagctgcagcacaccgttcttgaactcgtaggtaccgattttggcaccggtgttcgcatcattgtcgctttgggcgagcagctggttgtgctcggcgtcccaagtcagatcgcgcgggccatcatagccggcgttcactgcggactgcggcaggtcgatgtcggccaccggatgcaccaggtcctcatcattcacggtttgcagtgcgaaggcgtagatatggccggttttctccagtgcggcgaagaacagaccgccgaaatcattgccgaaaccgtccgggtcgtaggtcattacgttcttcgggtcaaggttggactggaatccgttggcggtcaggaccgagtcgggaataaaggctatgccttccaccccaagattggcgtccgctccgtggcccagcgtcacgccgaactgcgtgagtgctgcggtgagattccactcgtgcgtagcggtcagctcttgcgctccgtcgccgttggcgtcggtggttttctcggtcacgtcatactgcaggatggaaggccgcggcacattcttgttttcgttgtcgcgctcggcgccgatgaatatgcccttggatgaatctccgttgatcagcgtgatgccttcggagtccacaccgcccttgccgtccttgaagtgcagctgcttgccgcccttggtctgaccgttgttggtgaaggtccagccatcagtgggatcctgctgccatgtgccgttctggtagacgaacttgttgatggagccagggcccttatcagcggtgttgccgagcgtggggttcagatcgttgtcggccgcccacagcacgccttgcttgccgtctttaccggcttcatacaccagaccagacagattgccgtcagtgtggtcgccgccttgtcctttggcgccaaattcgccttcggcatccactgtggtcacatcggccaatcccgaccatgcgtccacggtcatggtctcgccggcgggcggagtcggagtcgggtcatcgaacacgttctgtgcaccgggcgtgggcgtatcggaaagcgcgaaagtgccatcgtccttacgggaccatgactgactgtcgctcatcttcttcacgccggttgtatcggtattccatgacgtggaatccaccacatcgctatcggtaaagtcgccgctggtagtggtcagataggcttcgtcggcatcggaacccaggccgggctcggccttgtcggggtcgatgtatgccaccagatatccgccggctttgatgacggtgtccgtattcgttacttcgctggtgccgatggtgtagtgcttcttggctttcttgccgctgtcgtagatgccccagcccttcacgtcaacgtctgtggagccggtgttcttgagctcgacccaatcgcaacgcttgctatccgggtctccggcagctttcgtattgccggcatagacctcgttgatgattacggatggtttggcagccgtgttctgttcggcagtggcctgctgctcgtccgcagccgcagcgggcacgccgatcagggcgatgctgctcagtgtcaccgcagcggtgagcagcgcgatggcgcgccgcgacatcgcggtgaaattgttggtgtggaacattactcccgttccttcctcgggttgtgccgccgcagcatgatgctcttcggcggatgacaccccgagagtatgagagagaaatgaagccgacaccgtatgaaggcaaactcggcagatctccaaactgaactttggctgaattaccgctgaagctggttcttggatttgcgtcgaaccgtccgtattccgccgacaatcgcgattacagcggtaccgatggctacgctgatcaacgccggtcgttgcgcggcatggagggtggcgagatccggtccggccgcaatggcgctgttttcacccgccgagccatcagacgccgggtgattgcccgcgtcggcgtactgggcattgaccacactcgggccggtaagcgccacttggtcggcggtctcgaccttggccacatcgccgtgcttatccaaggtgacgcgggcgcacagggctttggcccagttgatacgctgccagccgtcgctcgattgccatagggggtatccggaatccaaggcagtggctttcaaaatcgcgttgcgctgatcggcgtgcagttcgggataggccagtcgcagcacgtccgccgctccgcgcggtgccacgaaatcagcgccggactgggcggtgtcttgcgggaaggtgtaggtcaggcgtgcggtgtagacgcgcacggccgaggcctggtccgcgaccggctcggtggccaccgggtccagaaaatcgttggtgtagccgcccgaaccggaggccttggtgttggcgatgcaggcggcgagggtagtgccgtggccgtccgcggcgcagcgggacaccagatagtcccgcagctgccgggacgcgggcacgatggacgaagcgaattcgttatgccagtactgcccgttctgggcggatgcgccaatgcgcccgcccatgatgtcaagcggataatgcacgccgagcacgatgcggttgttgccggcctccgaagtgcgggccatgatttgcggcgcgagttcgggaatcatgccggccagcgcgataccccacgaataggcgccggtagtgtggccggaggggtaggaactgtttttctgcaagttcgagtagccgggcacgtgttcgagccatgagggtgattgcttgatgtcaagcgtggcgggcagtccggcgagatcgttagtgccgccgtagctgctttccgcacggttcagataggggcgcggatgcatggccgcacgttttgaggcgtaggtggaggccacgttaaaggagaagatatcggcgacggcgttgagtttcccggatttgagcccttcgctcatatatttgccaagcaccggaccgagcgcgtccggcatggcttcctcggcttgcagatcggagtcgacgagcgcacgcttgcgttgggcgttcaggccatccttatcgagattttcggcggctttgtggttaatggccacggccaaatcttcgtcgagtttcattgtatcggcgtcgagcaccttgccaccgtgttcggcatcggtgggggcctgccaatagttcttttcgtagtcggagagcaatgccacccaatccgggttgggcagctggtcggcctgtgcgattgcgggcgtcacggctagcgtggccgccaacgccagcggcgcaatggtcgcaatagcaaaaacggaggataggtgccggaacatcttcatatgttccaacctatcctccgtgaaggctacgtagccggagcccagtcaaacactcagtaaattcttcgtgccggcttagcggcgattgagctgactgtcaggcctctggcttgtcctcaggcttttgagactcctggaattcgccggtttccgggtcaacctgtgactcgggctgggtggcgtcatatccctgttcgtagcgggtgcgccgccagttgcgaatcgaggcgttggtgccacggtgatgcacatggtatttgcgcggcgcaccaccaaacggcagctcttcgacttccttggccacagcgatctggttgacattggacgggtctccggcggcgatcggcgccacgggctcggcctcggtgggcgcggccgtgcgctgctgcatgcgcgaaggcagccattcggcgagcctcgacaacagccagcaggcgacgaagtagatcaccgcagccatgaccagcgtctgcaggatgttgaagtacatcgagccgagtcggcgcgattcctgcagcaggtcggtatacatgatgatcgagcctagggcggtgtccttcaacaccacgaccagctgggtgacggcggccggcagcatggcgtagacggcctgcggcacctcgatctccatcagcgactgcgtttcggtcaggcccaaagcgagcgaggcctcacgctggccgcccggcagattgccgacgccggagcgcaccagttcggcgaccaccgaaccgttgtacagcaccaaggccagcaccacggcccaataggacgggctgggcaggcccgcgaacgcgaaccatcgccagaagaagatcatgagcagcagcacgggaaccgcacggcagaactcgacgatcacggcggagacgccacgtaccaacgggttcggcagcagtcggcccacgccgaacaccaagccgaacaccacggcacccaccacggccacgatggtggccttgatggtcatccacagtccgggcaggtagaagtcggtccacgcctctcgttcgacggcgggcttccacagctcccagctgagctggttctcgccgtccggcgggttgtgcaggcgcatgaggataaacacgagcaccaccgcgaacagaatgcccgcgatccagttgacgatgcgaatggtgcgccggcccttgggacctggcgcgtcgaacagcacggaattcgaagtatcggccatatccgtcacctccttacggcgagtttgttggacaggtacgtggtgagcatgccgatggggatgatcaggatcacgtagccgagcgcgaagatcaggaagatttggatgatcacgtcgggacggaattcgatcatctcgctcatcagcgaggatgtttcggtggccacggatgcggcggcggccacggtggagttcttgagcagggcgatcagcgtgttgccgagcggtgccacggagcctcggaaggcctgcggcagaatgatctcggtggcggactgcatgaagcccaagcccagcgctcgtgcggcctcggcctggccaatcggcacggtgttgatgcccgaacgcagagattcgcacacgaacgccgccgtgtacaggctcaggccggtgaccgcgagccagaagaagttcgtggtgaaggtgtcggagaagctgagcttcagctgcgcgtaggcacccagcaccatgaacaccatgatgatggtcagcggcaggttcttgaacagttccacatacgcaccggccacggccctgagcgaggaaatcggcgagatgcgcatcaccacaaggatcacgccgaggatcagggagaacagggcggaccatagggtcagttcgatattgaccagaaacgcgccgagcacgtcatactggctgaagagttccaggaatccgctcatcaggcctcctctccttcgtccggggtgggcgggttgtagcgtacgtcgggcgtgtagttggtgcccttggtgttatcgctgatggcgttctcccacgagccgtcctgaatcatgtccacgatggcgttgttgatgttggtggccagctgtgtgtcgcccttcttgatgcccacgccgtagtattcctgcgtgaacggtttgccgaccaccttgagcttgccgcgcgaggcggaggccaggccggccagaatgatgtcatcggtggtcacggcgtccacgatgccggagaacagtgcggtggcgcattcggcgtaaccgggctgctccataagctggacttcggaggcgaacttctccttgacggtggcggcggacgtcgaacc

SEQ ID NO: 3693 - DNA, 31784 bp, Unknown
  R150_10m  MAG No. k141_3137
aatcctacagaagattaggcggcactggttctttacaaacttgctcagtatgccaagcataatcatatatatcgaagtagtgacgttttcttgaactcattaaggagccaaggaaacgactgtctatgaagcattccaagcagctgccaaattcaatccactccagacattgataagatccgcctagaaagctgtcttccacttcgaatgttctggtatctcggcccgacacatccaaatgtcatctcgaatggcgtccgcgtttcggcttttcctgcctcggagggacaatggcgcgctgataggcgtaatgctcgtacacacgttggctctgcgcgagagacatgtcgtacgcctcgttcgccggttgcgcatattcaccaagatgagccagatcgttcgacatggtcaacggttcggacaatggtttgacgattcttccgaacatatcctcgaggggatgcaggtcattccgctgcattccctcgatcgaggcccggtcgttcgtccttttgacgatgagtccccagtcgaaatgccagccggcgtcgcgcgcaatgatctcccagaaaatgcgttgagtccgtccgttgccctcacggaacgggtggaggatgttgaagttgttgtagctgacactcagacgcctcacgaacgcttcccggccgaggcccttgaggagaccgtcaccgcgaagcacctcctcggagtagcgaacccctatgtcgaacagttccaacggttggaagggaagcccctcgcccttgcccatgtcgatggttcgtatctcccccgcccagccgtacacgtcctggaagaggaaccagtgtatgcggcgaagctgttccagcgtcccctccgcaggcgggaggtgttctctcagaatggcggcgcgggcggagcagagatcgttctccgcggctgccaacgcatcctcgtccgtggcacccacaaggttccgcagcacgttcgttcccggaatcaggtagggatcgaagacgcgcgccatcgtcactccagtccgtaacgacgacgagtacgggaaagcagctcggcactgcctatggccccccgcacgtactcttcggcatcgcgcatgaaggccctcgtcacgtcgccgccctccagccgcaccgactgcaccgacaatccgacgctctccgcacggcggcgcaccgcggattcagatatcgttccaatcatcacgccatcccttctcattagattctaacaaaaggatcaaagttccgccgttcccgccaaaagccgccacagaatcagccataatcaccctttgcaaagggaaaatcccctgaccgtctgctcaatcggcacatcaactatttccacgacaatcaggatttcgacttcactgtcaccggaaacactgaatcatggccagagtccttcttcctcccccacggataacgaagtgacgcaccattctcgaccatgcggctttctcctgctgacggagaatgaaactccacaggacacgctgctctaaacagggggatataggaatatgtctcttaggccctaaagggattctattagtttggcaaatccgtatatcgctttatttcttgacgtgtcggacaatacagtaaatcaaccactctatggctaagacaccaaggtaaaaaagcgcccatacagcaaaactaatcagctttacttccaatgtctgtacagttccatgcccatccactgttcttacaaataggaatgcactaatgcataaaaacaatacgaattgaatgatttggaaagctctccaacctttgttttccacaatcagcctcctgtaaccccaatctttatatgtcgattctaacatcccgcaccacccttggtcaaacgtcaggcacttactgcggcacgaactggatccacagggccgacatgatccggatcatcgaagaacacggcatcacagtcactgcccaacggcgaaacgccggaaccgctcgccacatcgttacccaacgcattggtctcaaccttggtggccagccatcccatatccctgatcgcaacccgcattcccgcaatcaggcaccaccgcccggtctcaagcccatgagacacttggagccatgactaccatcatcatgcgcacctccgaaggcgacatcaccatcaatctgttcgacgacaaggcaccgaacaccgtggccaacttcctgggcctcgccaccggcgagaaggaatgggcggacccgtacaccggccagccttcccatggcaagttctacaacggcctgaccttccaccgtatcatcaagcagttcatgattcagggcggttgcccgctgggcaccggtaccggcggccctggctacgagttcgacgatgagatcgacccgagcctgaagttcgacaagccatacctgctggctatggccaacgccggtctgcgtcgcggcatggacggcaaggtccatggcaccaacggctcccagttcttcatcaccaccgtgccgaccccgtggctggacggtcaccacaccatcttcggcgaggtcgccgatgacgactccaagaaggtcgtcgataagctcgaagcactggacaccgatccgatggatcgcccgctcgagccggccgtaattctgtccgtgaacgtggccgagtaagaccgacacatatacagcaaaggtcctgattggtattccagtcaggaccttttcgtattcttggctccctctctgaggggagctggcgccgcagacgtctgaggggagttccgcaagcccgcgctgctcccctcagtcagcttcgctgacagcccctcccggaggggagccaagcaacggcctacttcatcttgcgcagtcgaggttcggcggattccttggcaccggtgatgcggtacacgtcgaacacgccatcaatcttgcgcacggctgccagcaacgagttgagatgctgcggatcggccatttcgaagctgaactggctggtggccacgcgatcggaaccggtggcgatcgtaccggaaatgatgttcacgccatggtcggaaagcacacgtgtcacgtccgaaagcaggtttcgtcgatccagcgcctcgacctgaatcttgaccatgaacaggcccttggtgctggtccattcgacttcgaccacacgctcaggctgcttgtttttcagatcgatcatgttctggcagtcggtgcggtgcacggatacgccctgattacgggtgatgaagccgatgatattgtcaccgggcaccggcatgcagcaacgggccagcttgatccacacatcgcccacgcccttgacggataccccggtggagctgctggaagtcttgcgctccacgggcttgagcggcagagcctcctgctcgacctcctcatcgacctcgtcggccccggcatccttgaccagatgcgagatgacgttctgcgtggagatctgcccatcaccgatggcggcgaacacagcgtcggcgttcgggaaattgaggtcgtcggccacaccgatcaatgcctcggtggtcagcagcgcattgaccggcaagttacgtttgcgcatagcgcgggtcagttcgtcgcggccttcctcaatagcctcggtacgacgttccttcgagaaccactggcggatcttgtttcgtgccttcgggctcttgacgaagctcagccagtcgcgcgaaggaccggcggtatcggacttggaagtcaggatctccacggtgtcgccgttgtcgagcgtggtgtcgagcggcaccaaacgcccgttgacgcgcgcgcccatcgtacggtggcccacttcggtatgcacggcataggcgaaatcgaccggtgtggcatgggccggcaaagagacgatcttgcccttcggcgtgaagacatagacttcggacgagccgaggtcttccttcagggaaccgaggaattcgttggaatctggggtttcgctggtccaatcggcaagctgctgaatccatttgagattgtcggcttcggaaagctcctggttcttctcgtcacgcctgcggtcggacttgtccggcgagctcagggcgcggccggcctggccgttttccttgtatttccagtgcgcggcgatgccgaactcggcgcggcggtgcatgtcccaggtgcgaatctggatttccaccggcttgccaccggggcccaccaccgtggtgtgcagcgactggtacatgttgagcttcggcatggcgatgtagtccttgaaccggccgggaaccgggttccaccgcgcatgcacggcaccaagcgccgcatagcaatcctgaatggtgtcgacgatgatgcgcacaccgaccaaatcgtagatgttcgcgaaatcatggccgcgcacgatcatcttctgataaatcgagaagtagtccttcgggcgtccggtgacgtatgccttgatgttctgctcgtcgagatcctcgttgatctccgccagaatctgcttcaggtacacatcgcgctggccggctcggcgagccaccagcaccacgatctcgttgtagatcttcgggtagagcaccttgaagctcagttcctcgagctccgtcttgatggcgttcataccgagtcggttggccaaaggcgcgtacacgtcgagggtttcacgcgccttcttctgggcggacgtggtcttcacatagcgccaggtgcgggcgttgtgtacacggtcagcgagcttgaccaccaaggtgcgcacgtcgcggctcatggccaccacaagtttgcgaatggtttcggcttgggcggagtcgcccacttcaagctggctgagcttggtgacgccatcgaccagaccggccacggtgtcgccgaactcggcacggcattgatccaacgtgtagtcggtgtcctccaccgtatcatgcagcagaccggccgccaccacaatcggccccatgcccagatccgcgagaatctgggaaacggccaacggatggatgatgtatggttcgcccgacttgcgccgttgcgtgcaatgctggatgacggcgcgccggtacgcgcggtcgaggatggacaaatcctcaccgggatggtgggacttgcacactttcttgattggatccagcggattgagcggatcggcactgatctcacaacccaacttacgggcggcgtactgctcgccatcaatctctgccatgccagtcacctccctcgtcatgaagttcattgtaaccgcgaaccggagccttgtgcatgcacctgttcgccatcattggttccgcaaccgtcgttgccgtcatcaccttggtcattcaaccggcccaatccggtcaggacgccactcccgtcgaaccgaacccacgttcggcgcgatcggatccgggcagggtttcggccgggatgaaccgggcctcaacataccgctgaatcaccaattgagcgatgcgatcgcccggatggaagacggcggtgcgttccggatcgaggttgatcagcggcaccttgatctcgccacggtagccggcatcaacggtgccaggcgcgttgagcacggtgacgccctgcttggcggccagcccggaacgcggatgtaccaacgccacgtagcccgcaggtagggcgatggccacgccggtgggcaccagtacccgttcaaaaggcttcagcgtcacatcgacggtggtgatgaggtcggcaccggcatcgcccgcgtgggcatagtgcagctgggccggatgttcggggtcgaggctcttgaccaggacctcggtggattcgggctcgttgtaggtctcgtcgaacgccatcaggcggcgcactcctcacacaccggctggccatcctcgtccgtgtaggcgagctggctgcgatgcttgaccaggaagcactgcgagcagatgaactcgtcaccctgcatggggatgacggtcaccgaggaatcctcgttgctcaaatcggcgcccggcagttcgtagtcttcggcgatggcgttctcatcgtcgtcgatgtcgctcgaggcgttctgcgaggacttccccagcgcctgcagcgattcctcgtcctcatccttattgcggggggaatcataatcctgagccatcatggtcctttcgtcgtctttggttcgtaagtcgatatatatagcacggtcagcgccgtactcgcccataggatacacgatttgaaatactcgtaaagttcgacacgtggggcatacttaaaagaagtaatgtctttgcgacggaaagtggtgcgaatatgccagatgatcggcttgaaaaagcccgtttcgtacgcgtgagcaagacgggggacctcgtattctccattggcggcagggaaatggccgtgagcgtggacgacacgctcgaacgggcgattcttgaggccaagcaggtcagaagcgagacgcgacaggccccccagccgcatcagcagtccactttgccgatttcccagatacagtcgctgattcgcgccggcgccgatccggcccgtgtcgcggagaaatatcatctgagcgaaacgctggtacgtcgtttctccatggccgtggagaccgagaaacagtacgccatcgaacagttccttgccgtggcggcacccaaagacagcagggtgcgcaccatcagcgaactggtggaacgcacgctggcctctgctggaatcggcatggaatcagtgacctggaaatccacccggcgcggacttgagccttggcgcatcgtggcgatattcacttccgcgggccgtgagatccatgccgaatggacgtggaatatgcacgacaattccgtgatgagcctgaacaatgccgctcgaaaactgctcggcgaacagaatccggaatcagccacggattccaaactcaagccgacgattcctgaactgcccggcgactccgtacgttccgcgcgtatcgagcgcgccgtgtctgcttgggcggcgcctacgccttcgattccggccgcacggcctgccgcgatccggccctccgtcacttccacaggttccatgcccccggtggacctatccacgtccatctcaccggccacgaaccaggctcatgacgctacggcccccagcccggtctcttcgcagaccgccggacctgtttcgtcatctgccgcaggattgcagcaatcgcctgccacggcaccagagcaggattctgacaatatttcggacgagaccgtacggcgtggccccaatgcacagctggtagccaccgagcaggagcgggcggccgaatccgccgccaccaaacacgaggcaccagccaaaccggccaagcgtaaatcaggacgttcggccgtaccaagctgggacgagattctgttcggagactgaatttccgaatcaggccatatcgatcaggcagggaatatccatttccaatgccgtttgggagccatgcacgctcggcaggtgggtggctttgtctccttgcgtacgcgaatcgacgagggtcacggctcccgctgcctgcacgaccacatcgccgagcatcggccggactcgctcgcagaccggtccaaacaatccgtccgcgatggcctcatccctggtccgcaccaaggctcggtcttgcaggtaatcgcgccaccggcaagctatatcctcaggtcgttcatccggctcggcatacagcatcagcgagcgaggctctcccccgaccagtgacacgcctcgggtgagctgcggttcaacggcgatgtcaatccgctggtccacgtcggtttgcaccatgccgtggtcggctacgatgacgatcagcgtgcctttgggtgcgctgcgtttcaggagcgcgagctgggcgtcgatatgttcgaatgcggccacccagtgttcggaatcccacccgtaattgtggccgactttgtcggcgtcacggatgtacaggtaggtcaggccgggggtacgggaggcacgtgaggcggccagcacacgatcgcgtggggtgacgttgccttgatagtcggtgcctcgcaatgcggcttcggtcaatggcgatttggagaacttgggcaaccccgagcttgtgacgcgcacctcttgagccgcaagtttctcgaacaccgtctcctcgcgctgctggtcgagcggatcgaccatgggtggcacaggaatgtgcggattggctggtttgggtgccagcgcgtctttgaactggatgagttggatgagcttatggctggcgggttcgagctgcgtatagcccgccattgcggtcagtcccgggcaggttccggtaccgaatgcggccatggccgccacagtggtgcttggagcgcaggtggcgatgggacgctgattggcgcgttcgttcatcagcgaacgcagatagggcgcgtggccgaggcgcatggcgaggttccagaagcccaggccgtccacgagcaccacgatggccgattcggcgtcgggcagtcccaacgcgcgctggcaggccttgggatcggcgtggaccttggtgggagtcggatgcccaatcgcggcggacaaggcgggcagcacggcggacaggtgcagtgctcccccacgccgatcggccggggcgtcatccccatagcccacagtgggcaccagccgcagcaactcgtccatatccggcgtctcaacactcatagttgcccattcaagtagcacccctccccttggctcagtgcgcagagaacggttctcaataacaactgtgcgccccaacgcacataatcaaacaaacacacatcgactgaaacactggaatcacgccattttatcggcaaacatgtgcgattggcgcaccgaaaccagcgcacagttgttatcgagaaccgttctctgcgcactgtttcgcgccctcccgctaatatgggggcgttcgaaagggagtttcatggcatcacaccgcaaaccgtccgcgcaaacctacgatccgcgcacggtcaaggagcatatcgtcgagacgccgctgaacgaggagatgagcaaatccttcctcgagtatgcgtattcggtgatttacgcacgcgcactgcccgatgcgcgcgatggcttgaagccggtgcagcgccgtatcgtctaccagatgggcgagatgaacctgactcccgaccgcccgtatatgaagtccgcccgcgtggtgggcgaggtgatgggcaagctccatccgcacggcgattccgcgatctacgaggccatggtgcgtttggcacagccgttcgcgatgcgtctgccgctggtagatggccacggcaacttcggctcgctggatgacggccctgcggcctcccgttacaccgaggccaggcttggcccggcggccctcggcatgaacgcggatatcgatgaggacaccgtcgacttcacgccgaactatgacaacaagctcaaggaaccaaccgtgctgccggccgccatcccaaatctgctggtcaacggcggctcgggcatcgccgtgggcatggccacgaacctggccacccacaatctgggcgaggtggtgaacgccgccaagttcctcatggcgcattcggacgccaccctggaacaactgatgcgttacgtgcccggccccgactggcccaccggcggcacgatcatcggccgcgacggcatccgtgaggcctatgccactggccgtggtacgctcaccacgcgcgccgccacgcatatcgagcatgtcacggcccgcaagcaggccatcgtgatcaccgagctgccgtacatggtgggcccggagaaggtgatcgagcgtatttccgacggcgtgaagaaccgcaagctggaggggatttccggcgcgttcgatctgaccgatcgtcataacggcacgcgtatcgtcatcgagatcaagaccggtttcgacccgcatgcggtgctggtgcagctgttcaagcacacgccgttgcaggacaattttgccatgaacaacgtggcgctggtggagggccgcccgcacacgatgggcctgaaggagatgcttcaggtgtgggttgaccaccgccgtgtggtgattcgccgccgcagcgaatatcgcaagaagaaggcgctggaacgcctgcacctggtcgagggcctgctgctggccatgctggacatcgacgaggtgatccaggtaatccgcacctcagatgatgcggatgccgcgaaaagccgtttgatggttgtgttcgacctggacgaggtccaggcccagtacatcctcgacctgcgtctgcgccgtctgaccaagatgaaccgcatcgaacttgaggccgaacgcgatgacctgaagaagcgcatcgaggagctgacccgcattctggcctccgccgaagcgctcgaccaggtggtcaccgacgagatggacgaggcggtcgccaagtggggctcgccgcgtcgcaccgtgctgctggacgccgacccggatggcacgttgacgccggtcgtggcgcagggtgccggggcttcgggtgtgtccaagtccgcgctcgaagcggtgaaggccgccaccacgatttcctccgccgaagccgatgtggccgcagccgcagccgcagccaagaagaccggcgaacagtccgcgctgaccggagccttgaagatcgaggacgagccgtgcgtggtgatgatgagcgccaccggtttgattgcccgtaccacgccaagcgcgatggacgtgttcaatgcacggtccacatccgatgaacgtctgcgagacgatcaaatcaccacaatcttcgagacctccacgcgcgccacgtacgggctggtcacgtcggccggccgcctagtgctcgcgcatgtggttgatttgccagccttgcccgctgccgccacattgtcgctgaagggaggagttcaggccgacgaactgatcggcatgaccgaatccaccgatccgattcgtggcgagcgcgtgattacggcgatcgccatggagcagccgacgtccggcaaggccagtgccgaggacgagagcgaggatggtgccgccgaggccaagccgttgccgtcgctggctatcggtacccgtaacggtgtcatcaagcgttggaaccgtgaggcacccaccaccatggattcctggcccgtcattgatctgaaagatggcgacgaagtggtattcgccgccgtggccgaggatgacgaccgtctggtgttcatctcctccgattcctcgctactgacctttgaggcgaagaacgtgcgcccgcagggtcgcaccgcgggcggtatggccggcatcaagctggccgagggcgcccgtgtggcggcattcaacgtggttcccgccggcaaggtggcatggacctatgaggagggcgagaacggtttgacttccggctccggcgcggtggtgctcaccgtggccggcgactccgatgcactacccggcaccgaaaacggcgccgccaaggtcaccccgctggaaatgtaccccaccaagggccgcgctaccggtggcgtacgctcccagcgcttcctcaagggccagaacacgctgattcttgcctgggttggtctctacccgttgcatgcctccacatccgcaggctccccggtcgagcttcccaagcccgatatgcgccgagacggctccggagtggacctcgcctcccccatcgccttcattgcgtaacctcaattaagctccctctgatgggccgagccgtaaagcaaacacccccagtggggtgtttgtaggcgaggagcgaacgatagtgagccaaacacatagagaagagaccctaaacccgacctacactaagcatcaaggaggtggcgatgagactactggttgccgtatccaatgaaccgttggcccgcgccattcgtggtgcgctgcttgcctgtcgtcatgaggtgtccttggcaagcaccggcagtatcgcgctcgccgcggtcaccaaggagctatttgacgcagtgattctcgatgaatccctgctcggcatctccaccgagcaactcatcgaatcccttcacaatgcccgtgcctccgtcaagattctgctgctgacttcgacgccactcagcaaaaccatcggcgaaggcagccgctggcgagcgctgcctgacgagtacgccccgatcgaagagacgccctacagctccttcagcgcggattcacacgcaaacaactcagatgccgaagccgaacagtgcacggacaatgctgccgctagcgcacgagctaatgtacgacgcccggatgccgtactgagcaaaccattctccgatggcgaactgctctcatacgtcggctcgcttgccaccgactcccccaccatgatcattcgtggcaatctcacgttggataccacgaatcgcaaagcctactacgcatccacacacaccgcaatttcactgtcccgtctggaatacagtttgcttgaagcactggtcaaggctgatggccagtttgtcaacaccagcgaattggtcaagctcgtcggtggcccattcttcgagcaacaagggctcctcaggaacgccctctacacactggataagaagctcacccacgccggcctcatcatgacccaacgcggctccaactaccgcattcgatagctgggctcaatcagtacagccgcatgcctcggggaacgggggtgaagccggactggtggaggatgcgggcgaaggggtgacgcgcgttgaggggttcgccattgatgtcgctgaacgtcacggaaccggtgccattgcgtttgagagcgtaggccagttctgtggcggccttgcgcatttgttcgtcggaatcattggcggcgggttcatggccgaccgattgatcgaacgccgtcaagtgcttggctttggcagccgcgtatagtagcgcaccttgcgcattgagcacgaccgtggctccgatacggcgtgccggtttacccgcaccggcaggcgcgtccggccacgcgatggcggagccactgagatttgcggggtcgagcacactcaatgccaccacggactggccgcgatgctctgacggatgacgcaacgcatccacggtgtcgcgctcggcaaattgggccgcgccgaaaccacggacgaacatgcctcgtaccagtcgaccatgctcctccatgcgctgcaatatcggatacaacgctgagtagccacccgggatattttccttgtcgatcaccggctgcgcgatgacgccatacctgtccagcaacgtctcgaccagtgcgagcgcctgctcggtctgatcagtgtcttcggcttcagcttgcccgattacggcagaccacaaacctcctaacgtcatatccgtagtggctcggtgaatcggagcgacacgcccacgacgacgtgatgtagtggatttacgcgggcttgctgcgcctgcggttaatgcacgtaccggcgcgaagctggaattggtgaccttaccttgccagaccaagctccacaaggcatccttgaactgctgttcgctccactcttgcggaatgatttcaccggtgtttggattgatgtccggctccgcggcctcattccacacacgtttggcggcatccaccagttgacgggcatggaacgctccccctgagtccagtgcggtcagaatcgcttccggcatggtggcgtctgaagcgttcgatgtcgtaccatgttccacaccgctgagcaatattgaatccgccggatagaaagcaacctcaccggggtccatcgcactggttcccccggtttttgagccgacccagaccacatcgccgctggtcagcaactcatccagcaatgcaggttggtagtctcgtactcgtgcggggaataccgccgactcccagagtgcagtgggcagtgctatgccctccagctgctcgataacgcgcatgagcccgtcggcaccttcatatcgttcgccgccgaccggcccgataccttgtcggtcgataagaaacatctggaacgcctctggttctactggcttgactgctttacgcgccttggccaatgagcgagaccgaatgcggcggaatacgtccttatggagccactgttggccttgcttgtcatcatctacaaagtggccttgcagcaactcgcctttggcagccagtacatccaaagtatgcacggcatccgtagcatcgaggtgcagatcggccatgagctgatcggcggtgaaaggaccatgggttttggcgtaacgggtcacgcgaccagtcacatcatcgtcggcaagttcattccagaaagtgcgctcccccagttcctgttcgacttcgcgaatcacgtccgggttgagcacttgtgccatgtcggtggtgccgagcaagcgttcgagcacgtgcggatcgagagacaacagttgcgcgctgcgctcggcctgaggttggtcatactggtacatcaccacgccgacgaagccaaagagaatgttctcggcaaaaggcgatgacggctcggtctccacgtccttcacggtaatggtgccggcttgcaatccggtcatcacctcgttcagggcgggcatgtcgtatacgtcttgcaaacattcgcgcgcggtttccagcagcagcgggaagttcttgaccatacgtgcggcttgcaggagctgtgcggcgcgcagtcgctgctgccataggggcacgcgacggcccgggtcggatcgcggcatgaacagtgatcgggcggcgcattcgcggaatcgtgcggcgaatagcacggactcgcccacttgacgttctacatctgctttgaggtcttctgggtcgaaaaggaacaggtcttgagcaggaatatgtccgtcaccgtccggtagctgaatgacgataccgtcatcggcggcatatacctgcccatcgaaaccgtagcgttggcgcagtctgcggctgatggccatggaccacggttcgtgaacgcggcggccgaaggggcttaacagtacgatgcgccagccgccgtcttcatcgcgggtccgttccacgatgagggtttggtcgctgggaactgtgctggtgatggcttgttgctcggagagtaggcgggccaggttggtgatagcgttggggtctaggccgtctcggtggagacgggtgaggattgttgggatgaaggttgggacagctgggccttctgcggcagaactccccccagtccgcttcacgtctaatccggcggcgatttctcgggtgaagcgggctatggtacggctgaaaccgtagtcacggccagcgccttcaccgtgccagaacggcagacgggcggtgcggcccggagccggagtcacgaccacacgatcacgggtgatttcctgaatctgccatgtggaggtgccgagcgtaatgacatcgcccacgcgcgattcgtagaccatctcctcatccaactcgccgacgcgacgctggcctttgccggcgtccgcctcaggcaggaccacggtgtacagccctcgatcgggaatcgtaccgccagaggtaacggccactttctgcgaaccgggacgggcggaaatcaggccattatcccgattccataccagtcgcggccggaaggccgagaattcctcgctgttgtattcgccggacatcatgccgattacggcatcgaacatgtcacgtggcagttcggcaaacggcgcagcacggagcaccgtggcataccagtcatcagcgttcaaatcgtgcatcgaggcagcggccacggtctgctgggcgagaatatcgagcggattgcgcggcacggccaatggttctatatcgccggcaatcatggcttccagacttgcggccccagtgacgatttgctgacgggtgagcgggtagaacaatgcgtgagagacgccaccgacctgatgatcggcacgacctacacgctgcaatccggaggagaccgacaacggtgtatcgacttgaatcatcaagtcgaccgagcccatatcaatgcctagctccaaactggaggtggccaccacgcagcgcaattcaccacgcttgagccgttcctcaatcattttgcgacggtctttggagaccgacccatgatgagccatggcgatgacatcatcgccctcatgcgagccgacaagcatggtggtggaaccgaccacagcatcgtaatgtgtggagaacccttcgcggccttccggagagcccggatcccgcacagtgtcgggattggtgccatgccgggtctgcgcatagagatcattgaggcgcgcggtgagcttttcggccacaccacgcgaattgacgaacaccaatgtggtgcggtgcgcgagaatctcatccaaaatactgcgttccaccacgggccagatggaaccggaggtacggtcgcccgccgctccaaccaacgcggaggaatcgaacgcatcactcgcatcagaatcgtccccagaagtggaagaaacatctctatcatccaccggcacaatgcccctgcgttcggcaagtcgctgcatggccggcgtgacaccgctgatatgcggagcggaccgttcagcctccacgccaccgacacgctgcttggcattcacggactgcaaatcacgcatgttttccaacggctcaatcatgcgcagatccattgcaggccgcccaccgggattcacgatggtaaccggttgtccgccgcccaggaatcgcgccgcctcttcaggcggattcaccgtagcggatagaccaatgcgctgcatatgaaggtcactgaggccagcatcgatggcggtatcactgccctcatcagcatccgcatcgattgcatctcgcttgcgcgattccgcgacaaggttctccagccgttccagacttaccgccagatgtgcgccgcgcttggtgcccgccactgcatgaatctcatcgacgatcaccgtatcgacagtgccgagaatccgccctgccttcgaagtgagcaacagatacaacgattctggcgtggtaacgaggatatccggtggatgggaggctatgcgccgccgctcctgtgcggtggtgtcgcctgaacgagtggcgaccgcgatcttcggcacgggcagcccttgcgcctcgcattgtgcggcaatgccctccaaaggctgttctaggttcttggccacatcggccgcgagcgcctttaacggcgagatatacagcacacgcacaccggcacgccgcgtgcgtggcacggtcatcagccggtcaatggccgagagaaacgcagccaatgttttgccggagccggtaggtgcgatgaccaagacattacgaccggaatggattgccggccatgcctgagcctgtgcctcggtcggctgaccgaaggcatgctcgaaccacaccttggtgggttcggaaaacaggctcagggtttcgtacatatgtacgattataggtcagctgaagtaggcgatgacttcttcggcggtgccgtaggcgctttgggcaccaagcttggtggccgcataggcggagacataggagccgatttgcgcggattgcagcagcgtatggccagcggccaagccagccagcacagttcccatgaacgagtcgccgcaaccggtggtgtccaccgcattgacttgcgcggcggatacgcgatgccaacgtccgttctcgatcaccaccgaccccgacgcaccaagcgtcactatcgcccggtcgaatccgtaatcggtgaatcgttcggcgacctcataccagtcgagtgattccacatcgccgtccggcagacccagtaactgagccacttcatgctggttgaccagcagaatatccgtggcttccaccagttcgtgaggcagctcgtccataaatggcgagtcgttgagcagcacggtcacgccagcgtcatgcgcggtctgtgcggcggcgataacggtggagatcgggctctccaaacacagtcccaataccgcgcattcggcgatggtcgtgcgatgtgattgcacatagccggcacttgccttggcattggaacccggcgaatagacgatggtattctcgccctcagcgctcacggtgattaccgtggtgccgctggggccttcaacgtgcaggatatcggcggtgtcgacgccggcctcatccagcttgcctaataggaagtccgcgttggagtcctcgcccaccgcgcccagcaactggacattgacaccgaggcgagcagcggcagacgcctgattcgcgcctttgccgcccggcaacactttcatggcaccaccattgacggtttcgcctggcttgggcagtcgtttggtggtcacggtgtaatcggcgttcatcgagccgaccacgattaccgagcccggcgcatccttcagcgcttccaatcgttcccgtacgggctcgggcatctgtttatgttcttcttcacttatcaccatgggctccaagcatagtaggcggcgggcccaaatgcgcgcatgatcagccgcgcaacttacgaagacgctcgtgcatggccaccatcagcaccaagagcaccagcaaataccacgggtagagactgattgtcacatattgcgcgatgatgccgaacagtggcggcatgagcagtgagcccacataggcacaggccatctgcacgccgacgacggcctgcgatttgtcttcgccgaagtaggccggcgtcgagtggatgacgcacggataaatcggcgcgcacccgaagccgatgaccaccagcccaacgaccacgccaaggtggtgaggcaatggcacgaacatggtgaggatgccggcgagcaccagcacttggccgaggcgaatcatgaccgggtccttgaatcgcatggtcagaaagccggaaagcgcacgccccacggtgatgcctacatagaataggctggcccagctggcggcggtgatcttgtcgatgccgctgtgcatcaccatgtagctggaggcccacagacccgccgtggattcaatggcgcagtagcagaagaacatcacgaggatttccttggcaccgcgaatggcgagcacgccggccacgccgagcggtttgcgttcagcaacagacgccccttcagcattaccacatccctcggcattgccgtcagatgatgcggcaccatcggtcgattcgccgcccccagtcgtgccacgtttcttccacagcggcaggctcagcaccaggatgacggtcagcatcacctgcaggatcgcgatgtaccgatagccccacggccagccttggccttgagacagcgcatagcccatgatgtaggggccgaccgatgcgccgacgccccacatgcagtgcagccagctcatatgccggctttcgtagtgaatggctacgtagttattgagcgccgcatccacgccacccgcgccaaggccgtacggtatggcgatggccaacagcacccagtaattcggggcaacggagaaacctgccaaggccgccgcagtcaacgccaccgaaacggcggtgaccttgcctgccccgaatttcaatgtcattcggtccgaaagcagcgccgagacaatcgtgaacatggaaatcaccgcggagatgccgccagcccacgccaccggcacgttcagatcctggctcatggtgggccatgcggacccgagtagcgaatccggcaaccccagactgataaacgccacatagatgacggcaagcaacagactggccatgttccatctcccattcacagtacggcaccggttgtgataacgatgtcatcagtctatcgaatagcgcttcagcaacacgcataaaacatatgacaacgtgctcacctcaaacgctaattacggaaattctcggtaagcacgatgtcattatcagcgacgtcttcgatcaggtatcgatcttggagcggtcgaaatcgtcggcgttgtcgacgatgaactgcttgcgcggcggcacgtcgtcgcccatcagcaggctgaagatctcggatgcctgggcggcgtcctccatgcggatgcggcgcagcatacgcgtgcgcgggtccatggtggtgtccgccagctggtcggcatccatctcgcccagacccttgtatcgctggatgtcgtcgttgtaaccgatgtgcttcttgtcgaggtcggccagtttgccggccagctcgtcatcggaatacgtgtagatgtattcgcccttgtgcgagccggtcaacgcgatgcggtgcagcggcggtactgcggcatacacgtagccgtgttcgataagcggccgcatgtaccggtagaacagcgtcagcaacaggatacggatgtgcgcgccgtccacatcggcatcggtcatcatgatgatcttgtggtagcgcgactgttcgatgtcaaagctctggccggagccggcgcccaccacctggatgatggccgcgcattccttgttggagagcatctgcgtaatcgacgccttctgcacgttcaggatcttgcctcgaatcggcagcagcgcttggaaaccggcgttgcgggcggccttggcggtaccgagtgcggaatcaccctcgacgatgaacagttcggccacgtcgtcattgcccggctggcagtcggagagtttggccggcatcgaggcggattcgagcgcgttcttgcggcgcgtgacctccttggccttgcgcgactggatgcgtgcgtgcatttcgccgacgatcttctccagcacgcggccggattgttccttgtatccgcgtttggagccggtgatcatctcgccgaattgcttgtcggtgagccgggtgacgatcggcttgacctgcgcggtgccaagcacgtccttggtctggccttggaactgaggttcggccacgcgtgcggtgaccacggccacgagtccggcttggatgtcgtcgcgctccaccttcatggcggagtccttcatgttcaccttgagcttgcgggcgttgtcttccaccgccttgcgaatctgcttggtgatggcgttcatgaaaccgtccacgtgagtaccgccgccgggcgtctccacgatgttcacgaagctcatgattgtggtgtcgtagccgttgacccatcgcagggcgatgtccacgccgcaggtgcgttcgatttcctgggcgtgcagttcaccgccttcgcccacggcctgggtctcctccttataggtgccctcgccttggatgcgccagatgtcggagatcggctcgcctttggataggaagtcgacgaagtccttgacgccgccggtgtgcaggaattccacgacgcgcgggtgcgcgggctgctcgccgaacgcgccatcgacgacctggtcgccggccgtcagcgagaagtcctcctcggacaggctctcggtactgtcggcttgagcctcggtggagtcgtcgaagagttcggcatcgttggacgagacgtccaaagccggggcctggtcttgcgcaggttcgactgcgtcggcatcaatggcttcggcggtgtcagtcgccgtttccggtacgttttcgtcaacaatggtgattttgagtccgggcaccaggaagctggtctggcgcacgcggtcgatgagctgttcgtatgagaattcggcggttttgttgaaaatctccggatcataccagtagcgaatacgggtaccagtggttttgggagataccttgccgatgatttccagctcggtgggtcggttcttgcgagtgcgcttgaacggggaatcgggagacggattggccgggtcggcatccgtgtatacgccagggtgaccttggtggaaggtcatgtggtgcgtcttgccgtcacgatccacttcgacgtccagtcgggagctcagggcattgaccacggaggagcccacgccgtgcaggccaccgacggcgttataagacgagttgccgaacttggcaccggcatgcagtttggtcagtacgacctccacgccggacaggccggttttcggttccttatccaccggaatgcctcggccattgtccgcgacttccacggaaccgtcggtgtgcagggtgaccacgatatcgttgcagaagccggccaaggcctcatccacggagttatcgatgatctcccacaggcagtgcataagaccctgcgagtcggtggtgccgatgtacatgcccggacgcttgcgcaccgcatccaagccctcaagaacagctaggtccttggcgccgtattcttctttgggcatacagtcctatttttctcttcaaatgcttggctcccctcacagaggggagccagatgatcattgatccaggaagtcgcgcagggtctgcgaacgggacgggtggcgcagcttggacatggtcttggactcgatctgacggatgcgttcacgggtcacgccatacacacggccgatgtcgtccagcgtcttcggctggccgtcttcaaggccatagcgcatcttgatgacgccggcctcacgcggagacagggtttccagcacctgcttgaactgttcctgcagcagggagaaggccacggcgtcggacggagcgatggcgtcggtatcctcaatgaggtcgccgaactcggaatcgccatcctcgccaagcggggtgtgcagggaaatcggttcgcggccgtacttctgcacttcctgcaccttctcaaccggcatgtccagctcgcgggccagctcgtccggcgtaggttcacgccccagatcctgcagcatctggcgctgtacacgggacagcttgttgatcacttcaaccatgtgcacaggcacgcgaatggtgcgggcctgatcagccatggcacgggtgatggcctgacgaatccaccacgtggcgtaggtggagaacttgaagcccttcttccaatcgaacttctcgacggcacgaatcagaccaaggttgccttcctggatcaaatcaaggaagagcatgccacgacccgtgtaacgcttggcgagcgagaccacaagtcgcaggttggcttccagcagatggtccttagccttcttgccgtcggcggcggcccacttgagttcacgcttgcgcttgaactccatgccttcactttcggtgtcgagcaggtgctgggcgtacaggccggcctcgatgcgctcggacaggtcaacttcctgttcggcgttcagcaggctcacacggccgatctgcttcaggtagtccttgaccgggtcggcggttgcgccggccgcgatcacacgacgcttcggattgcccgaagggatgatgttctcttcctcatcatccgtgtcggagaccacgtaggcacccttttccttgggctgctcgggtgccttggacttggcttcttcctcgtcctcgtcgtcttccacatcgtcgtcgtcggcatcgtcctcatcgaggtcttcgtcgtcggcatcgccttcgtcaacgtcgtcaagatcctcgccgaggtcgtcaacatccaaatcgtcgtcgttgacctcggcatcgtcatcaagctcgtcatcgacctgagtgtcctcgtctttgacgagctcatcgtccttggccttcttcgcggttttcttcgcggcggacttgcgcgtggtctttttcgagggctctgcggacttggacttcttggcagaagtcttgcgcgcggtggtcgtagagctggccttcttcttggtctcggtctcctcgctggactcggctgtctgcttggttgccgtcgtttccttcgtggccaaaactgctccttctgatctctcgccgtgaagtgcatataccacacgggcccacttctggcaagggcaaatcgtcaactatgtgagtaaaccaccctccacggacgattattcccacatcgttgcccgacgtgttgccgatcaccacacgctttccttccgcgcatcgcgcataaaacctcggaaatccgccgtttctgttcattcagcccgagcaccatgccggtgccacgcctcgatcggcggctgagaatatcatcgccgccagcgaacaatcctcatcgagcagcaggcatcgcaaggcgaacaccattgctcgcggatcgcccagccaccataaggtgtaggcgatcacggccaatggctgtatgcagtacggcaccggtgaggcttccgcgatatcgagcaacataccgatgccggcatggcaacgctccttatccggcatcatgccttcatcctcgaatgcgcaggtcagcagctcgcccattcgtgttctcgtacgtgccagatgcggtcgcgccgcgaattccatgagccatgacttggggcaacggctttcatcaataaccaacgagagaatcagcgcatcacgaatcgataaggtctcgcgcatgcccaccgcaaacgcggccatcgtctctcggcctaggtcggtgttcccggcatcaagacaagacagccattcatccaatggttcggccacccagtcggcattagcctgttgcgcgcctcgaagtcggcgatcattgcgaaattcctgtgatctcgtctccaactcatcaaagccaaagggctccgtctgctcggcggcgtgccgtttggcgtgtcggctcttacgcggcttgtgcggcgtgttgttgttcatcatgtcctccttgactaatggtgtgcaatctattggtgttgtggtgcgcgccgagccggatagctcatgcgccgagggggtgtgtgcccactatggctgaaaacgccgtatgacgcaggaaaaaacgaccattgtggttctagcttcaaaacccttgatttccaacgttcttgtgttcttcaaaccctgtggataagttattaggcatgtgcacaactgctaacaaccgcgaaatcatcgagccacgcatcattcagttggtgcgggaactgactgccgcccccgccaccgacgaggttgccgacgccctgaaaccggtgatggaacaggttgtgggccaagccgcctcctccagccaaggaggcaaacgactgcgtgcgttgctcgcattggacgccttcgatattcttgccggcgacgtgactcctgatcggcgtgacgccatgatcgacctagcctgtgccattgaagtgtttcagacggccgcactggtgcatgacgacatcatcgacgaatccgatctgcgccggggcaggccttccgcacaccgtgccttggaacaggccgtacacagcggtgccataggccgtggcttgggcctgatgcttggcgatattctggccaccgcctgcattgaaatcacacgccggtccgccagccgtcttcccaacaccgatgccttgaacgaggcgtttcttaccatgcagcgcgaggtggagatcggccagatactggacttggccgtcgagatgaccccgttgtctgatcccgaagctctggcgaacgcctcattgaacgtattccgctggaagacagccagttacaccaccatcgccccactgctgcttgcactgctggccgcaggagagagcccggatcaggccaggcattgcgcgttggccgtaggccggccgctcggactggcgttccaactggccgatgacctgttggatgtcgtcggatcaagccgcaataccgggaaacccgttggcggagacattcgagaaggcaaacgcacagtgctgttggctgatgctctgtctgcggcagatacggaggataaggccgatctgattgccatcttcgaagcggattgtcgcaacgacgaccaggtagcccgcaccattgaactgttcacgtcgaccggtgctcttgatcgatcccgcgagcgcatcgctgccctatggggtgagtcccgtaaggcgattgccggtcttgagctgaattccgaagcgcagcgccgtctgaccgaggcttgtgcgcgattcgtccccgaatccttgcgatagtccacaatgcgagccgccgggtcatgagaccatgaacaccggtgaaaacccgtgaaaactatgcgccgatgctccggccgcgtaaccggggccatgtacactgaacatgtttagtcgtgattaaaggaatcgtacgatacaacatgagtgagaacgagcccgcgcagatgattgagggacgctaccgcatcgtgcgcaatatcgccgagggtggtatggccaccgtgtatgaggccatcgatgagcgtctggggcgcaccgtggcgattaaggtcatgcacacacaactcgccaaaggcccgcatcgggagcagttcgtcgaacggttccgccgcgaggccaattcggccgcgtccatcgccaacccgcacatcgttcaggtgtatgacaccggcgagttcaatggacttgattttctggtcatggaatatgtgcatggcgtcaatctgcggcatgagatgaacgcccaaggcacattctccgtacgtgagacgctgcgcgtggtcgcggagacgctggatggtctggcttccgcacatcgcgccggcgtggttcaccgtgacatcaagcccgagaacattttgatcaatgatcgcggccatgtgcagatcactgatttcggtctggccaaggccgccagccaggccacattgagctccaccggcatgctattgggcaccgccgcttatctggctcccgaaatgatcgagaacaatcaggccaccgcgcaaggcgacctgtattcggtgggcatcatggcatgggagatgctgaccggcaaggtgccgttcgattcggataatccggtgacgcttgttttcaagcatgttcatgaggacgtgccgtccgtggccacggtctgtcagggcattgatccgtccgtggcggcgttcatcgcccatctgaccgcgcgtcaggtggatgcccgccccgccgatggcgcggcagcagctgaggaattgagccagttggccgccaaattgccgctggaggcgtggcaataccgtttgcatgccgaacccatcggaggtgatcataccgatgccaccgctgcagcgctggtaggcaatatcgccgagcaggccccgctgaccggcgtacctgccggtgcagcaacgttcgagccgtccgtaccggcgtttttggccgatgatgtcgcaagcaataccgccgataccggtggcgccgcagacgtcaatcctccggctcctccggtcgcccccaccacggcacttgattcgtcgacgccagccgatgcttcggctccccataagacgcaaatcatggcacagtccggcagcgagacacaagtgctgcctcaggccggcgatgccttcacccgagcgcttgccctttccgatgagccggacgtcgcttccaacggcaccgggccaaagaagcagcgcagcaaaaaaccgctcatcatcgtactggtgatcgtgctggtactggctgcaatcggcggaaccgccggctggtggtggtttgccggaccgggcagctattggagtgtgcccaagccggatgacgtgacctgcgatgcgaatgcaggcaccgaatgctcgttggccggcgcggattgggccacgtatgagagcacgttgaaggctctcggcatcccctacaagacgcacaaggaatacagcgacgacgtggcggaaggcaagatcatctcttcttccgtgaacaagaccaaggccgttgtgaacagccgcataagcaagcgagccaatcaggagcttacggtggtggtgtccaagggcgtgcggatgaccatcatcccgaaggatattctcgacgcgaattcggccaatggcaaggacccgttgaacgcgctcaagaaggccggcttcgataatgtcaagcatgacgagtcgaaggatgagtattcgatggacacgccgcagggtgtggcattgacgatctcccctgatcccggtaccacggccaagcacaacgatgaggtgacggttactttgagcaagggaccgatgccggtgaccatgcctaacatcgtcggtaagacccaggatgagatgcaagccgcgctcggcgagttgaagctcacggccaatgtcaccgaacagtacgatgacaaggtcgaggccggtcaagtcatttccgcgtctcaggaagccggagcccagctgaagtggggcgatagcgtggacgtggtgatttccaagggtccggagatggcgacgataccgtccggccttgtcggcaaacaggaaagcgccgtaaccaagacacttgaaggtctcgggttcgaggtgaaaaccgacaaggtgctcggtggcctgttcggcacggtacgtaccgtgaaaagtggcgatacggacctatccaacggcggcaagattcgcttgcgcgatgccaacggcaaccccaccgtcatcaccctcaccatcgtgtgagatttgaatgaggctccctctgtcttgagacgagggagcctcatttgttaattacttttcggcttcttcagcggcctgctgggccttgagctcggccttgaccttctgggcgtattcgttcacgaattcctgaccgctcattttctggattgcggtggaaacacgatcggtcagcgaacgcaaatcatcatgtgtaatttcatcagccggcttcttcgcaacctcaatcggcttgccatacaacaccttggtcttgcccttcttgggaatcgacgtgccaatcggctgcagcttgtccgagccgatgatggcggtcggcacaatcgggcaaccggtctcgagcgcaagtcgtgcggcaccggtgtgtcccttgtacagtcgaccgtccggactgcgcgtgccttcaatgtggataccgaacaggtgcccatcctcgataatctcgcgtgcatgctcgagtgcgccaagcgacttgctgccaccggaacgatcaaccgggaacacgcccacggacgtgaaccaccacttcttgaacttgcccttcaatcccttgccctcgaagtattcggctttgcccatgaagtgcaccatgcgcgggcaggtaatcggaatcaaagcatcgtcaatcaccgccagatggttggctgcgataatcgcgccaccctctcgaggcacgttattcagtccactgacagcagggctcaaacgatgatgagcaatagggccgagacctttgacgaagaaccagtagagcacttggcattcctcccgcagacgaactagccattggccggtcgcctgattagagtgacagttatgactgagaaccagaatagcaatgccgacggagagcggccaacccccacgccgggcaacggacaggattccgatacttcgtccaagtcgtcgactcccggtgccgccggaccggccacgaatggtgccgatacaccgcaatcgcatgacatgaacgatttggatgcggcgtgggccgcgttcgaagccgagcatcaggccgacttgcatgacgtggcttcctccaggcaggccaaaaagttcgagaagcaggccaagaaacgcgagaaggaagcactgctttccgtagatgacttggatatcggctcgttcaccgatgatgctcgcccgagccgtggcggcaaaaaaggcaagcagtcaggcccccgtgatttcaccggctccagctggctggataccgataatgtgatggacgcctatgatgatggcggcttcactcccccgaaccctgatcttggtccggtcaaagcatctacggtactgctgacggcgttgctcatcatcggtctcgcaggcgaaacggtgatgatattcgttcccggcttgaacgtgattcctctcttaggcgcgctgctcaatattctcttcgggctgggcgtcattttgggtctgggcggattggtggccaaaatcctcaaccgcaaagaccgcccaggggaccggggcggatactacgacgacggcgcgcgggtctaacgcttggactgggcggtttcgatccacttgttgaacagggcttcagccttgccggagtcgacagcatcctcggccagcttgtaggcctcggcgaagcgctcggccagtgtgccgttgccgaccagattgccgtcagccacgatggcggaggcagcgttgagcagcgcggtggtgcgggacgtaatgtccttgccggccaggaagtccttaaatgcgttggcgttgacgtccggcacgccgcccttgagctggtcgacggtaatcttggcgagacccagatccacggtcgggtcgaactcggtttcggtgaccttgccgtcgcgaatctcccagacggaaaccgggccggtgggggcgagctcatccatgccctcatgcgaagtgtagaccaagccggactgaccacggctggcgtagacggcagccatgatcgggctcaccttgcggttggcgcagccgatggccacgtgtgccgggttggcggggttggtcaacggtcccaggatgttgaagacgcacggaatgccgagcgcggcacgaatcgggcccacgaagcgcatggccgggtggaaggtgcgggcgaacgcgaaggtgatgcccacctcgtcgcccacttcgccgacggcctccggcttcaaatccagcggcaggccgaggtcttcgagcacatcggcggcaccgcacttcgaggatgcagcgcggttgccgtgcttgacgatcttcacgccggctgcagcggcggccacggagcccatggtggacaggttcacggtggcgaagccgtcaccaccggtgcccacgatgtcggtggtcccaccggaaacgttcagcggcacggcgtgggagaccatggccttggcggcaccacgcacctcgtcggcggtcagtcccagctgctgctgcatagcgagcgcggcacccacggcggccggattggcgttaccttgcatcaggtcgtccacgaaccactccgattcctcagcagtaaggtggtctcccccgaccagcttggtgagaatcgacttccatgtgatctcggccatgatgccctccttggcgtttcctacgccgtgtgatgtatgttcgccgctcattgtaatggttcgtcatctcaaggccctgaatcttccatattgcaaaatatggcgctattgctgttttcgtggatgtcggttcgtcgtcgagccgttggtttcgtaagcgtgaggggcgttcccgcgtattctgttttccgaccaaagaaatgaatcacgaagaacgcctgggcaaaagcccattcaccggattgccgaacgtcaaaggcacggttgcagaggatgcgcggatcacggattcgccgccgcgttccgaacccgtgctcgagatccgggtgcgtccacgtgcgggtatgctccgatgctcccgatgcggaaggaggcgccgcgggcatgatcagggcggcggcgtgcggcgtcgtggtcgcttccgtgccgtgggccgagccgggcagccggtccacacgcgatttcgaatcggaacgcgcgtggccgatgagcgtcgcgaaccagaagaccgtaagcggttttccgcacgtcgcgtggcgcgccgccggaagacgccgcccatagggtcgccgaacggttgaaagcgtcgatgccgtctccgttcggcggcctcacgtcgatcggcgtggacgagaccggctaccgcaaaggccacacgtgcatcaccgtggtcgtcgaccacgaacggcatcgggcgatatgggcgcacgacgggtacggcagggacgtgttcggcctgttcttccaaacgttgacgcccgaacagcgcgcctccatcagggtcgtcgccggggacggggcccggtggatcgactcatgcgtgcatgagtggtgcccgaacgccgaacgcgcgcccgacgggttccacatcgtcagttggacgagcgacgcgcccgacaaagtcaggagacacccgtggaaccaggcgcgccgcgacggggacgagaaatccgtcaagcgcatgcgcggcgtcagatacaccgtcctgaagaaccccggcaagctgaccgacagacggtccgaggcgtccgggaacctgcgggacacggaccccaagggccggccctaccgttcatgacggctcagggaacccctccggacgatgcccaaacgaccggccgaccaggccgggaccgaactggaccgccgggtgttccgggcgtcccacagccgcatccccgaga
